United States Patent Application Publication US 2014/0259212 A1 - sequence listing, part 6

SEQ ID NO: 13706 - DNA, 1284 bp, Novosphingobium aromaticivorans DSM 12444
  CDS (1)..(1284): transl_table=11
atgagcgcaccccgcgaaagccggaaggccatcggcaaccatccgctccatcccgaaacgctcatgctgaaccacggttacgacccgcacctgtccgaaggcgcggtgaagccgccggtgttcctgacctcgaccttcgtgttccccacggccgaggaggggcgcgacttcttcgactatgtcgccggccgcaaggagccgccgccgggacagggccggggcctcgtctattcgcgcttcaaccatcccaacagcgagatcgtcgaggacaggctggccgtctacgagggcgccgaggcgggcgtcgtgttctcctctggcatggcggcgatcaccactgcgctgcttgccttcgcgcgaccgggcgacgtgatcctgcattcgcagccgctctacggcgggaccgagacgctgctggcgaagacgttcgccaacctcggcatcggcgcggtcggatttgccgacgggctgggcgatgaagagatcgcggcggcggccgatgcggcgatggggcgcggcagggtgtcggtcgtgctgatcgagacgccggccaacccgaccaacagccttgtcgacatcgcgctggcccggcgcgtctgcgatgcgatcggcgaggcgcaggggcaccggccgctgctgatgtgcgacaatacgctgctcggtccggtcttccagcgaccgctcgatcatggcgcggacgtctcgctctattcgctgacgaagtacgtcggcgggcattcggacctggttgccggtgcggcgctgggttcggcggcgatcatgcgcgagatccggctgctgcgcagcgccatcggcacgcagctcgatccgcacagttgctggatgcttggccgctcgctcgagacgctggcgctgaggatggaaaaggcgaatgccaacgctgcggtcgcggcggcattcctgcgcgaccatcccaaggtgcggcatgtctcctatccgttgttcaacgaaccggattcgccccaggctcgtctctttgcccggcaatgtaccggggccggatcgacgttctcgttcgatatcgttggcggtcaggatgccgccttccgcttcctcaacgcactccagatcttcaaactggcggtgagccttggcggcacggagtcgcttgccagccatccggggaccacgacgcattcgggcgttccggccgacgtgcgcgagcggatcggcgtacacgagacgacagttcgcctgtccatcggcatcgagcatccggacgatatcgtcgccgacctcgcgcaggcgctggatcgggcctga

SEQ ID NO: 13707 - protein, 427 aa, Novosphingobium aromaticivorans DSM 12444
MSAPRESRKAIGNHPLHPETLMLNHGYDPHLSEGAVKPPVFLTSTFVFPTAEEGRDFFDYVAGRKEPPPGQGRGLVYSRFNHPNSEIVEDRLAVYEGAEAGVVFSSGMAAITTALLAFARPGDVILHSQPLYGGTETLLAKTFANLGIGAVGFADGLGDEEIAAAADAAMGRGRVSVVLIETPANPTNSLVDIALARRVCDAIGEAQGHRPLLMCDNTLLGPVFQRPLDHGADVSLYSLTKYVGGHSDLVAGAALGSAAIMREIRLLRSAIGTQLDPHSCWMLGRSLETLALRMEKANANAAVAAAFLRDHPKVRHVSYPLFNEPDSPQARLFARQCTGAGSTFSFDIVGGQDAAFRFLNALQIFKLAVSLGGTESLASHPGTTTHSGVPADVRERIGVHETTVRLSIGIEHPDDIVADLAQALDRA

SEQ ID NO: 13708 - DNA, 1239 bp, Bradyrhizobium sp. ORS278
  CDS (1)..(1239): transl_table=11
atgtccaattctcctgcgtccaactctcctgcgtcgaagtcctccgcgaaggccccggcgtcgttctctcactaccgtcctgaaacgcgactggtgcattccggcggcctgaggtccgaattcggcgagaccgccgaggcgctctacctcacgcaagggttcgtctacgccagcgccgaggagtgcgaggcgcgcttcaagggcgaggatcccggctttatctattcgcggttctccaacccgacgaccgcgatgttcgagcgccggatgatcgagctcgaaggcgccgaagcctgccgctcggccgcgaccggcatggccgcggtcaccaccgcgatcctggcccccttgcgcgccggcgatcacgtcgtcgcggccaaggcgctgttcggctcctgccgctacgtcgtcgaggacctgctgccgcgctacggcatcgagtcgacgctggtcgacgggctcgatctcgaccagtggcagaaggcggtcaggccaaacaccaagtcgttcttcctggagagccccaccaatccgaccctcgacgtcatggacattccggcgatcgccgagatcgcgcatgcccatggcgcgcggctgatcgtcgacaacgtgttcgcgacgccgatctggcagagcccgctggcgctcggcgccgatgtcgtcgtgtactccgcgaccaagcatatcgacggccagggccgctgcctcggcggcgtgatcctgtcgtctgaggcgttcatcgccgagcacatccacaacttcatgcgccagaccggcccgtcgatctcgccattcaacgcctgggtgctgctcaagggcctggagacgcttgcggtgcgcgtgcgcgcacagacggatacggcgggaaaggtcgccaacttcctcgccgcgcatccgaagatctcgcggctgatctatccgggccgcgaggaccatccgcaggcggcgacggtcaggaagcagatgcgtgccggctcgaccctggtcggcttcgaggtgaagggcggcaaggccgctgcgttccgcacgctcaacgggctcaggctcgcgcggatctcgaacaatctcggcgactccaagacgctggtcacgcatcccgcgaccaccacgcatcagcggctgacgccggaggcgcgcgccgagctcggcatcagcgagggcttcatccgcttctccgcggggctcgagcatgcggatgatctgatcgaggatctcgacgcggccctgaaggccgcgtag

SEQ ID NO: 13709 - protein, 412 aa, Bradyrhizobium sp. ORS278
MSNSPASNSPASKSSAKAPASFSHYRPETRLVHSGGLRSEFGETAEALYLTQGFVYASAEECEARFKGEDPGFIYSRFSNPTTAMFERRMIELEGAEACRSAATGMAAVTTAILAPLRAGDHVVAAKALFGSCRYVVEDLLPRYGIESTLVDGLDLDQWQKAVRPNTKSFFLESPTNPTLDVMDIPAIAEIAHAHGARLIVDNVFATPIWQSPLALGADVVVYSATKHIDGQGRCLGGVILSSEAFIAEHIHNFMRQTGPSISPFNAWVLLKGLETLAVRVRAQTDTAGKVANFLAAHPKISRLIYPGREDHPQAATVRKQMRAGSTLVGFEVKGGKAAAFRTLNGLRLARISNNLGDSKTLVTHPATTTHQRLTPEARAELGISEGFIRFSAGLEHADDLIEDLDAALKAA

SEQ ID NO: 13710 - DNA, 1182 bp, Synechococcus sp. WH 7803
  CDS (1)..(1182): transl_table=11
ttggcagctgagcgcattcacctcttgcagcatcccgcgaccgcacccgctgatgccacccttgccattcatcacggcgagagcttcgcggatggcaccggcacggtcatgccgccgatttacgccacctcaacgtttgcccatggcaatcctggtggcttcgactacacccgttcaggcaacccaaacttccgcattctcgagggtgtactggcctcagtggagcgctgtgatcacgccacggtgttcggctcgggggtcagtgccatcacggccatcgcctccaccctccaacagggagacctggtgctctgcgaagagaacctctatggctgcaccgtgcgtctgttcgaacaggtgttcgccaaattcggcgtgcgcacggaatgggtggatttcacggatccctccgcactaacggccatcgttgagcgccagcccgccatggtgtggctggagagccccaccaacccactgctcaaagtgattgatctggaagcggtctgcagcgcagccagaggagcagaggtgcctgttgtggtcgataacaccttcgccacagccttggtgcagcgccccttacagctgggtgccacgctctcgctcacgagcaccacgaaatacatcaacggtcactccgatgccctcggcggtgccgtctgcacagatgcccctgactggcatgcacgcatggtgttcgcccagaaggctttgggactgatgccatcccccttcgactgctggctgatcacccggggcatcaaaaccctgcctctgcggctgcgccaacagattgaaaacgcggccgtgctggccaaccacctcgccgagcacccccaggtggactgggtgcgctacccccaccgtgcggaccatccccagcaggctgtagccctcaggcagatgcaaggcggtggagccatcgtgaccatcggcctcaacacaagccgcgaacaggcgtatgcggtatgcaaagccctgcgctggttcaccatggccgaaagcctggggggcgtggagagcctgatctgccatcccgccaccatgacccacgccgctgtatccccagaggtgaagagcaagctgggcatcaccgatgggctgattcgtctctccgtgggctgtgaagacgtcgccgacctgatcacggatctcgatcaggccttggcgacgctgtcatga

SEQ ID NO: 13711 - protein, 393 aa, Synechococcus sp. WH 7803
MAAERIHLLQHPATAPADATLAIHHGESFADGTGTVMPPIYATSTFAHGNPGGFDYTRSGNPNFRILEGVLASVERCDHATVFGSGVSAITAIASTLQQGDLVLCEENLYGCTVRLFEQVFAKFGVRTEWVDFTDPSALTAIVERQPAMVWLESPTNPLLKVIDLEAVCSAARGAEVPVVVDNTFATALVQRPLQLGATLSLTSTTKYINGHSDALGGAVCTDAPDWHARMVFAQKALGLMPSPFDCWLITRGIKTLPLRLRQQIENAAVLANHLAEHPQVDWVRYPHRADHPQQAVALRQMQGGGAIVTIGLNTSREQAYAVCKALRWFTMAESLGGVESLICHPATMTHAAVSPEVKSKLGITDGLIRLSVGCEDVADLITDLDQALATLS

SEQ ID NO: 13712 - DNA, 1266 bp, Thermus thermophilus HB27
  CDS (1)..(1266): transl_table=11
atgaggtttgagaccctacagctccacgccggttacgagcccgaacccaccaccctaagccgccaggtccccatctaccccaccacgagctacgtcttcaaaagccccgagcacgccgccaacctcttcgccctcaaggagttcgggaacatctactcccgcatcatgaaccccacggtggacgtgctggaaaagcgcctcgccgccctggaaggggggaaggcggccctggccaccgcaagcggccacgctgcccagttcctggccctcaccaccttggcccaggcgggggacaacatcgtctccacccccaacctctacgggggcaccttcaaccagttcaaggtgaccctgaaaaggctcggcatagaggtgcgcttcacctcccgcgaggagcgccccgaggagtttttggccctcaccgacgagaggacccgggcctggtgggtggagtccatcggcaaccccgccctcaacatccccgacctcgaggccctggcccaggccgcccgggagaagggggtggccctcatcgtggacaacaccttcggcatggggggctacctcctgaggcccctggcgtggggggcggctttggtcacccactccctcaccaagtgggtggggggtcatggggcggtgatcgccggggccatcgtggacggggggagcttcccctgggagggtggccgctaccccctcctcaccgagccccagcccggctaccacggcctgaggctcaccgaggccttcggggagctcgccttcatcgtcaaggcccgggtggacggcctgcgcgaccagggacaggccctggggccctttgaggcctgggtggtcctcctcggcatggagaccctctccttaagggccgagcgtcacgtggaaaacaccctccacctcgcccactggcttctggaacagccccaggtggcctgggtgaactacccggggcttccccaccacccccaccacgaccgggcccagaagtacttcaagggaaagcccggggccgtcctcaccttcggcctgaagggcgggtatgaggcggcaaagcgcttcatctcccggctcaagctcatctcccacctggcgaacgtgggggacacccgcaccctcgccatccacccggcctccaccacccactcccagctctcccccgaggagcaggcccaggccggggtttcgccggagatggtgcggcttagcgtgggcctggagcacgtggaggacctgaaggccgagctcaaggaggcgttggcatga

SEQ ID NO: 13713 - protein, 421 aa, Thermus thermophilus HB27
MRFETLQLHAGYEPEPTTLSRQVPIYPTTSYVFKSPEHAANLFALKEFGNIYSRIMNPTVDVLEKRLAALEGGKAALATASGHAAQFLALTTLAQAGDNIVSTPNLYGGTFNQFKVTLKRLGIEVRFTSREERPEEFLALTDERTRAWWVESIGNPALNIPDLEALAQAAREKGVALIVDNTFGMGGYLLRPLAWGAALVTHSLTKWVGGHGAVIAGAIVDGGSFPWEGGRYPLLTEPQPGYHGLRLTEAFGELAFIVKARVDGLRDQGQALGPFEAWVVLLGMETLSLRAERHVENTLHLAHWLLEQPQVAWVNYPGLPHHPHHDRAQKYFKGKPGAVLTFGLKGGYEAAKRFISRLKLISHLANVGDTRTLAIHPASTTHSQLSPEEQAQAGVSPEMVRLSVGLEHVEDLKAELKEALA

SEQ ID NO: 13714 - DNA, 1173 bp, Listeria monocytogenes str. 4b F2365
  CDS (1)..(1173): transl_table=11
gtggctaatgaatatgcgcaagatacggctgtgattaaagcgagcctcgggattgataaagagacaggtgcgcttaatacgccaattcatttatcgtctactttccatcagcatgactttgataattatcacgcttatgattatgcgagaagtgggaacccaacgagagaaaaagtggaacaagcgattgcggaactggaaggtggtacgaatggttttgcctttgctagtgggatggcggctgtttctgcagcgctctttactctttctaagggagaccattttattattgcgaaagatgtgtacggcgggacgtttcgtttggtggagcaagtgttgccacgttttgggattacgcatacttttgttgatacgacaaatattgacgaagttgcgaaggcatttcaagcgaatacgaaactgatttacttggaaacaccttctaatccgttgctgcatgtgacagatattcggactgttgcaaaacttgcgaaagcgaatgggtgttatacgtttgttgataatacatttttgacgccgttaattcaaaaaccgttagaattaggtgcagacttggttattcatagtgcgacgaaatttcttggagggcatagtgatattttggcggggctaattgtcaccaataatcctaatctggctgaagcagtgtactttttgcaaaattcgactggtggggttcttggagtgcaggattcgtggttgttattgcgcggactaaaaacactttctgtgcggatgaaggctgggacggaaacagcggagaaaattgcgctatttttaaatgcggagccagatgtggtggcagtgcattatccggggttaccttctcatgcgggttatgacattcaagtggaacaggcgacaagtggcggggccgttttatcgtttgatttaggcagtgaggaagctgtgcgagaactagtaacacatttggaattgccggtattttctgtgagtttgggcgcggtggagagtattctttcttacccggctaaaatgtctcatgcggctgttccggaagaggagcgtttggcgcaaggaattacgccaggattattacgtttttcagctggactagaagatgccgatgacttgattgctgatttaaaacaagcactttctttcattaagaagggaagtgttgcgaaatga

SEQ ID NO: 13715 - protein, 390 aa, Listeria monocytogenes str. 4b F2365
MANEYAQDTAVIKASLGIDKETGALNTPIHLSSTFHQHDFDNYHAYDYARSGNPTREKVEQAIAELEGGTNGFAFASGMAAVSAALFTLSKGDHFIIAKDVYGGTFRLVEQVLPRFGITHTFVDTTNIDEVAKAFQANTKLIYLETPSNPLLHVTDIRTVAKLAKANGCYTFVDNTFLTPLIQKPLELGADLVIHSATKFLGGHSDILAGLIVTNNPNLAEAVYFLQNSTGGVLGVQDSWLLLRGLKTLSVRMKAGTETAEKIALFLNAEPDVVAVHYPGLPSHAGYDIQVEQATSGGAVLSFDLGSEEAVRELVTHLELPVFSVSLGAVESILSYPAKMSHAAVPEEERLAQGITPGLLRFSAGLEDADDLIADLKQALSFIKKGSVAK

SEQ ID NO: 13716 - DNA, 1158 bp, Picrophilus torridus DSM 9790
  CDS (1)..(1158): transl_table=11
atgttaaatggttttaatacaagggccgtacaggccggtgatttaaaaataagggaaattggaaacgttgttacaccgatatttgaaaacagcacatttatctatccaaacagtgaatccgagtacatggatagctcaagcggcatgccatacatatattcaagatggggaaatcctactgtgcaatcccttgaggataaatacagggtccttgagaataccgggcatgctgttgcattttcatccggaatgggcgcgataacagccgcagtgctatcaaatataaaaaagaaaagaatactatcaattatggatctctatggacaaacgtttcagttcttttcaaggacgttaaaaactcttggaattcatgtggacttcatagacgttgataaattaaacaacctggactttgatgccaaaaattacgatcttgtatatgcagaatcaataacaaacccgcttttaaaggtaattgatataaaaaacgtggcatcgttctgccatgaaaatgatgttttatttatagatgatgcgacctttgcatcgccttataatcaaaatcctgtggaactcggtgctgatattgttgttcacagcgcaacgaaatacatatcaggccattccgatgtaattattggcattgccggcacaaacaattattacaataatttaatagaaatgagaaagacacttggtgcatcgcctgatgcattccaggcatatctatcataccgtggcctaaaaaccctcggcctgaggatggagaggcataataaaaatgccatggagcttgccaggtttttaagggattcaaaaaaggtattgaatgtaaactaccccggccttgatgataataaataccatggcattgccgggaaggagatgaggggctacggtggcatgctgtcattcacattaaacagcatggaggatgcgcataagctaataaagaaccttgagatacctgcctatgctgcaagccttggcggtgtggaatcattgataaccatgcctgttgaaacaacacatgcatcgctttcacctgaggaaagaagatcacttggaatatcagactcgctggtaaggttttcaactggcatagaggatatcgatgatattataaaagattttgaaaatgcactttcaaaattataa

SEQ ID NO: 13717 - protein, 385 aa, Picrophilus torridus DSM 9790
MLNGFNTRAVQAGDLKIREIGNVVTPIFENSTFIYPNSESEYMDSSSGMPYIYSRWGNPTVQSLEDKYRVLENTGHAVAFSSGMGAITAAVLSNIKKKRILSIMDLYGQTFQFFSRTLKTLGIHVDFIDVDKLNNLDFDAKNYDLVYAESITNPLLKVIDIKNVASFCHENDVLFIDDATFASPYNQNPVELGADIVVHSATKYISGHSDVIIGIAGTNNYYNNLIEMRKTLGASPDAFQAYLSYRGLKTLGLRMERHNKNAMELARFLRDSKKVLNVNYPGLDDNKYHGIAGKEMRGYGGMLSFTLNSMEDAHKLIKNLEIPAYAASLGGVESLITMPVETTHASLSPEERRSLGISDSLVRFSTGIEDIDDIIKDFENALSKL

SEQ ID NO: 13718 - DNA, 1164 bp, Bacillus anthracis str. Sterne
  CDS (1)..(1164): transl_table=11
atgagttattctatagatacactcttactacacaaccaatataaacatgatccacaaacaggagctgttaacgttcccatctataacacatcaacattccaccagttcgatgtagatacgttcgggaaatatgactatagcaggtcaggaaatccaactcgtgaagctcttgaagacatcattgctttattagaaggcggaacgaaaggatttgccttcgcatcaggaattgcagcgatttctactgcattcctccttctttcacaaggtgatcacgtactcatttcagaagacgtatacggagggacttatcgaataataactgaagttctctcccgttatggtgtttcacatacatttgttgatatgaccaatctagaagaaatcaagcaaaatataaaacaaaatacaaagctcttttatgtagaaacaccttctaacccgcttttaaaagtaacagatattcgtgctgtttctacacttgcaaaatctattggcgctcttacttttgttgataatacatttttgacaccactattccagaaaccacttgatctcggcgcagatgtcgttcttcatagcgctacaaagttcattgctggtcacagtgatgttactgctggattagcggtcgtaaaagatgccgaacttgctcaaaaacttggatttttacaaaatgcattcggcgccattttaggacctcaagattgctctctcgtacttcgcggtctaaaaacattacatgtacgtcttgagcattcagctgcgaatgccaataaaattgcacagtatttacaagagcacagtaaaattcaaaatgtctattatcctggcttacaaacacatcttggatttgatattcaacaatctcaagcaacatcggccggagctgtcctatccttcactttacaatcagaagatgcactccgccaatttttatcaaaagtaaaattacctgtctttgcagttagtttaggagctgtcgaatcgattctttcctatccggctaaaatgtcacatgcagcactgtcacaagaagctcgtgatgaaagaggtatttccaattcattacttcgtttatccgtcggccttgaaaatgttgatgatttaatatccgactttgaaaatgccctttcttatgtagaagaacctgtaaatgcatag

SEQ ID NO: 13719 - protein, 387 aa, Bacillus anthracis str. Sterne
MSYSIDTLLLHNQYKHDPQTGAVNVPIYNTSTFHQFDVDTFGKYDYSRSGNPTREALEDIIALLEGGTKGFAFASGIAAISTAFLLLSQGDHVLISEDVYGGTYRIITEVLSRYGVSHTFVDMTNLEEIKQNIKQNTKLFYVETPSNPLLKVTDIRAVSTLAKSIGALTFVDNTFLTPLFQKPLDLGADVVLHSATKFIAGHSDVTAGLAVVKDAELAQKLGFLQNAFGAILGPQDCSLVLRGLKTLHVRLEHSAANANKIAQYLQEHSKIQNVYYPGLQTHLGFDIQQSQATSAGAVLSFTLQSEDALRQFLSKVKLPVFAVSLGAVESILSYPAKMSHAALSQEARDERGISNSLLRLSVGLENVDDLISDFENALSYVEEPVNA

SEQ ID NO: 13720 - DNA, 1161 bp, Staphylococcus aureus subsp. aureus MRSA252
  CDS (1)..(1161): transl_table=11
atgacactttcaaaagagacagaagtgatattcgattggcgtagaggtgtggaatatcattcagctaacccaccactctatgattcttcaacattccatcaaacaagtcttggtggcgatgttaaatatgattatgcacgaagtggcaaccctaaccgtgaacttttagaagagaagttagcacgattagaacaggggaaattcgcttttgcttttgcatcaggtattgctgctatttcagcagtacttttgactttcaaatctggtgatcatgtcatcttacccgatgatgtatatggcggtacttttcgcctcactgagcaaattttgaatcgatttaatattgaatttacaaccgtagatactaccaagctcgaacaaatcgagggtgccattcaatcaaacacaaaattaatttatatcgaaacaccatcgaatccctgttttaaaattactgatatcaaagctgtttctaaaatagccgaaaagcatgaactactggtagctgtggacaatacatttatgacaccgttaggtcaatcacctttattacttggcgctgatatcgtcattcatagtgctacaaaatttttaagtggacatagcgatttaattgctggtgctgtcattactaataatgaagcaatgagtgaagcactttatttaatacaaaatggtacgggcaatatgttatctgctcaagatagctggacgcttgctaaacatttgaaaacatttccaatcagatttaaacaatctgtcgaaaacgcgcaaaaaatcgtgtcatttttaataaagcaagatgaaatttcagaagtttattatccgggacttactgctactcatttagaacaagctaaaaatggcggtgccgttattggctttcgtttagctgatgagtctaaagcacaacaatttgtcgatgcactgacattaccactcgtttcagtgagtctgggcggtgttgaaacgatactttcacatccagcaacaatgtctcacgctgcactacctgaagaagtgagacaagaacgtggtatcactttcggtctgttccgattaagtgttggtctcgaagatcctgatgaactcattgcagacatcaaatacgcattaaaggaggcattcaatgagtcaattcctcacacacttgaaagataa

SEQ ID NO: 13721 - protein, 386 aa, Staphylococcus aureus subsp. aureus MRSA252
MTLSKETEVIFDWRRGVEYHSANPPLYDSSTFHQTSLGGDVKYDYARSGNPNRELLEEKLARLEQGKFAFAFASGIAAISAVLLTFKSGDHVILPDDVYGGTFRLTEQILNRFNIEFTTVDTTKLEQIEGAIQSNTKLIYIETPSNPCFKITDIKAVSKIAEKHELLVAVDNTFMTPLGQSPLLLGADIVIHSATKFLSGHSDLIAGAVITNNEAMSEALYLIQNGTGNMLSAQDSWTLAKHLKTFPIRFKQSVENAQKIVSFLIKQDEISEVYYPGLTATHLEQAKNGGAVIGFRLADESKAQQFVDALTLPLVSVSLGGVETILSHPATMSHAALPEEVRQERGITFGLFRLSVGLEDPDELIADIKYALKEAFNESIPHTLER

SEQ ID NO: 13722 - DNA, 1143 bp, Staphylococcus aureus subsp. aureus MRSA252
  CDS (1)..(1143): transl_table=11
atgaataagaaaacgaaattaattcacggtggacacacaacggacgactatacaggtgcagttacaacaccaatttatcaaacaagtacatatttacaagatgatattggtgatttacgtcaaggatatgaatattctcgtactgcgaatccaacaagaagttctgtagaaagcgttattgcgtcattagaaaatggcaaacatggctttgcatttagttcaggtgttgcagcaatcagtgcagttgttatgctgttggacaaaggtgatcatattattttaaattcagatgtatacggcggtacttatcgcgcattgacaaaagtatttacacgatttggcgttgaagtggattttgtagatacaacgcatacagattcaattgtacaagcgatacgcccaacaacaaaaatgttatttattgaaacaccttctaatccattattacgtgttactgacattaaaaagtctgctgaaattgcgaaagaacacggtttgatttcagtcgttgataacacatttatgacactttattatcagaatccattagatttaggcatcgatattgtcttacattctgcaacgaaatatttaggtggacatagtgatgtcgttgctggtttagttgcaacatcggatgacaagcttgcagaacgtttagcatttatttcaaattcaacaggtggcattttaggacctcaagatagttatttacttgtgagggggattaaaacattaggtttacgtatggaacaaattaatcgcagtgttattgaaattattaaaatgttacaagcacatccagctgtgcaacaagtgttccatccaagtattgaaagtcatttaaatcatgatgtccatatggctcaagcggatggccatacaggtgtgattgcttttgaagtgaaaaatacagaaagtgccaaacaattgattaaagcaacatcgtattacacattagctgaaagtttaggtgcagtggaaagtttaatttcagtacctgcattgatgacacatgcatctattccagcagatattcgagctaaagaaggtattacagacggacttgtaagaatttctgtaggtattgaagatactgaagatttagtagatgatttaaaacaagcactagatacgttataa

SEQ ID NO: 13723 - protein, 380 aa, Staphylococcus aureus subsp. aureus MRSA252
MNKKTKLIHGGHTTDDYTGAVTTPIYQTSTYLQDDIGDLRQGYEYSRTANPTRSSVESVIASLENGKHGFAFSSGVAAISAVVMLLDKGDHIILNSDVYGGTYRALTKVFTRFGVEVDFVDTTHTDSIVQAIRPTTKMLFIETPSNPLLRVTDIKKSAEIAKEHGLISVVDNTFMTLYYQNPLDLGIDIVLHSATKYLGGHSDVVAGLVATSDDKLAERLAFISNSTGGILGPQDSYLLVRGIKTLGLRMEQINRSVIEIIKMLQAHPAVQQVFHPSIESHLNHDVHMAQADGHTGVIAFEVKNTESAKQLIKATSYYTLAESLGAVESLISVPALMTHASIPADIRAKEGITDGLVRISVGIEDTEDLVDDLKQALDTL

SEQ ID NO: 13724 - DNA, 1143 bp, Staphylococcus aureus subsp. aureus MSSA476
  CDS (1)..(1143): transl_table=11
atgaataagaaaactaaattaattcacggtggacacacaacggacgactatacaggtgcagttactacaccaatttatcaaacaagtacatatttacaagatgatattggtgatttacgtcaaggatatgaatattctcgtactgcgaatccaacaagaagttctgtagaaagcgttattacggcattagaaaatggcaaacatggctttgcgtttagttcaggtgttgcagctatcagtgcagttgttatgctgttggacaaaggtgatcatattattttaaattcagatgtatacggcggtacttatcgcgcattgacaaaagtatttacacgatttggcattgaagtggattttgtagatacaacgcatacagattcaattgtacaagcgatacgcccaacaacaaagatgttgtttattgaaacaccttctaatccattattacgtgttactgacattaaaaagtctgctgaaattgcgaaagaacacggtttgatttcagtcgttgataacacatttatgacaccttattatcagaatccattagatttaggcatcgatattgtcttgcattctgcaacgaaatatttaggtggacatagtgatgtcgttgctggtttagttgcaacatcggatgacaagcttgcagaacgtttagcatttatttcaaattcaacaggtggcattttaggacctcaagatagctatttacttgtgaggggtattaaaacattaggtttacgtatggaacaaattaatcgcagtgttattgaaattattaaaatgttacaagcacatccagctgtgcaacaagtgttccatccaagtattgaaagtcatttaaatcatgatgtccatatggctcaagcggatggccatacaggtgtgattgcatttgaagtgaaaaatacagaaagtgccaaacaattgattaaagcaacatcgtattacacattagctgaaagtttaggtgcagtggaaagtttaatttcagtacctgcattgatgacacatgcatccattccagcagatattcgagctaaagaaggtattacagacggacttgtaagaatttctgtaggtattgaagatactgaagatttagtcgatgatttaaaacaagcactagatacgttataa

SEQ ID NO: 13725 - protein, 380 aa, Staphylococcus aureus subsp. aureus MSSA476
MNKKTKLIHGGHTTDDYTGAVTTPIYQTSTYLQDDIGDLRQGYEYSRTANPTRSSVESVITALENGKHGFAFSSGVAAISAVVMLLDKGDHIILNSDVYGGTYRALTKVFTRFGIEVDFVDTTHTDSIVQAIRPTTKMLFIETPSNPLLRVTDIKKSAEIAKEHGLISVVDNTFMTPYYQNPLDLGIDIVLHSATKYLGGHSDVVAGLVATSDDKLAERLAFISNSTGGILGPQDSYLLVRGIKTLGLRMEQINRSVIEIIKMLQAHPAVQQVFHPSIESHLNHDVHMAQADGHTGVIAFEVKNTESAKQLIKATSYYTLAESLGAVESLISVPALMTHASIPADIRAKEGITDGLVRISVGIEDTEDLVDDLKQALDTL

SEQ ID NO: 13726 - DNA, 1191 bp, Acinetobacter sp. ADP1
  CDS (1)..(1191): transl_table=11
atgcatagccaaaacgatgaattagaataccagttagatactttagcaattcgtacaggtcatacccgtagttttgagggtgaacatgctgaacctattttcttgacctcatctttcgtttatgaaaatgcggctgaggcagcggcaaaattttcaggtgaagtatcaggtaatatctattctcgttttaccaatccaacggttgccatgtttgaaaagcgtttggctgctatggatggtgcggagcgtgcggtagcgaccagttcaggcatgggcgctcttttatcggtctgcatggcttttttaaaagcaggcgatcatgtgatttgctcgcgtgctgtatttggttcaattgtggccttgtttgaaaaatatgttgccaaatttgctgtagatatcacttttgttgatttaaacgatctggatgcatggaaaaatgcgatgcgcccagaaaccaaaatgttgtttatcgaatctccatcgaatcccttggctgaaattgcggatattccagcacttgcagagattgctcatgcccacaatgcaatgcttgtggtggacaacagcttttgtacacctgcattacagcaaccactcaaacttggtgcagacttagtcatgtattcggcgaccaaatatattgatggtcagggacgcgcacttggtggagcagttacaggcagtcataaattactcgaagaagtctttggtgtagtacgtacacttgggccatcaatgagtccgttcaatgcatgggtattcttaaaaggtctagaaactttacgtttaagaatgaaagcgcattgtgaaaatgcccaacagcttgcagagtggctagatcagcacaaaaacgttgaaaaagtgtattacgcaggtttaccacagcatattggtcatgaacgcgcgaccaaacagcaacagggtttcggcggtattgtctcatttgtggtgaaaggtggacgcgaaggggcttggaaagtcatcgacaatacccaatttatttcaatcacaggtaatttgggtgatgtgaaatcgaccattacccatcccgcaacaaccacacatggtaaattgtcacctgaagcaaaacaggcagcaggcatacaggaaggtttgattcgggtttctgttggtttagaagatatttcagatattatccgcgacttagatcgtggtttggctttaatttaa

SEQ ID NO: 13727 - protein, 396 aa, Acinetobacter sp. ADP1
MHSQNDELEYQLDTLAIRTGHTRSFEGEHAEPIFLTSSFVYENAAEAAAKFSGEVSGNIYSRFTNPTVAMFEKRLAAMDGAERAVATSSGMGALLSVCMAFLKAGDHVICSRAVFGSIVALFEKYVAKFAVDITFVDLNDLDAWKNAMRPETKMLFIESPSNPLAEIADIPALAEIAHAHNAMLVVDNSFCTPALQQPLKLGADLVMYSATKYIDGQGRALGGAVTGSHKLLEEVFGVVRTLGPSMSPFNAWVFLKGLETLRLRMKAHCENAQQLAEWLDQHKNVEKVYYAGLPQHIGHERATKQQQGFGGIVSFVVKGGREGAWKVIDNTQFISITGNLGDVKSTITHPATTTHGKLSPEAKQAAGIQEGLIRVSVGLEDISDIIRDLDRGLALI

SEQ ID NO: 13728 - DNA, 1284 bp, Acinetobacter sp. ADP1
  CDS (1)..(1284): transl_table=11
atgactcatcgctacaaagatgaaacccttgctattcatgcaggttattcaccagaaccaaccacgaaagctgttgctgtacctatttatcaaaccacttcctatgcttttgacaatacacaacatggtgcagatttatttgatctgaaagtacagggtaatatttatactcgaatcatgaatccaaccacggccgtgctcgagcagcgacttgccgcattggaaggcggaattggtgctttggcgctggcatcaggtatggccgccattacctatgcgattcagacgataaccgaagcaggcgacaatattgcatctgtttctacactctatgggggtacatataatttatttgcgcataccctccccaaacagggcattgaggtacgtttcttcgatgatcagcagcccgagcaattacgcagtttaattgatgacaaaaccaaactggtttttgtggaatcgattggcaatccattaggtaatattatcgacttggaaacgattgccaagattgcccatgaatatggcgtccctgtggtagtcgacaatactgtagccacccctgtactgcaaaaatcatttgattttggtgcggatattattgttcattcactgaccaaatatattggcggtcatggcaacagtattggtggcatcattgtcgatagtggcaagtttccatggggcaaatatccagaacgctttaaggtattgaatacccccgatccaagttatcatggtgtcaattatgtcgaggccttaggtgaagctgccttcataggccgtgcgcgtgtcgttccattacgcaatacaggcgcagccatcagtccactcagtgtattcctaattttacagggactcgaaacgctatccttacgtatagagcgtcataccgaaaatgcacttcaagttgctgaatacttaaagcaacacccgaaggtgaaatgggtcaattatgctggtttaaaagatcatcctcagcatgatttggcgcaaaagtatgtcaaaggaaaaccctctgcaattcttacttttggcgtgcaagatggtcgcgaaggtggcactcggtttattgatgccttacaactgtttacccgtctggtcaatattggggatgccaagagtctggcctgtcatcctgccacgaccacgcatcgtcagctcaatgcagaagaacttaaagcagcaggcgtttcagaagatatggttcggttatcggttgggattgaacatattgatgatttgattgcagatctggaacaagcattggccacagtttga

SEQ ID NO: 13729 - protein, 427 aa, Acinetobacter sp. ADP1
MTHRYKDETLAIHAGYSPEPTTKAVAVPIYQTTSYAFDNTQHGADLFDLKVQGNIYTRIMNPTTAVLEQRLAALEGGIGALALASGMAAITYAIQTITEAGDNIASVSTLYGGTYNLFAHTLPKQGIEVRFFDDQQPEQLRSLIDDKTKLVFVESIGNPLGNIIDLETIAKIAHEYGVPVVVDNTVATPVLQKSFDFGADIIVHSLTKYIGGHGNSIGGIIVDSGKFPWGKYPERFKVLNTPDPSYHGVNYVEALGEAAFIGRARVVPLRNTGAAISPLSVFLILQGLETLSLRIERHTENALQVAEYLKQHPKVKWVNYAGLKDHPQHDLAQKYVKGKPSAILTFGVQDGREGGTRFIDALQLFTRLVNIGDAKSLACHPATTTHRQLNAEELKAAGVSEDMVRLSVGIEHIDDLIADLEQALATV

SEQ ID NO: 13730 - DNA, 1161 bp, Erwinia carotovora subsp. atroseptica SCRI1043
  CDS (1)..(1161): transl_table=11
atgacgcgtaaacaggcaacgatcgcagtccgcagcgggttaaatgatgatgaacagtatggctgcgtcgtcccccctattcacctttccagcacgtataactttaccggattcaaccagccacgcgcacacgactattcgcgtcgcggtaatcccacacgtgatgtggtacagcgtgcgcttgccgaactggaaggcggtgcgggtgcggtaatgacgagcagcgggatgtcggcgattatgctggtttgcacggtgttcctacgtcccggcgatctgctggtggctccgcatgactgctacggtggcagctatcgtctgtttgacagcctgagcaagcgcggcgcgtttcgcgtcaaatttgtcgatcaaggtgatacccatgcgctcaacgcggcgttggcagaaaagccgaagctcgtgctggtggaaagcccgagcaatccgctgctgcgtgtcgtcgatattgctgcgatttgtcaggctgcgcgggaagccggtgcggtcagcgtggtggataacactttcctgagccccgcgttgcagaagccgctggaactgggagccgatctggtggtgcattcgtgtaccaagtacctgaatggtcactctgacgtggtggcgggtgcagtgatcgccaaggatgtcgataccatcactgaactagcttggtgggcaaacaatattggtgtgacgggggcggcgtttgacagttatctgctgctacgtggcctgcgtaccttatcgccgcgcatggcggccgcgcagcgtaatgcgcaacaagtggttgaattcttacagacgcagccgctagtgaaagctctgtatcatccttcactgccgaacaatcccggccatgatattgcccgtcgtcaacaatctggttttggcgctatgctaagttttgagctggatggagatgaagacaccctgcgacgttttctggcctcgctggagctgttcacgctggcggaatcgctgggcggggttgagagcctcatctctcatgctgcaacgatgacgcatgcgggtatggcgccagaggcgcgtgccgcagcgggtatctctgaaacattactgcgtatttccaccggcattgaagacggcgatgatctggttgccgatctggatcgtgcgtttcaagccgcagccaagaggtaa

SEQ ID NO: 13731 - protein, 386 aa, Erwinia carotovora subsp. atroseptica SCRI1043
MTRKQATIAVRSGLNDDEQYGCVVPPIHLSSTYNFTGFNQPRAHDYSRRGNPTRDVVQRALAELEGGAGAVMTSSGMSAIMLVCTVFLRPGDLLVAPHDCYGGSYRLFDSLSKRGAFRVKFVDQGDTHALNAALAEKPKLVLVESPSNPLLRVVDIAAICQAAREAGAVSVVDNTFLSPALQKPLELGADLVVHSCTKYLNGHSDVVAGAVIAKDVDTITELAWWANNIGVTGAAFDSYLLLRGLRTLSPRMAAAQRNAQQVVEFLQTQPLVKALYHPSLPNNPGHDIARRQQSGFGAMLSFELDGDEDTLRRFLASLELFTLAESLGGVESLISHAATMTHAGMAPEARAAAGISETLLRISTGIEDGDDLVADLDRAFQAAAKR

SEQ ID NO: 13732 - DNA, 1206 bp, Symbiobacterium thermophilum IAM 14863
  CDS (1)..(1206): transl_table=11
atggaacagacccggcagccaggactggccacgcgctgtgtccacgcagggcagcgtcccgatccgctcaccggcgccatctcacccccgatctaccagacctccacctttgcctttgccagcctggagcagggcgccgcacggtttgccggtgaggaaccgggttatatctacacccggttgggcaatccgacggtcgcggccctggaggcgaagatcgccgacctggagggaggcgaggccgccgtggcgttcggttcgggcatggcggcgatcgcagccgtggtgacggcgctggtccgggccggcgaccacgtcctgttcggcaacccgatctacgggtgcacctacgacttcctgatggacgtcatggcgcgcttcggggtcgaggccactccggtggacccggcccggcccgggcaggtggagcgggccatccgtcccaacacccgtctgctcctcttcgagacccccgccaacccgacgctgcggctcgcggacatccgcgccctctccgatctggctcaccggcaccagatcaccgtcgtggtcgacaataccttcatgtccccctacctgcagcggccgctggagcacggcgcggacatggtggtccacagcgccaccaagttcatcggcggccacggcgacgtggtggcgggcctggccgtcggccctgcggaggtgatggcgcgggtccgcagcacgacgctcaagaacttcggcgggatcctttcgcccttcgacgcgtggctgctgctgcgcgggctgaagaccctggccattcgcatggagcggcacagcgagaacgcgctgaaggtcgcccggtacctggagcagcatcccctggtgatgcgggtgtactaccccgggctggagtcctcgccttatcacgagctggcccgacggcagatggacggcttcggggggctgctctccttcgagctgatgggcggcatggaggccgggcgcaccctgctgaaccacgtgcggctctgcaccgtggccgtctccctgggcgacacggacacgctgatccagcatcctgcatccatgacccacgcggtggtgccgccggaggcgcgggccgcggcggggatttccgacgggctggtgcggctgtcggtggggctggaggatgcggacgacatcatcgcggatctggatcaggcgctggcggccgtggggcgcgcgcagaagcgctga

SEQ ID NO: 13733 - protein, 401 aa, Symbiobacterium thermophilum IAM 14863
MEQTRQPGLATRCVHAGQRPDPLTGAISPPIYQTSTFAFASLEQGAARFAGEEPGYIYTRLGNPTVAALEAKIADLEGGEAAVAFGSGMAAIAAVVTALVRAGDHVLFGNPIYGCTYDFLMDVMARFGVEATPVDPARPGQVERAIRPNTRLLLFETPANPTLRLADIRALSDLAHRHQITVVVDNTFMSPYLQRPLEHGADMVVHSATKFIGGHGDVVAGLAVGPAEVMARVRSTTLKNFGGILSPFDAWLLLRGLKTLAIRMERHSENALKVARYLEQHPLVMRVYYPGLESSPYHELARRQMDGFGGLLSFELMGGMEAGRTLLNHVRLCTVAVSLGDTDTLIQHPASMTHAVVPPEARAAAGISDGLVRLSVGLEDADDIIADLDQALAAVGRAQKR

SEQ ID NO: 13734 - DNA, 1110 bp, Mannheimia succiniciproducens MBEL55E
  CDS (1)..(1110): transl_table=11
atgacacaaaactattctattgaaactattctcgcgcaagcgggcaataagtcggatgcccgcacgggtgcggtatccacacctattttcctttccaccgcttatggtcaccgaggtatcggagaaagtacgggctttgattacacccgcactaaaaatccgacccgcttggtattggaagagacaatcgctaaattggaaaacggcgatcagggtttcgccttttcttccggtatggcggcaattcaagtgctaatgaccttatttacggcgccggacgagtggattgtttccagtgatgtttatggcggaacctatcgtctgttggattttgcctataaaaataacaacagcgtgaaaccggtttatgtcaatacggcttctgtggaggcgattgaaacggcgattacgccgaacactaaggcgatttttgtggaaaccccgtcaaatccgttgatggaagaatgtaatgtgacggaaatcgctaaaatcgccaaaaaatataatttattattaattgtagataacacattcttaacgccggtattttcccggccgttggatttaggcgccgatattgtgattcatagtgcgacgaaataccttgccggtcataacgatactctagccggtttagtggtggcaaaagggcaggcgctttgcgagcgtatcttttatattcaaaacggtgcgggcgccgtattatcgccctttgattcatggctaaccattcgcggtttgaaaacattagcgttgcgtatggaacgtcatcaggcgaatgcggcggcgattgcggaatttctgaaagcgcagccgcaggtcaaagacgtactttatccgaataaaggcggtatgttgtcattccggttacaggatgaaaactgggtaaatccgtttttgaaagccattaatttaattacgtttgccgaaagccttggcggcacggaaagttttattacttatccgaccactcaaacccatatggatatcccagcagaagaacgaattgcgcgcggtgtgaccaatgatttgctgcgtttttccgtcggtttagagaacgtcgaagatattaaagcggatttggcgcaggcttttgctcaatttaaatag

SEQ ID NO: 13735 - protein, 369 aa, Mannheimia succiniciproducens MBEL55E
MTQNYSIETILAQAGNKSDARTGAVSTPIFLSTAYGHRGIGESTGFDYTRTKNPTRLVLEETIAKLENGDQGFAFSSGMAAIQVLMTLFTAPDEWIVSSDVYGGTYRLLDFAYKNNNSVKPVYVNTASVEAIETAITPNTKAIFVETPSNPLMEECNVTEIAKIAKKYNLLLIVDNTFLTPVFSRPLDLGADIVIHSATKYLAGHNDTLAGLVVAKGQALCERIFYIQNGAGAVLSPFDSWLTIRGLKTLALRMERHQANAAAIAEFLKAQPQVKDVLYPNKGGMLSFRLQDENWVNPFLKAINLITFAESLGGTESFITYPTTQTHMDIPAEERIARGVTNDLLRFSVGLENVEDIKADLAQAFAQFK

SEQ ID NO: 13736 - DNA, 1176 bp, Bacillus licheniformis ATCC 14580
  CDS (1)..(1176): transl_table=11
atgagtcatgaaaactggacgcttgaaacaaagcttgttcataaccaaaataaaacggacggagcaaccggagccgtcagcgtgccgatccagcacgcatcaacctttcatcaagattcttttgacaaattcggcgaatatgactacagccggtcaggcacaccgacaaggaaggcgcttgaagacacgatagccgagcttgagggagggacgagaggatttgctttttcatccggcatggctgcgatttcctccgcctttctgcttttgtcaaagggcgatcacgtgctcgtcacaaaagatgtgtacggcggcacttaccggatgattacggaagtgctgagccgctttgggattgaacatactttcgtcgatatgacggatttaaatgaaattgctttaaacataaaggaaaacacaaaagtcatctatcttgaaacaccgtcaaatccgacgctcggcattacggatattagaggggtcgtcaagcttgccaaggcgcacggctgtctgacgttccttgacaacacgttcatgaccccggcgttgcagcgaccgcttgagctcggcgtcgatattgtgcttcacagcgcgacgaagtttttaagcggacacagcgacgtattatcaggccttgccgtcgtgaaagacaaaaagctcggcgaagaactctataagctgcaaaattcgttcggcgctgttctcggcgtccaagactgctggcttgtgctgagagggctgaagacgctccaagtgcggcttgaaaaagcaagcaggacggctcagcagctcgccgaatttttcgaaaaacatccggccgtcaaacaagtgtattatccagggctgtcttcgcatccgggtgcatcgatccacaaacaccaggcgaacggcgcaggtgcggtcctttcttttgaacttgaggatgcggaagcagtcaaacaggttgtggaaaatgtctctctccctgtcttcgccgtcagtcttggagctgtggagtcgatcctttcttatccggcaaaaatgtcgcacgccgccatgccgaaggaggagcgcacaaaacggggcattaccgacggacttctgcgcttgagcgtcggggtcgaaaatgccgatgatttacaggcggactttgcccaagcgttggaagccgtatccggagcgcttgcccgttcataa

SEQ ID NO: 13737 - protein, 391 aa, Bacillus licheniformis ATCC 14580
MSHENWTLETKLVHNQNKTDGATGAVSVPIQHASTFHQDSFDKFGEYDYSRSGTPTRKALEDTIAELEGGTRGFAFSSGMAAISSAFLLLSKGDHVLVTKDVYGGTYRMITEVLSRFGIEHTFVDMTDLNEIALNIKENTKVIYLETPSNPTLGITDIRGVVKLAKAHGCLTFLDNTFMTPALQRPLELGVDIVLHSATKFLSGHSDVLSGLAVVKDKKLGEELYKLQNSFGAVLGVQDCWLVLRGLKTLQVRLEKASRTAQQLAEFFEKHPAVKQVYYPGLSSHPGASIHKHQANGAGAVLSFELEDAEAVKQVVENVSLPVFAVSLGAVESILSYPAKMSHAAMPKEERTKRGITDGLLRLSVGVENADDLQADFAQALEAVSGALARS

SEQ ID NO: 13738 - DNA, 1143 bp, Bacillus licheniformis ATCC 14580
  CDS (1)..(1143): transl_table=11
atgaagccaaaaacgaaaatgattcacggcggaattacaggagacgaaaaaacaggagcggtatcggttcctatctatcaggtcagcacgtacaaacagcctcgcgccggccagcatacaggatacgaatattcccggacgggaaatccgacgagaacggcgctcgaatccttgatcgcggatgttgaaggcggtgcagcaggctatgcgttcggctctgggatggcggcgatcacagccgtcatgatgctttttaaaagcggcgatcacatcgtattgacagatgatgtatacggcggcacctaccgcgtgatgacaaaggtattgaatcgcatcggcattgaagcgaccttcagtgatacgagcagcatcgaagacatcgaaaaagcgatcaagccgaatacaaaagcgatttatgttgagacgccgacaaatcctttattgaaaatcactgacatcaagaaaactgctgaaacagcgaaaaagcacgacttattgctgattgtcgacaacaccttctacacgccgtactttcaaaatccaatctcgttgggagccgatatcgtcctccacagcgcgacgaagtacttgggcggacacagcgatgtcgtcggcggacttgtcgtagcagcctcgaaggaactcgcagaagagatccatttcattcaaaactctacaggcgggattctcgggcctcaggattcctggctcttaatgagggggatgaaaacccttggcttgagaatggaagcccatgagcaaaatgcccggaaaatcgcggcgtttttagacgatcatcccgccgtcaaaaaggtttattacccagggctgccgtcccatccgggacatgagcttgccaagcggcaaagtacgggcttcggaggcatgatctcgtttgatatcggaaaagaagagaacgtggaccttgtccttggccgtttgaaatggtttacgatcgccgaaagccttggtgcggttgaaagtctgatatcggtgccggcgcgaatgactcatgcttcgatcccgcctgaacgcaggctggagcttggcatcacagacggattaatccgtatttccgccggggttgaggatattgacgatctgttggaagacttgcagcaagcgctggcccctctttcttaa

SEQ ID NO: 13739 - protein, 380 aa, Bacillus licheniformis ATCC 14580
MKPKTKMIHGGITGDEKTGAVSVPIYQVSTYKQPRAGQHTGYEYSRTGNPTRTALESLIADVEGGAAGYAFGSGMAAITAVMMLFKSGDHIVLTDDVYGGTYRVMTKVLNRIGIEATFSDTSSIEDIEKAIKPNTKAIYVETPTNPLLKITDIKKTAETAKKHDLLLIVDNTFYTPYFQNPISLGADIVLHSATKYLGGHSDVVGGLVVAASKELAEEIHFIQNSTGGILGPQDSWLLMRGMKTLGLRMEAHEQNARKIAAFLDDHPAVKKVYYPGLPSHPGHELAKRQSTGFGGMISFDIGKEENVDLVLGRLKWFTIAESLGAVESLISVPARMTHASIPPERRLELGITDGLIRISAGVEDIDDLLEDLQQALAPLS

SEQ ID NO: 13740 - DNA, 1152 bp, Legionella pneumophila subsp. pneumophila str. Philadelphia 1
  CDS (1)..(1152): transl_table=11
atgaataagactcatttcgatacacgtgcaattcatgctgggcaagaaccatgtaaaagtacaggggccgtgatgacccctatttatgctacctccacctataaacaaattgctcctggcgaacatcttggctatgaatactcacgcacccagaaccccaccagaaaggcctatgaggattgcatagcaagtcttgaatcaggccaaaaaggatttgcgtttgcttcaggtatggctgccatcaatacagttattgatttattaggttccggagatcacgtcgttgccatggatgatctttatggagggactttccggctttttgataaagtaaaaacccgaacttctaatttatccttttcttttattgatatgtcagtacccgagaatattgaagctgcaataactccgaagacaaaattactatggttggaaaccccttccaatcccatgctaaagctagctaatttacgaaaaatcgctgctattgcaaaaaaatataatttgattacagttgccgataacacctttgcaactccctggattcaacgccctcttgaactcggatttgacattgtacttcattcagcaaccaaatatctgaacggacattctgatgtagtcagtggtgtcgttgtggtcggtgacaattcagtgttgtctgataaaattgcttttttgcaaaattcatgcggcgctgtagctggccctttcgacagtttcctggttctgagaagcttaaaaacattatccgttcgtatgcaaaggcactgtgaaaacgctaaccatctggctaactggcttagcagccaccccaagattgaaaaagtcatttatcccggattaaaaagtcatccgcaatattctcttgccaaggaacaaatgaacaatttcggtggtatgatatctttggtacttaaaggtagtcttgaagatgccaaacgatttttagctcgctgcgaattatttactttggctgaaagcctggggggtgtagaaagtttaattgagcatcctgcaattatgacccatgcctctattccagtcgaacaacgcaaagccctgggcatagaagatggtttcataagattatcagttggtattgaacacattgatgatctgcgtgccgatctggagcatgctttaggttaa

SEQ ID NO: 13741 - protein, 383 aa, Legionella pneumophila subsp. pneumophila str. Philadelphia 1
MNKTHFDTRAIHAGQEPCKSTGAVMTPIYATSTYKQIAPGEHLGYEYSRTQNPTRKAYEDCIASLESGQKGFAFASGMAAINTVIDLLGSGDHVVAMDDLYGGTFRLFDKVKTRTSNLSFSFIDMSVPENIEAAITPKTKLLWLETPSNPMLKLANLRKIAAIAKKYNLITVADNTFATPWIQRPLELGFDIVLHSATKYLNGHSDVVSGVVVVGDNSVLSDKIAFLQNSCGAVAGPFDSFLVLRSLKTLSVRMQRHCENANHLANWLSSHPKIEKVIYPGLKSHPQYSLAKEQMNNFGGMISLVLKGSLEDAKRFLARCELFTLAESLGGVESLIEHPAIMTHASIPVEQRKALGIEDGFIRLSVGIEHIDDLRADLEHALG

SEQ ID NO: 13742 - DNA, 1191 bp, Burkholderia mallei ATCC 23344
  CDS (1)..(1191): transl_table=11
atggacgactctctcaacttcgacacgctcgccgtccgctcgggcacgctgcgcagtgaattcaacgagcattcggaagcgctcttcctcacgtcgagcttctgctacgcgagcgcggccgaggcggccgagcgcttcaagcattcggaagactactacacgtactcgcgcttcacgaatccgaccgtcacgatgttccaggatcgcctcgcggcgctcgagggcggcgaggcgtgcatcgcgaccgcgtccggaatggcggcgatcacgtcggtcgtgatggccgcgctgcaggtgggcgatcacctcgtcagctcgcgcagcctgttcggctcgacgctcgggctgttcgggcagatcttcgcgaagttcggcatcgagacgacgttcgtcgatccggccgatctcgacgcatggcgcgccgccgtgcgccccgagacgaagatgttcttcctcgagacgccgtcgaacccgatgaccgagctcgccgacatcgaggcggtgggcaggatcgcgaaggcggcccatgcgctgttcgtcgtcgacaactgtttctgcagcccggtgctgcagcagccgctcaagctcggcgcggacgtcgtgatgcattcggccaccaagttcctcgacggtcaggggcgcgtgctcggcggcgcgctcgtcggctcgaaggcgttcatcatggagaaggtgttcccgttcgtgcgcaccgcggggccgacgctgtccgcgttcaatgcgtgggtgctgctcaagggcatggagacgctgtcgctgcgcgtgaaccggcaatcggagaacgcgcttgagatcgcccgctggctcgaggcgcatccggccgtgaagcgcgtgttctatccggggctcgaatcgcatccgcagcatgcgctcgcgaagcgccagcagaaatcgggcggctcggtcgtgtcgttcgagctgaacggcgatacgccggagcggcagcgcgcgaacgcgtggcgtgtgatcgacggcacgaagatcgtatcgatcaccgcgaacctcggcgacacgcgcacgacgatcacgcatccggcgacgacgacgcacagccggatcgcgcctgaagcgcgcgaggcggcggggatcaccgaagggctgatccggctcgcggtcgggctcgaggatccggccgacatccgcgacgatctcgcgcgcgggctcgccggctga

SEQ ID NO: 13743 - protein, 396 aa, Burkholderia mallei ATCC 23344
MDDSLNFDTLAVRSGTLRSEFNEHSEALFLTSSFCYASAAEAAERFKHSEDYYTYSRFTNPTVTMFQDRLAALEGGEACIATASGMAAITSVVMAALQVGDHLVSSRSLFGSTLGLFGQIFAKFGIETTFVDPADLDAWRAAVRPETKMFFLETPSNPMTELADIEAVGRIAKAAHALFVVDNCFCSPVLQQPLKLGADVVMHSATKFLDGQGRVLGGALVGSKAFIMEKVFPFVRTAGPTLSAFNAWVLLKGMETLSLRVNRQSENALEIARWLEAHPAVKRVFYPGLESHPQHALAKRQQKSGGSVVSFELNGDTPERQRANAWRVIDGTKIVSITANLGDTRTTITHPATTTHSRIAPEAREAAGITEGLIRLAVGLEDPADIRDDLARGLAG

SEQ ID NO: 13744 - DNA, 1218 bp, Burkholderia pseudomallei K96243
  CDS (1)..(1218): transl_table=11
atgcgcttgaaaacggatgaacggaacatggacgactctctcaacttcgacacgctcgccgtccgctcgggcacgctgcgcagtgaattcaacgagcattcggaagcgctcttcctcacgtcgagcttctgctacgcgagcgcggccgaggcggccgagcgcttcaagcattcggaagactactacacgtactcgcgcttcacgaatccgaccgtcacgatgttccaggatcgcctcgcggcgctcgagggcggcgaggcgtgcatcgcgaccgcgtccggaatggcggcgatcacgtcggtcgtgatggccgcgctgcaggcgggcgatcacctcgtcagctcgcgcagcctgttcggctcgacgctcgggctgttcgggcagatcttcgcgaagttcggcatcgagacgacgttcgtcgatccggccgatctcgacgcatggcgcgccgccgtgcgccccgagacgaagatgttcttcctcgagacgccgtcgaacccgatgaccgagctcgccgacatcgaggcggtgggcaggatcgcgaaggcggcccatgcgctgttcgtcgtcgacaactgtttctgcagcccggtgctgcagcagccgctcaagctcggcgcggacgtcgtgatgcattcggccaccaagttcctcgacggtcaggggcgcgtgctcggcggcgcgctcgtcggctcgaaggcgttcatcatggagaaggtgttcccgttcgtgcgcaccgcggggccgacgctgtccgcattcaatgcgtgggtgctgctcaagggcatggagacgctgtcgctgcgcgtgaaccggcaatcggagaacgcgctcgagatcgcccgctggctcgaggcgcatccggccgtgaagcgcgtgttctatccggggctcgaatcgcatccgcagcatgcgctcgcgaagcgccagcagaaatcgggcggctcggtcgtgtcgttcgagctgaacggcgatacgccggagcggcagcgcgcgaacgcgtggcgtgtgatcgacggcacgaagattgtatcgatcaccgcgaacctcggcgacacgcgcacgacgatcacgcatccggcgacgacgacgcacagccggatcgcgcctgaagcgcgcgaggcggcggggatcaccgaagggctgatccggctcgcggtcgggctcgaggatccggccgacatccgcgacgatctcgcgcgcgggctcgccggctga

SEQ ID NO: 13745 - protein, 405 aa, Burkholderia pseudomallei K96243
MRLKTDERNMDDSLNFDTLAVRSGTLRSEFNEHSEALFLTSSFCYASAAEAAERFKHSEDYYTYSRFTNPTVTMFQDRLAALEGGEACIATASGMAAITSVVMAALQAGDHLVSSRSLFGSTLGLFGQIFAKFGIETTFVDPADLDAWRAAVRPETKMFFLETPSNPMTELADIEAVGRIAKAAHALFVVDNCFCSPVLQQPLKLGADVVMHSATKFLDGQGRVLGGALVGSKAFIMEKVFPFVRTAGPTLSAFNAWVLLKGMETLSLRVNRQSENALEIARWLEAHPAVKRVFYPGLESHPQHALAKRQQKSGGSVVSFELNGDTPERQRANAWRVIDGTKIVSITANLGDTRTTITHPATTTHSRIAPEAREAAGITEGLIRLAVGLEDPADIRDDLARGLAG

SEQ ID NO: 13746 - DNA, 1152 bp, Methylococcus capsulatus str. Bath
  CDS (1)..(1152): transl_table=11
atggagacccgggccgtgcgcgccgggcaacggcggacgatggagcaggagcatgcggagccgatcttcgccacttccagctacgtgttcgccagcgccgccgaggcggccgagcgcttcgccggcaaggcggcgggcaacatctactcacgcttcacgaatcccacggtgcggaccttcgaggagaggctggcggcgctggagggcggggagcgctgcgtcgcggtcggctccggtatggcggccattgccagtaccgcgttcgggttgctgaaggcaggcgatcacgtggtgtgttcgcgcagcgtgttcggcaataccaccctgctgttccagaattacctggccaagttcggggtcccgacgaccttcgtcggtctcaccgattacgatggctgggcagcggccatccggcccgagacccggtttctgttcatcgagacgccttccaatccgctgaccgaaatcgccgacatcccaaggctcgcggaaatcgcccactcccgcggctgcctgctggtggtggacaattgtttctgcaccccggccttgcagaggccgctggcgctgggtgcggacatcgtgatccattcggccaccaagtacctcgacgggcagggccgctgcgtaggcggggccatcgtcggcgggcgcgaactgctcgacgccgaaatctacccattcctgcgcaccggcggccccagcatgagtccgttcaacgcctgggtgttcctcaagggattggaaacgctgaatctcaggatgaaagcccattgtgagaacgcactcggcctggcccgctggttggaggcgcagccctgggtcgagcgggtgcattatccgggactcgccagccatccccagcatgaactcgccgcccgccagcaatcgggtttcggcggcatcgtcagcttcgaggtcaagggcggacaggaggctgcctggcgtctgatcgacagcacccggctgctgtcgatcaccggcaatctgggcgatgccaaaaccaccatcacccatccggcgactaccactcacggccgtctgagtccggaagcccgggcagcggccggtatcgccgacgggctgatccgcatcgcggttggactggagaacctcgccgatattcaggccgatctggctcgcttcgcctga

SEQ ID NO: 13747 - protein, 383 aa, Methylococcus capsulatus str. Bath
METRAVRAGQRRTMEQEHAEPIFATSSYVFASAAEAAERFAGKAAGNIYSRFTNPTVRTFEERLAALEGGERCVAVGSGMAAIASTAFGLLKAGDHVVCSRSVFGNTTLLFQNYLAKFGVPTTFVGLTDYDGWAAAIRPETRFLFIETPSNPLTEIADIPRLAEIAHSRGCLLVVDNCFCTPALQRPLALGADIVIHSATKYLDGQGRCVGGAIVGGRELLDAEIYPFLRTGGPSMSPFNAWVFLKGLETLNLRMKAHCENALGLARWLEAQPWVERVHYPGLASHPQHELAARQQSGFGGIVSFEVKGGQEAAWRLIDSTRLLSITGNLGDAKTTITHPATTTHGRLSPEARAAAGIADGLIRIAVGLENLADIQADLARFA

SEQ ID NO: 13748 - DNA, 1209 bp, Azoarcus sp. EbN1
  CDS (1)..(1209): transl_table=11
atgacaaacacaccgaccagaacgaacgattccgcccatcccgcgtggcacgacgagacgcgcgtgctgcacggcgacgcacatctctccgacgatgccgcgatcgtcgcgccgatctactacactgcgaccttcagggcgtccgacgcccgcgacttcgccgagcgtgcgaacacgccgcgccacccgggcttctacacgcgctacggcaacccgacgcaccagcgcgtcgaggccgtgctggctgagctcgaaggcaccgagtccgcgctactgaccgcctcgggcatgggggcgatcagcacgaccgtgctggcgctggtctcggcgggcgaccacgtgatcgcgcagcagcgccactacatgagcaccgcgaaactgttcgacgaagtgctgcccaagttcggcgtcagcgtcacgttcgtcgagcagagcgatcttgccgcgatcgaagccgcgatccggccgaacacgcgcctgatgatgttcgaaactccggcgaacccgacgctggtgctgaccgacctcgaagccgtcgccgccctcggacgcagccgcggcatcctcaccgtcgcggacaacaccttcgcttcgccgctgaaccagaagccgcacgcactggggatcgacatcgtcgtgcacagcgcgaccaagtatctcggcgggcaccacgacctgatggcgggcgccgtgtgctgctcggaagcgctcgccgagcggatctggcgcatgcacgtcacgctcggcgcggtgctgtcgccgatggacgcgtggctgctgttgcgcggcctgcggaccttgccggtgcgcatcgagcggatcaacgcgacggcgctcgcgtttgccggctggctggaagcgcagccgcaggtcgagcaggtgttctaccccggcctcgagagccatccgcagcacgcgctggcaaaaaagcagatgaaaggctacggcgccgtgattgcgttcgcggtcaagggcggattcgatgcgacccggcgattcgttgccgcgctcgaactcgcaacacacggcgtgagcctcggcggcgtcgagtcgctggtcgtgcacaccgccgcgatgtggtccggcacgatgaacgaagcgcagatgaaagccgccggcatcgccccgaacttcgtccgcctgtcgatcggcctcgagcacctggaagacctcaaggccgatttcagccaggcgttcaatcgggcgtga

SEQ ID NO: 13749 - protein, 402 aa, Azoarcus sp. EbN1
MTNTPTRTNDSAHPAWHDETRVLHGDAHLSDDAAIVAPIYYTATFRASDARDFAERANTPRHPGFYTRYGNPTHQRVEAVLAELEGTESALLTASGMGAISTTVLALVSAGDHVIAQQRHYMSTAKLFDEVLPKFGVSVTFVEQSDLAAIEAAIRPNTRLMMFETPANPTLVLTDLEAVAALGRSRGILTVADNTFASPLNQKPHALGIDIVVHSATKYLGGHHDLMAGAVCCSEALAERIWRMHVTLGAVLSPMDAWLLLRGLRTLPVRIERINATALAFAGWLEAQPQVEQVFYPGLESHPQHALAKKQMKGYGAVIAFAVKGGFDATRRFVAALELATHGVSLGGVESLVVHTAAMWSGTMNEAQMKAAGIAPNFVRLSIGLEHLEDLKADFSQAFNRA

SEQ ID NO: 13750 - DNA, 1170 bp, Azoarcus sp. EbN1
  CDS (1)..(1170): transl_table=11
atgaacccctacgaattcgacaccctggccgtgcgggcaggcactgcacgcagccagttcaacgagcacagcgaggcgctttacctgacctcgagcttcgtcttcggcagtgcagcgcaggccgcagcgcgcttttccggcgaggagccgggcaacgtctacgcgcgtttctcgaacccgaccgtcacggcgatgcaggagcggctcgcggcgctcgaaggcgccgaagcctgcgtcgcgaccgcatcgggaatgtcggcgattctctcgctggcgatggcgacgctgaaagccggcgatcacgtggtcgctccgacggggctgttcggtgcgacgcagcagctgttcggcacgattctctcgaagttcggcatcgagaccagctttgtcgccgccaccgaactcgatgcgtaccgcgctgcggtgacgccgcgcacgcgcctcttcttcgtcgaaacgccgtcgaacccgctcaccgaagtcatcgacatcgcgggagtcgcggagattgcccacgctgcaggcgcgctgttcgcggtcgacaattgtttctgcactcccgcattgcagcgcccgctggaactgggcgccgacgtcgtcgtgcattcggcgaccaaatacctcgacgggcagggaagagtgctcggcggcgcagtggccggggcgaaagtcgtcgtcgacgaggtgctcaagtttttgcgtactgccgggccgagcatttcaccattcaatgcatgggtgattctgaaaggtctggagacgctgcgcatccggatggacgcgcagtcggcaaccagcctggatctggcgcgctggctggaacagcagccgggagtggtacgcgtgttttaccccggcctcccatcgcatccgcagcacgcacttgcgatgcgccagcaaaaatccggcggtgcgatcgtcagcttcgaagtcgcagggggccgcgaacgtgcgtggcaagtcgtcgacggcacgcgcatgatttcgatcaccgcgaatctcggcgacacgaaaacgacgatcactcatccggcgtcgacgacgcacggccgcatcagcgccgaagcacgcgctgctgcgggaatcggagaaggactgctgcgcgtggcggtcggtctcgagtcgatcgaggacctgcgtgccgaccttgcccggggtctgcgagcctga

SEQ ID NO: 13751 - protein, 389 aa, Azoarcus sp. EbN1
MNPYEFDTLAVRAGTARSQFNEHSEALYLTSSFVFGSAAQAAARFSGEEPGNVYARFSNPTVTAMQERLAALEGAEACVATASGMSAILSLAMATLKAGDHVVAPTGLFGATQQLFGTILSKFGIETSFVAATELDAYRAAVTPRTRLFFVETPSNPLTEVIDIAGVAEIAHAAGALFAVDNCFCTPALQRPLELGADVVVHSATKYLDGQGRVLGGAVAGAKVVVDEVLKFLRTAGPSISPFNAWVILKGLETLRIRMDAQSATSLDLARWLEQQPGVVRVFYPGLPSHPQHALAMRQQKSGGAIVSFEVAGGRERAWQVVDGTRMISITANLGDTKTTITHPASTTHGRISAEARAAAGIGEGLLRVAVGLESIEDLRADLARGLRA

SEQ ID NO: 13752 - DNA, 1203 bp, Silicibacter pomeroyi DSS-3
  CDS (1)..(1203): transl_table=11
atgacccatgccaagggctttgccagccgcgccatccaccatgcctatgatccgctggatcacgagggcgcgctgacgccgccgctgcatctgacctcgacctttgccttcgagaccgccgaggccgggggcgagatgttcgcgggcgagcgtcaagggcatatctattcgcgcatctcgaacccgacgctggacctgctggaacagcgtatcgccacgctcgaaggggccgaggcggggctggcgctgtcctcggggatgggcgcgatcaccgccgttctgtggacgctgttgtcgcccggcgacgaggtgatcgtggacaagacgctctatggctgcaccttttcctatatgcggcacgggctggcgaaatggggggtgaccatcacccatgtggacctgaccgaccccgagaacctgaaaaccgcgatcagcgacaagacccgcgtggtctatttcgagacgcccgccaacccgaacatgcggctggttgatatcgcggcggtaagcgagattgcccatggcgccagtgcctcggtcgtggtcgacaatacctatgccacgccctacctgacccggcccatcgagatgggcgccgatatcgtgctgcattcggccaccaaatatctgggcggccatggcgatgtggtggcgggccttgtggtgggcggtgccgagcagatcagcgaaatccgcctttacggcatgaaggacatgaccggcgcggtgatggccccgttcaacgcgatgctgatcctgcgcgggctgaaaacgctggcgctgcggatggaccggcattgcgcctcggcccaggtggtggccgaatggctggccgcgcatccggcggtgggcgaggtccatttccccggtctgacgtctttctcgcagcacgcgctggcgaaccagcagatggcccagcccggcgcgatgatcgcctttgagctcaagggcggcatggacgcgggccgggcgatgatgaaccgtctgaacatgatcgcgcgggcggtgtcgctgggcgatgccgagacgctgatccagcatccggcctcgatgacccattccacctatacgcccgaggagcgggccgagcatggcatcagcgacgggctggtccgcctgtcggtgggtctggaagaggtcgaggatatcctggccgatctggcccagtcgctggacgcaccccaggttcaggccgccgcctga

SEQ ID NO: 13753 - protein, 400 aa, Silicibacter pomeroyi DSS-3
MTHAKGFASRAIHHAYDPLDHEGALTPPLHLTSTFAFETAEAGGEMFAGERQGHIYSRISNPTLDLLEQRIATLEGAEAGLALSSGMGAITAVLWTLLSPGDEVIVDKTLYGCTFSYMRHGLAKWGVTITHVDLTDPENLKTAISDKTRVVYFETPANPNMRLVDIAAVSEIAHGASASVVVDNTYATPYLTRPIEMGADIVLHSATKYLGGHGDVVAGLVVGGAEQISEIRLYGMKDMTGAVMAPFNAMLILRGLKTLALRMDRHCASAQVVAEWLAAHPAVGEVHFPGLTSFSQHALANQQMAQPGAMIAFELKGGMDAGRAMMNRLNMIARAVSLGDAETLIQHPASMTHSTYTPEERAEHGISDGLVRLSVGLEEVEDILADLAQSLDAPQVQAAA

SEQ ID NO: 13754 - DNA, 1137 bp, Bacillus clausii KSM-K16
  CDS (1)..(1137): transl_table=11
gtgaggaaaaagacacagcttatccatggtggcattggaatggatgctgaaacaggcgcagtcacgccaccgatccatccagccagcacatttaaacaaaaaggaattggcaactttcaatatgagtatgggcgaacgggcaacccgacgcgccatgcgcttgagtctttgcttgctgatatagaaagcggggcccatgggtttgcctttgcctcaggattggctgcgatcaccgcagtgatgaagcttttttcatctggtgatcatatcattgtaaccgacgatgtgtatggcgggacataccggctatttacaaagattttgcaaagggaagggattgcagctacttttgtcgatacggaggatcaagcggctgtcgcaagggcaagaacaagcaaaacgaaagcgatttttattgaaacgccaacaaatccattgctgaaagtaacggatatacggaaactggccagctatgcgcaagcggaagaattgcttcttattgttgataatacgtttgccaccccttattggcaaaaccctcttgtattaggagcggatatcgtcgtccatagcgctacaaaatatttaggcggccatagtgacgttgttgctggcgcggtagtcgttaaagacgaaaaactagctgaaacgctcgcttttattcaaaatgcgacaggcgctgttcttggcccaactgacagttggctattgatgcggggcatcaaaacgctcggtgtaagaatggaagaaattgaaacgaatgcgcgtatgctcgtgaaatttttgcttggccatccaaatgtcagccggatttactatccaggtttagttgaacatcctggccatgcaacgcatgctttgcaagcgagagggtttggcggcattatttcttttgaggctgcgagtgaagaaattgctgacaatgtgttaaacaaaacgacctattttactttagcagagagtctcggagcagttgaaagcctgatttcattgccagctaaaatgactcatgcctcgatcccagaagacaggcgcagtgcccttggcattacaaatacactcgttcgtttgtctgttggtttagaagactttgaggatctggccgaagatttggaaatagggcttacagtgttttaa

SEQ ID NO: 13755 - protein, 378 aa, Bacillus clausii KSM-K16
MRKKTQLIHGGIGMDAETGAVTPPIHPASTFKQKGIGNFQYEYGRTGNPTRHALESLLADIESGAHGFAFASGLAAITAVMKLFSSGDHIIVTDDVYGGTYRLFTKILQREGIAATFVDTEDQAAVARARTSKTKAIFIETPTNPLLKVTDIRKLASYAQAEELLLIVDNTFATPYWQNPLVLGADIVVHSATKYLGGHSDVVAGAVVVKDEKLAETLAFIQNATGAVLGPTDSWLLMRGIKTLGVRMEEIETNARMLVKFLLGHPNVSRIYYPGLVEHPGHATHALQARGFGGIISFEAASEEIADNVLNKTTYFTLAESLGAVESLISLPAKMTHASIPEDRRSALGITNTLVRLSVGLEDFEDLAEDLEIGLTVF

SEQ ID NO: 13756 - DNA, 1209 bp, Bacillus clausii KSM-K16
  CDS (1)..(1209): transl_table=11
atgaaaccaatcgctactggaatcgaaacaagcaaaaatcgtttaggatttcaaacagcctgtacacatggaggggatcattggaataaatcaggccatttaagtcctcctatttgccagtccactgctttcgaattcccgactacttccgaaggcgccgttcgggcagcagacattaaggccgatgaattttatggcaggtgggggagcagaaatgaacgtgagttagaagctttgattgctgccctcgaagaagcggacgatgcgctttgtgcttcttctggattaggtgctatctccatgattacacatgcatttttaaatccaggagaccattttatcgctgttcataactgttactctgaaacgaaaatattacatgagtctctagcagagcagttatctgttgatgtcacgtttattgactctagtgacatccatcactataaacaggcgattcaaccgaatacgaagttagtttttgctgaaacccccgccaacccaactctaagtttagtagatatatctaaagtagctacgctcgttcatgaacaaagcgatgcggtctttgtagtcgattcaacatttgctacaccttataatcaaaaaccgttgaagcacggcgcggatatcgttgtccattctgccacaaaatatttaggtgggcattctgatgttgtagcaggtgtatgtgctggttcaacggagttgatcgataaagttcgccataaatattccttccatggtccgcacctagacccttttggagcgtggctgctatgtagaggtattcgaactcttgggctaaggatggaaaagcataacgaaaacgcgttgaaattagctcaatttctagagacacacccgaaaattagacaagtgttttatccattttctgaaagccatcctcaatacaaactagctactaaacaaatgactggcggcggtggcatgatttgttttgaacttaaagatggtatggatggcgggcttggcttgatttcaaacgtgaaactaaacaagatggctgtcagtttaggcgggtatgcgagcaccattacccatccagcgtcgatgacgcataatttattgccgagagaagaacgtgaaaaaggcggcattacagatggcatgataaggttttctgtcggaattgaagaatatgaagatataagagacgacttatcccaagcgcttgataaaatataa

SEQ ID NO: 13757 - protein, 402 aa, Bacillus clausii KSM-K16
MKPIATGIETSKNRLGFQTACTHGGDHWNKSGHLSPPICQSTAFEFPTTSEGAVRAADIKADEFYGRWGSRNERELEALIAALEEADDALCASSGLGAISMITHAFLNPGDHFIAVHNCYSETKILHESLAEQLSVDVTFIDSSDIHHYKQAIQPNTKLVFAETPANPTLSLVDISKVATLVHEQSDAVFVVDSTFATPYNQKPLKHGADIVVHSATKYLGGHSDVVAGVCAGSTELIDKVRHKYSFHGPHLDPFGAWLLCRGIRTLGLRMEKHNENALKLAQFLETHPKIRQVFYPFSESHPQYKLATKQMTGGGGMICFELKDGMDGGLGLISNVKLNKMAVSLGGYASTITHPASMTHNLLPREEREKGGITDGMIRFSVGIEEYEDIRDDLSQALDKI

SEQ ID NO: 13758 - DNA, 1101 bp, Thermococcus kodakarensis KOD1
  CDS (1)..(1101): transl_table=11
gtgaagcctctccatgatccagtgtacctcacggttgcctttgagcaggcaggcgagacggggctctcggacaggggttttgacctcaagtactccagggaagaaaacccaacggtaaggctcctggaaaagaaagttgcttctatagaggggggcacggattctctggcattcaacagcgggatggcagccataagcgctctatacatttccactctcaaagcgggcgaagaagtagttcttcccatggagggctatggaacgacgatccagctcgcagaggagctgaggaagttcggtgtgagggtcaagcttgcatatccgagttcagaagccctcaatgaggcgataacggagaacaccaggctggttcttacagaagtagtcaccaacccgaccctgaaggtaatagacgttcctgaagtcataaggcgggcgaaagaggtgggggcaacggtcgtagttgacaacacattctctccattgattttcaagccgctaaaagttagggcagatggggtaatccacagcctcaccaaatacatagctggccacaatgacgttatgggcggggctctgatatggggcgaccttgatcctgaaaacctctggcactggaggaggaggcttggatcgataatccagcccttcgaggcctggctggtaatcaggggcctcaagactttggagctgcgctttgagagacagagcagaactgcccagaccatagccgaattcctgagcgagcatccaaagattgaaaaagttcactaccctggcctcaaggacgatccataccatcccaccgccaggaggatattctcaaagcccctcttcggcggagtcctcagcttcctccacagggagggagagagcggggctaaggcgtttctcatgaggctgaagagggtattcccctcgccctctcttgggggcgttgagagcctggcatcctaccccgtgatgagtgccgccaagactatgccagaggagaggcgcaggctcctcggaattaccccaggcctcatcaggctctcggttggcgttgaggacgccgatcttctcatcgaggacatagacagggccctggggggtggttga

SEQ ID NO: 13759 - protein, 366 aa, Thermococcus kodakarensis KOD1
MKPLHDPVYLTVAFEQAGETGLSDRGFDLKYSREENPTVRLLEKKVASIEGGTDSLAFNSGMAAISALYISTLKAGEEVVLPMEGYGTTIQLAEELRKFGVRVKLAYPSSEALNEAITENTRLVLTEVVTNPTLKVIDVPEVIRRAKEVGATVVVDNTFSPLIFKPLKVRADGVIHSLTKYIAGHNDVMGGALIWGDLDPENLWHWRRRLGSIIQPFEAWLVIRGLKTLELRFERQSRTAQTIAEFLSEHPKIEKVHYPGLKDDPYHPTARRIFSKPLFGGVLSFLHREGESGAKAFLMRLKRVFPSPSLGGVESLASYPVMSAAKTMPEERRRLLGITPGLIRLSVGVEDADLLIEDIDRALGGG

SEQ ID NO: 13760 - DNA, 1146 bp, Staphylococcus epidermidis RP62A
  CDS (1)..(1146): transl_table=11
atgaataaaaaaacgcaaatgatacatgggggacatacgacagacaactatactggagcagtgacaacacctatttatcaaacaagtacttatttacaagatgatattggtgatttaagacaagggtacgaatattcacgtactgcaaatcctacacgtgcgtctcttgaaagtgttattgctaatttagaacatggtaagcatggttttgcttttggttcaggaatggcagcaattagtgcagttatcatgttattagataaaggagatcacttagttcttaattctgatgtttatggtggcacatatcgtgcattaactaaagtatttactcgctttggtatagacgtagattttgttgatacaactaaaattgaaaacattgaacaatatattaaacctgaaactaaaatgttatatgtagaaacaccttcaaatccattattgcgtgtgactgatattaaagcatcagcaaaaattgcaaaaaaatatgatttgatatctgtagtcgataatacatttatgacaccttactaccaaaaccctttagactttggtattgatatcgtattgcattcggctacaaaatatattggaggccatagtgatgttgtagctggtcttgttgctactgctgatgatgatttagcagaacgtctaggctttatttcaaattctacaggtggtgtacttggacctcaagatagctatttattaatcagaggtattaaaacgctaggtctaagaatggagcaaataaaccgaaacgttgaaggtattgtgcaaatgttacaaaagcaccctaaagttcaacaagtattccatcctagtattaaggaacatatgaactatactatccatcaaaatcaagcaactgggcatacaggggtagtatcttttgaagttaaagatacagaagcggctaaacaagtgattcacgcaacaaactactttacactggcagagagtttaggggcagttgaaagtctaatttctgtaccggcacttatgacgcatgcgtccatcccatcagatgtaagagccaaggaaggtattacggatggtctcattcgtttatctattggtattgaagacacagaagacttagttaatgatttagaacaagccttaaatactttgagataa

SEQ ID NO: 13761 - protein, 381 aa, Staphylococcus epidermidis RP62A
MNKKTQMIHGGHTTDNYTGAVTTPIYQTSTYLQDDIGDLRQGYEYSRTANPTRASLESVIANLEHGKHGFAFGSGMAAISAVIMLLDKGDHLVLNSDVYGGTYRALTKVFTRFGIDVDFVDTTKIENIEQYIKPETKMLYVETPSNPLLRVTDIKASAKIAKKYDLISVVDNTFMTPYYQNPLDFGIDIVLHSATKYIGGHSDVVAGLVATADDDLAERLGFISNSTGGVLGPQDSYLLIRGIKTLGLRMEQINRNVEGIVQMLQKHPKVQQVFHPSIKEHMNYTIHQNQATGHTGVVSFEVKDTEAAKQVIHATNYFTLAESLGAVESLISVPALMTHASIPSDVRAKEGITDGLIRLSIGIEDTEDLVNDLEQALNTLR

SEQ ID NO: 13762 - DNA, 1212 bp, Pseudomonas syringae pv. syringae B728a
  CDS (1)..(1212): transl_table=11
atgactcaggaatgggatgcaggtcggctggacagcgaccttgaaggcgtaggtttcgataccctagccgtacgtgccgggcatcaccgcacaccggaaggagagcatggcgagcccatgttcttcacctccagttacgtatttcgcaccgccgccgacgcggctgcgcgtttctccggtgaggtgccgggcaacgtctactcgcgttacaccaacccgacggtgcgttcgttcgaagagcgcattgccgcactggaaggtgccgagcaggccgtcgctacggcgaccggcatggcggcaaccctggctgtggtgatgagcctgtgcagcgccggtgatcatgtgctggtgtcacgcagcgtcttcggctcgaccatcagcctgttcgacaagtacttcaagcgctttggtgtcgaggtggattacgttcctctcgccgatctgagcggctgggacgcggcgatcaagcccaacaccaaaatgctcttcgtcgaatcgccgtccaatcccctggctgagctggtcgacatcgcggcgctggccgagatcgcccacgccaagggcgcgatgctgatcgtcgacaactgtttctgcacgccggccttgcagcagccgctgttgctgggcgctgatattgtcgtgcattcggccaccaagttcatcgacggccagggccgttgcatgggcggcgtggttgccgggcgcagcgagcagatgaaagaagtggtcggcttcctgcgtactgccgggccgacgctcagcccgttcaacgcgtggatcttccttaagggcctcgaaaccctgaacctgcggatgcgcgctcactgtgccaatgctcaggcactggccgagtggctcgagcagcaggacggcatcgaaaaagtccattacgccggactgaagagtcacccgcagcacgagttggcccagcgtcagcaaaagggtttcggcgctgtggtgagcttcgaggtcaagggcggcaaggacggcgcatggcgcttcatcgatgccacacgactgatttcgatcactgccaacctgggtgacagcaaaaccacgatcactcacccgagtaccacctctcacggtcgcctggcacctcaggagcgtgaagccgcaggtattcgcgacagcctgattcgggttgcagtggggctggaagacctggctgacctgcaggctgacctggctcgtggtctggcggcgttgtga

SEQ ID NO: 13763 - protein, 403 aa, Pseudomonas syringae pv. syringae B728a
MTQEWDAGRLDSDLEGVGFDTLAVRAGHHRTPEGEHGEPMFFTSSYVFRTAADAAARFSGEVPGNVYSRYTNPTVRSFEERIAALEGAEQAVATATGMAATLAVVMSLCSAGDHVLVSRSVFGSTISLFDKYFKRFGVEVDYVPLADLSGWDAAIKPNTKMLFVESPSNPLAELVDIAALAEIAHAKGAMLIVDNCFCTPALQQPLLLGADIVVHSATKFIDGQGRCMGGVVAGRSEQMKEVVGFLRTAGPTLSPFNAWIFLKGLETLNLRMRAHCANAQALAEWLEQQDGIEKVHYAGLKSHPQHELAQRQQKGFGAVVSFEVKGGKDGAWRFIDATRLISITANLGDSKTTITHPSTTSHGRLAPQEREAAGIRDSLIRVAVGLEDLADLQADLARGLAAL

SEQ ID NO: 13764 - DNA, 1275 bp, Psychrobacter arcticus 273-4
  CDS (1)..(1275): transl_table=11
atgagtcaatcgcaagtgcaaaataaagacaatatacatagcttggatgcaaactggcgcgacgatgcgctcgatttagaactcaattatggcatgcagaccattgcagtacgtgcaggtcagcatcgtactgatgagggcgagcactcagaagctatttttactaccagctcttatgtgtatcgctcagcggttgatgctgctggtcattttgatggcacgaaaacaggcaatgtctattcacgccataccaatccaagcgtacgtacctttgagcgccgtttggcagcgcttgagaacggtgagcgtgcagtggcgacagcctctggcatgggcgcgattttgaccatgtgtttggcttacctaaaagcaggcgatcacttgctggctgctaatcagttgtttggctcctctattggtttgtttaataactatatggcaaagtttggcgttgaggtcagttacgttgattgcttcgacaatgacgcatgggcgaatgccgtacagcccaataccaaggttatttattgcgaaagccccagtaatccattggcacagatttgtgatatcggttatttaagtcagctatgtaaagccaatgacatactccttgtcgttgacaactgttttgccaccccagctttgcagcgtccgcttgatttgggtgcagatgtggtgattcattctgcaaccaagtacctagacggtcaaggtcgagtacttggcggcgcattggtcggtagtgataagctgatgcaagaggcatttacggtcatacgttcaggtggcatcagcatgagcccttttaatgcctgggtatttaccaagggactggagacgcttaaactgcgtatgcaggcgcattgtagtaatgccaatcaagtggcagagtttttggtcaatcatcccaatgtcagcaccgtgcatttttcaggcttgagcgatcatccgtctcatgaattaaccaagcgtcagcatcatatgaaagatggctttggggcgatcatgggttttgaggtgaaagctaaagggacgcacgatccaaaatctgccgcttggcatgtgattgattcaacccaaatggtctctattaccaacaatttgggtgatgccaaaaccaccattacccatcctgcaaccaccacgcatttccgtctgagcgcccaagagcgggcagaagcaggtgtaaaagacggtcttattcgtctgtcagttggtttagaagatgttgaagatatcatcaaagatttggcgcgtggtttagacagtttgtaa

SEQ ID NO: 13765 - protein, 424 aa, Psychrobacter arcticus 273-4
MSQSQVQNKDNIHSLDANWRDDALDLELNYGMQTIAVRAGQHRTDEGEHSEAIFTTSSYVYRSAVDAAGHFDGTKTGNVYSRHTNPSVRTFERRLAALENGERAVATASGMGAILTMCLAYLKAGDHLLAANQLFGSSIGLFNNYMAKFGVEVSYVDCFDNDAWANAVQPNTKVIYCESPSNPLAQICDIGYLSQLCKANDILLVVDNCFATPALQRPLDLGADVVIHSATKYLDGQGRVLGGALVGSDKLMQEAFTVIRSGGISMSPFNAWVFTKGLETLKLRMQAHCSNANQVAEFLVNHPNVSTVHFSGLSDHPSHELTKRQHHMKDGFGAIMGFEVKAKGTHDPKSAAWHVIDSTQMVSITNNLGDAKTTITHPATTTHFRLSAQERAEAGVKDGLIRLSVGLEDVEDIIKDLARGLDSL

SEQ ID NO: 13766 - DNA, 1167 bp, Colwellia psychrerythraea 34H
  CDS (1)..(1167): transl_table=11
atgtcgattactaaaaaaggtaatattaccacttcggcagtaagagccggtattaataccgaccagcagcatggcgctgtggttgctcctatttacctatccagtacctattcattaaagggctttaataacaaacgccaatttgattattctcgtacgggtaacccaacacgagctacttttgctggcgcgattgcagaattagagcaaggcagtgttggtattgttaccagtactggcatggcagcagtgcatttaatttgtcagttattatctacccaagacacggtcgtcattcctcatgattgttatggcggtagttttagattatttactcatttagctaaacgtggtcaattcaagcttattgttgtggatcaaaatgaccaacaagcactggataatgcgttagcacataagccaaaattggtgttacttgaaagcccaagtaatcctttattacgtttggtagatattgaagtagtaaccaaagcgtgtcacgcagtaggtgcattagtcgcggtagataacacgtttttatctccagcgctgcaacaacctcttacgctaggcgctgatattgtttttcactcaaccactaagtacattaatggtcatagtgatgtagtgggcggtgttgtcgttgctaaaaccgaagagttaggtgagcagttagcgtggtgggcgaattgtattggtattaccggcagtgcctttgatagtttcctcgcgttacgtggtttaaaaacattaccggtgcgaatgaagcaacaccaagaaaatgcgctacgagttgctgattttttaaaaaatcacgatgctattgatgcgatatatttcccaggttttcctgaacacacaggtcatcatattgccaaaaaacagcagtatggctttggtgcaatgttaagctttgaaataaagggtgacgttgaagcggttaaaaaattatttgaaaacctcgaattgttcacccttgcacaatcattaggtggtgttgaaagtctgatcagtcacccatcaactatgacgcatgcaggtatgacaatcccagatcagcttgaagcggggattactcagtctttagtacgtatatctgtaggcattgaagatattgatgacatattagctgatttagcacatggtttaacgcagagccaactgtaa

SEQ ID NO: 13767 - protein, 388 aa, Colwellia psychrerythraea 34H
MSITKKGNITTSAVRAGINTDQQHGAVVAPIYLSSTYSLKGFNNKRQFDYSRTGNPTRATFAGAIAELEQGSVGIVTSTGMAAVHLICQLLSTQDTVVIPHDCYGGSFRLFTHLAKRGQFKLIVVDQNDQQALDNALAHKPKLVLLESPSNPLLRLVDIEVVTKACHAVGALVAVDNTFLSPALQQPLTLGADIVFHSTTKYINGHSDVVGGVVVAKTEELGEQLAWWANCIGITGSAFDSFLALRGLKTLPVRMKQHQENALRVADFLKNHDAIDAIYFPGFPEHTGHHIAKKQQYGFGAMLSFEIKGDVEAVKKLFENLELFTLAQSLGGVESLISHPSTMTHAGMTIPDQLEAGITQSLVRISVGIEDIDDILADLAHGLTQSQL

SEQ ID NO: 13768 - DNA, 1242 bp, Colwellia psychrerythraea 34H
  CDS (1)..(1242): transl_table=11
atgacccaatttaagagcaaaaatattgaaactaacgctattcatgccggcagaattaatgatacacagtttggctcgcttgctacgcctttatatcaaacatctacgttcatctttgataatgctcagcaaggtggcgaccgttttgccggtgaaagcgaaggttatatttacacgcgcttaggtaacccaacaactcgccaattagaacagcgcgttgcggctatggaatgcatggatgatgcagctgcaaccgcaacaggtatggctgctgtctcagcagcgttactgactaacttgcaagctggcgatcatatgatttcatctaaagctgtttatggttgctcattcgcgctaatgaatcacatgctgaagaagtttaatatcgaggtgacgtttgtcgatatgactgagcctgacaatatcaaagcagccatcaaagaaaatactaagttagtctttttagaaacccccatcaatccaaacttagtggtattagatttggaaaaaatttgcgccattgccaaagcgcacaacttattatcaatagtagacaatactttccttacccctgtattacaacagcctgcaaaatttggtgctgatattgtggtgcatagtgcaactaaataccttaatggtcatggtgatgttgtcgccggtgtcgtctgtgctaattttgaaatgatcaacgaaataaaaatgacgacccttaaagatatcggtgccaccataagtcctcatgatgcttggttgattatgcgcggccttaaaactttgccgattcgaatggatagacattgtagcaatgcacaaacagtcgcagagtttttagaacaacaccctatggttgatgaagtttactatcctggtcttaaaagtcactctgggaacaagtttgtgggtaatcaaatgaaagccgcaggtggtgtaattgcttttgaattaaataccgacttgacgggtggaaaaacctttattgatgcaatggagcttttttcaattgccgtcagcttaggtgatgcagagtcattaattcaacaccctgcgtcaatgacacactcgccttatacccccgaagaaagagcagatgcgggcatcagtgatagtttaattagaatctctgtaggtttagagaatgtcgatgatattatcagtgatttaacccaagctttggaaaaagtgaaactgccaagcagcgataaagttaccaatattaatcaagcaaataatgcagcataa

SEQ ID NO: 13769 - protein, 413 aa, Colwellia psychrerythraea 34H
MTQFKSKNIETNAIHAGRINDTQFGSLATPLYQTSTFIFDNAQQGGDRFAGESEGYIYTRLGNPTTRQLEQRVAAMECMDDAAATATGMAAVSAALLTNLQAGDHMISSKAVYGCSFALMNHMLKKFNIEVTFVDMTEPDNIKAAIKENTKLVFLETPINPNLVVLDLEKICAIAKAHNLLSIVDNTFLTPVLQQPAKFGADIVVHSATKYLNGHGDVVAGVVCANFEMINEIKMTTLKDIGATISPHDAWLIMRGLKTLPIRMDRHCSNAQTVAEFLEQHPMVDEVYYPGLKSHSGNKFVGNQMKAAGGVIAFELNTDLTGGKTFIDAMELFSIAVSLGDAESLIQHPASMTHSPYTPEERADAGISDSLIRISVGLENVDDIISDLTQALEKVKLPSSDKVTNINQANNAA

SEQ ID NO: 13770 - DNA, 1212 bp, Pseudomonas syringae pv. phaseolicola 1448A
  CDS (1)..(1212): transl_table=11
atgactcaggaatgggatgcaggtcggctggatagcgaccttgaaggtgtgggtttcgatacccttgccgtacgtgccgggcaacaccgcaccccggaaggtgagcatggcgatcccatgttcttcacctccagctatgtctttcgcacggctgccgatgcggccgcgcgttttgctggcgaggtgcccggcaacgtctactcgcgttataccaacccgaccgtgcgctcttttgaagagcgcatcgccgcgctggaaggcgccgaacaggccgttgctacggccactggcatggcggcgaccttggcggtcgtgatgagcctgtgcagtgccggtgaccatgtgctggtgtcgcgcagcgtctttggctcgaccatcagcctgttcgacaagtacttcaaacgctttggcattgaggtggattacgttccgcttgcagagctgagcggctgggacgcggcgatcaagcccaacaccaaaatgctgtttgtcgagtcgccgtccaacccattggccgagttggtggacatcgctgcactggctgaaatcgctcacgccaaaggtacgatgctgatcgtcgacaactgtttctgcacgccggccttgcagcagccgctgttgctgggtgctgatatcgtcgtgcattcggctaccaagttcatcgacggccagggtcgctgcatgggcggcgtggttgccgggcgcagcgagcagatgaaggaagtggtcggcttcctgcgaacggccgggccaacgctcagcccgttcaacgcgtggatcttcctcaagggtctcgaaaccctgaacctgcgcatgcgcgctcactgtgccaatgcccaggcactggcacagtggctcgagcagcaggatggcatcgaaaaagtccattacgcggggctgaagagccacccgcagcacgagttggcccagcgtcagcaaaagggtttcggtgcggtggtgagcttcgaggtcaagggtggcaaggacggcgcatggcgcttcatcgatgccacgcgactgatttcgatcaccgccaacctgggcgacagcaaaaccacgatcactcacccgagcaccacctctcacggtcgtttggcacctcaggagcgtgaggcagcgggcattcgggacagcctgatacgggttgcagtgggcctggaagatgtgacggacctgcaagccgacctggctcgtggtctggcggcattgtga

SEQ ID NO: 13771 - protein, 403 aa, Pseudomonas syringae pv. phaseolicola 1448A
MTQEWDAGRLDSDLEGVGFDTLAVRAGQHRTPEGEHGDPMFFTSSYVFRTAADAAARFAGEVPGNVYSRYTNPTVRSFEERIAALEGAEQAVATATGMAATLAVVMSLCSAGDHVLVSRSVFGSTISLFDKYFKRFGIEVDYVPLAELSGWDAAIKPNTKMLFVESPSNPLAELVDIAALAEIAHAKGTMLIVDNCFCTPALQQPLLLGADIVVHSATKFIDGQGRCMGGVVAGRSEQMKEVVGFLRTAGPTLSPFNAWIFLKGLETLNLRMRAHCANAQALAQWLEQQDGIEKVHYAGLKSHPQHELAQRQQKGFGAVVSFEVKGGKDGAWRFIDATRLISITANLGDSKTTITHPSTTSHGRLAPQEREAAGIRDSLIRVAVGLEDVTDLQADLARGLAAL

SEQ ID NO: 13772 - DNA, 1182 bp, Dechloromonas aromatica RCB
  CDS (1)..(1182): transl_table=11
atggctgacttgccgaattaccgtccggaaacgctggcagttcgtgccggccaggagcgcagccagtttggcgaacattccgaagcgctctacctgacctcaagttttgttttcaagagcgcggcacaggcggcaaagcgtttctccggtgaagaggagggcaacgtttacgcccgcttctccaacccgaccgtcaccatgttcgaggagcgccttgctgccctggagggcgccgaggattgcgtcgccacctcaagtggcatgtcggcgatcatggccgccgtgctggcccatctgaagcagggtgatcacattgttgcctcgaatagcctgttcggcgcgacggtgcaattgttcaacaatatcctgtcgcggaccggcatcacgaccaccttcgtgtcgcataccgatccagcggcctgggcagcggcgatccgtccggaaacgaagttgtttttcctggaaacgccgtccaatccgctgaccgaaatcgccgacattcgggcgctggtcgccattgcccacgccaagggcattctggtcgccgtcgacaactgtttctgtacgcctatcctgcaacgcccactcgatatgggggctgatctggtcattcattcggccaccaagttcctggacggccaggggcgcgtcctgggtggtgccgtttgtggcccgaaaaaactgaccgaagaagtcttcaaatacctgcgtacagccggtccgaccttgtcggccttcaatgcctgggtgttgctcaagggcctcgaaaccctgaagttgcgggttgaggcacagtccgccaatgccgcagggctggctgcctggctggaagcgcacccgaaggtggcccgcgttttctatcccggcctgccatcgcatcctcagcacgagttggccaagacccagcaaaaatccggtggtgccattgtcgccttcgaggtgaagggcgctcgcgaacaagcctggcaggtcgtcgataattgccgcctgctgtccattaccgccaatctcggcgataccaagaccaccatcacccatcctgcctccaccacgcatggccgcatttccccggaagcccgggccgctgccggcatcaatgaagggctgctgcgcatcgccgtcggccttgaagcggtagaggacctgcaggccgacctcgaacggggtctggctcctatctga

SEQ ID NO: 13773 - protein, 393 aa, Dechloromonas aromatica RCB
MADLPNYRPETLAVRAGQERSQFGEHSEALYLTSSFVFKSAAQAAKRFSGEEEGNVYARFSNPTVTMFEERLAALEGAEDCVATSSGMSAIMAAVLAHLKQGDHIVASNSLFGATVQLFNNILSRTGITTTFVSHTDPAAWAAAIRPETKLFFLETPSNPLTEIADIRALVAIAHAKGILVAVDNCFCTPILQRPLDMGADLVIHSATKFLDGQGRVLGGAVCGPKKLTEEVFKYLRTAGPTLSAFNAWVLLKGLETLKLRVEAQSANAAGLAAWLEAHPKVARVFYPGLPSHPQHELAKTQQKSGGAIVAFEVKGAREQAWQVVDNCRLLSITANLGDTKTTITHPASTTHGRISPEARAAAGINEGLLRIAVGLEAVEDLQADLERGLAPI

SEQ ID NO: 13774 - DNA, 1146 bp, Thermobifida fusca YX
  CDS (1)..(1146): transl_table=11
atgagttacgaggggtttgagacactggccatccacgccggtcaggaggcagacgccgagaccggggccgtggtggtccccatctaccagacgagcacctaccgccaagacggggtgggcgggctgcgcggcggctacgagtactcccgcaccgccaacccgacccgcacggcactggaagaatgcctggccgcgctggaaggcggggtgcggggcctggcgttcgcttccggcatggccgcagaggacaccctgctccgcaccatcgcccgacccggcgaccacctcatcatccccaacgacgcctacggcggcacgttccgcctcgtctccaaggtcttcgaacggtggggagtgagctgggacgccgtcgacctgtccaacccggaggcggtgcggaccgcaatccgcccggaaaccgtggcgatctgggtggaaacccccaccaacccgctgctcaacattgcggacatcgccgcgctcgcggacatcgcgcacgccgctgacgcgctgctggtggtcgacaacaccttcgcctccccgtacctgcagcggccgctcagcctcggtgcggacgtggtcgtgcactccaccaccaaatacctgggcggccactccgacgtggtcggcggcgccctcgtggtcgccgacgcggaactgggagagcgcctcgccttccaccagaactcgatgggcgcggtcgcgggaccgttcgacgcctggctgaccctgcgcggcatcaaaaccctcggcgtgcgcatggaccggcactgcgccaacgcggaacgcgtcgtggaagcgctcgtcggccacccggaagtcgccgaagtgctctacccgggcctgtccgaccaccccggccacaaggtggcggtcgaccagatgcgcgccttcggtggcatggtgtcgttccgcatgcgcggcggggaggaagccgcgttgcgggtgtgcgcgaaaacgaaagtgttcaccctcgctgaatccttgggcggggtggagtcgctgatcgaacacccggggaagatgacccacgcctccaccgcgggctccctcctggaagtgcccagcgacctggtccggctctccgtgggtatcgaaaccgtcgacgacctcgtcaacgacctgctccaagcattggagccgtag

SEQ ID NO: 13775 - protein, 381 aa, Thermobifida fusca YX
MSYEGFETLAIHAGQEADAETGAVVVPIYQTSTYRQDGVGGLRGGYEYSRTANPTRTALEECLAALEGGVRGLAFASGMAAEDTLLRTIARPGDHLIIPNDAYGGTFRLVSKVFERWGVSWDAVDLSNPEAVRTAIRPETVAIWVETPTNPLLNIADIAALADIAHAADALLVVDNTFASPYLQRPLSLGADVVVHSTTKYLGGHSDVVGGALVVADAELGERLAFHQNSMGAVAGPFDAWLTLRGIKTLGVRMDRHCANAERVVEALVGHPEVAEVLYPGLSDHPGHKVAVDQMRAFGGMVSFRMRGGEEAALRVCAKTKVFTLAESLGGVESLIEHPGKMTHASTAGSLLEVPSDLVRLSVGIETVDDLVNDLLQALEP

SEQ ID NO: 13776 - DNA, 1170 bp, Prochlorococcus marinus str. NATL2A
  CDS (1)..(1170): transl_table=11
atgggatcagtaaaaagagagaaggaattcagcactggagtaaacacaagagtcattcatcacaaagataatttttctgaaggaactggttcaataatgccgccaatctttccaacctcaacgttcgttcatggcaatgagggtggctttgactacactcgttcaggaaatccaaattttcgaattcttgaatcagttttgtctgatctggaagaatgtaagttcgcaagtgtatttagttctggagtcgctgcgattacagcaatagtctccactcttaaggctggagacttaatcctttgtgaggagaatctttatggatgtacggtgagattatttgaacaagtttttaatcgttttggattaaaaactcaatggatagactttactaagcctaatttccaagaagtcatttcaaatcacaaacccgcgatgatttggatcgaaagtcctactaacccactcctcaaaattattgatattgaagggatttgtcatttcgcaaataaaatgaaaatacctgttgttgtagacaatacttttgcaacacctctattacaaagacctcttcaacttggagcgaccttatctttaactagcacgaccaagtttatcaatggtcactcagatgcacttggaggtgccgtatgcactgagagtgctatctggagagacaagctaaatttcgcccagaaagctcttggattaaacccttctccctttgattgctggcttattacacgaggaataaaaactcttccacttcgtctagaaagacaagttaataatgcatctaaaatagctaatcaattagccgataatccagcaataaaatatgttcgatatcctttcaggaatgatcatccacaatgtaaattagcaaaaagacaaatggctatgggaggagcaattgttactgccactgttaacgcaacccaagctcaaacctattcattttgtaaaagtcttcattacttcaaaatggcagaaagtctcggtggaattgaaagtcttgtttgccatccagccacaatgacacatgcttcagtgtccaaggaaacaaaaataaaaattggaattactgattcacttattcgattttctattggatgtgaggacattgaagacttaagtgctgatttgaatcaagccttaggaactatctcttga

SEQ ID NO: 13777 - protein, 389 aa, Prochlorococcus marinus str. NATL2A
MGSVKREKEFSTGVNTRVIHHKDNFSEGTGSIMPPIFPTSTFVHGNEGGFDYTRSGNPNFRILESVLSDLEECKFASVFSSGVAAITAIVSTLKAGDLILCEENLYGCTVRLFEQVFNRFGLKTQWIDFTKPNFQEVISNHKPAMIWIESPTNPLLKIIDIEGICHFANKMKIPVVVDNTFATPLLQRPLQLGATLSLTSTTKFINGHSDALGGAVCTESAIWRDKLNFAQKALGLNPSPFDCWLITRGIKTLPLRLERQVNNASKIANQLADNPAIKYVRYPFRNDHPQCKLAKRQMAMGGAIVTATVNATQAQTYSFCKSLHYFKMAESLGGIESLVCHPATMTHASVSKETKIKIGITDSLIRFSIGCEDIEDLSADLNQALGTIS

SEQ ID NO: 13778 - DNA, 1185 bp, Methanosarcina barkeri str. Fusaro
  CDS (1)..(1185): transl_table=11
atggaaagagaagtgaagtttgcaacaaaatgtgtacatgccgcagaaaagccggatccgattttcggagcgcatacaactccgatattccagacttcaaccttcatttttgaaaacgccaggcaaggggcagcgaggtttgcaggagaggaatcaggatacgtatatgccaggattcctccaaacactcccacgcatgcggttctcgctgaaaaatttgctgcactcgaaggtggggaagcagggcagacatttgcctcgggaatggcagcggtcactgcaattgcattaaccgccctgaagcaaggagaccatcttatttcaacggatgtagtatacggatgcacctatagcctcttttctcaggttttgccagggcttggaatagaagtcagtttcgtcgatacttctaaaaccgaaaatgtaaagagagcctttaagcccgagacaaaaatggtctttcttgagagtcctgcaaatcctacgcttaatgtatgcgatattcctgaaatagccagaatagccagagaaaacgaggccctctgcgttgtggacaacactttcgcaacaccttatttccagaggcctcttgagcttggagcagatctttccctgagtagctgtacaaaatatattggcggccatgcagacctgcttggcggaatcgttgcaggaaataatgattttatagaccgaatgtctgaagttgttggatatacaggaggcattatgggcccgcatgaagcctggctctgcataagagggcttaaaacactccatatccgaatggaaaggcacgctgaaaacgcaatgaaggttgcggaatttcttgaatcccgacccgaggtagagtgggtcaggtatccagggcttccaggtcatcctcagtacgaacttgcacgcaagcaaatgagtggattcagcggtatgctctcttttgaagtaaaaggcggaattgaagctgggcgaaagctcatggacaatgtaaagctctgttctcttgctgtgagcctcggagctacggatacccttattcagcaccctgcatcgatgactcatgcatgtgtccctcatgaagtaagaaagagtgtaggcataactgatgggcttgtcaggctctcggtaggaattgaagatcccgaagacataattgcagacctcaaacaggcccttgaagtaatttaa

SEQ ID NO: 13779 - protein, 394 aa, Methanosarcina barkeri str. Fusaro
MEREVKFATKCVHAAEKPDPIFGAHTTPIFQTSTFIFENARQGAARFAGEESGYVYARIPPNTPTHAVLAEKFAALEGGEAGQTFASGMAAVTAIALTALKQGDHLISTDVVYGCTYSLFSQVLPGLGIEVSFVDTSKTENVKRAFKPETKMVFLESPANPTLNVCDIPEIARIARENEALCVVDNTFATPYFQRPLELGADLSLSSCTKYIGGHADLLGGIVAGNNDFIDRMSEVVGYTGGIMGPHEAWLCIRGLKTLHIRMERHAENAMKVAEFLESRPEVEWVRYPGLPGHPQYELARKQMSGFSGMLSFEVKGGIEAGRKLMDNVKLCSLAVSLGATDTLIQHPASMTHACVPHEVRKSVGITDGLVRLSVGIEDPEDIIADLKQALEVI

SEQ ID NO: 13780 - DNA, 1170 bp, Thiobacillus denitrificans ATCC 25259
  CDS (1)..(1170): transl_table=11
atgaacgacgcatacgacatcgaaacccttggggtgcgcgccggcttggtccgcagccagttcaacgagcattccgaggccatgttcctgacctcgagcttcgttttcggcagcgctgccgaagccgccgcgcgcttcaagggtgacgagccgggaccgatctacgcccgtttcaccaacccgaccgtgcagatgatggaggcgcggctcgcggcgctcgagggggccgagcgctgcgtcgccttcgcctcgggcatggcggcgatcctcgcgaccgtgatggggctcatgaagggcggcgagcacgtcgtcgcctcgcgctcgatcttcggctcgaccgtgcagctgttctcgaacatcctcggccgcttcggcatcgaaacgagctatgtctcgccgaccgacccggccgaatggcgcgcagcggtgaaaccgaacaccaggcttttcttcgtcgaatcgccgtccaatcccctgaccgaggtcagcgacatccgcgcgctcgccgcgatcgcccgcgaggcgggcgcctggctcgcggtcgacaactgcttctgctcgccggcgctgcaaaagccgctcgagctcggcgccgacatcgtgatccattcggcgaccaagtatctggacgggcaggggagggtgctcggcggcgccgtgctcggcagccaggcgctgatggaaggtgtctacaccttcctgcgcacggccggtccgacgctgtcggccttcaacgcctgggtgatcctcaagggcatggagacgctggcgctgcgcatggacgcccattcgaagaacgcgctggcgctggcgcagtggctggaggcgcagccgcaggtcgtgcgcgtgctctacccgggtctgccgtcgcatccgcagcacgaactggcgatgacgcagcagaaaaccggcggcggcatcgtcgccttcgaactgaagggcggaaaggacgcagcgtggaagctgatcgacgcgacgaagctcttgtcgatcaccgccaacctcggcgacaccaagaccacgatcacgcatccggcgagcaccacgcacagccgcatgacgcccgagcagcggctggcggccgggatcggcgacggtcttgtacgcatcgcagtgggtctcgagtcggtcgcggacatcgaagccgatctggcgcgagggctggcgtga

SEQ ID NO: 13781 - protein, 389 aa, Thiobacillus denitrificans ATCC 25259
MNDAYDIETLGVRAGLVRSQFNEHSEAMFLTSSFVFGSAAEAAARFKGDEPGPIYARFTNPTVQMMEARLAALEGAERCVAFASGMAAILATVMGLMKGGEHVVASRSIFGSTVQLFSNILGRFGIETSYVSPTDPAEWRAAVKPNTRLFFVESPSNPLTEVSDIRALAAIAREAGAWLAVDNCFCSPALQKPLELGADIVIHSATKYLDGQGRVLGGAVLGSQALMEGVYTFLRTAGPTLSAFNAWVILKGMETLALRMDAHSKNALALAQWLEAQPQVVRVLYPGLPSHPQHELAMTQQKTGGGIVAFELKGGKDAAWKLIDATKLLSITANLGDTKTTITHPASTTHSRMTPEQRLAAGIGDGLVRIAVGLESVADIEADLARGLA

SEQ ID NO: 13782 - DNA, 1137 bp, Anabaena variabilis ATCC 29413
  CDS (1)..(1137): transl_table=11
atggaatttgaaactaaagcaattcatgaaggtcaacaatcagatccacaaactggtgcggtgattgtgccaatttatttaacttctacatatcaacaagaagccataggtcagcacaaagggtatgaatattctcgcactggaaaccccacgcgtaatgctttagaagaggctttagcagcgattgaaaatggtgaatatggtttagcatttgcttctggtttagcggctactaccactgtcctaagtctacttaaaagctgcgatcatattgtggctggcgatgatttgtatggtggtacttatcgtttattagaaagggtggtaaaaaattggggtgtaaccaccacctatgtagatattgatgatatttctaattttgctaaagctattcaacccaacactaaactgatttgggtagaaactcctactaatcccttattaaaaatcattgatattgccgcactagcaaatattgctgagcaaaataatcttattctagtagttgataacacatttgctagtccttactttcaaagaccgttagataatggtgctgatattgtagttcacagtaccaccaaatatttaggaggacacagcgatattattggcggcgcagtggtgacatccaatgagcaactatatactgaattgaaattttatcaaaacgcaattggggctgttcccagtccctttgatagttggttagtgctacgaggaattaaaacattagctgtcagaatgcgagaacatgaaaaaaatgctttgttattggctcaatttttagaacagcatcccaaagtcgaacgcgtttattacccaggtttacctagccatgaacaacatcaattggctaaatcacaaatgtctggttttggcgggatgattagcttggaattaaaaggcgattttgctgatgtagaaaaatttgcttctcgtctccagttatttttgttagcagaaagcttaggcggtgtagaatcattgctttgctaccctgcaaaaatgactcatggttctctaccacaagaagaaagatataaacggggaattaatgataatttagtccgtctttctgtaggaattgagaatgtattagacttgcaagctgatttggagaatgctttaagttga

SEQ ID NO: 13783 - protein, 378 aa, Anabaena variabilis ATCC 29413
MEFETKAIHEGQQSDPQTGAVIVPIYLTSTYQQEAIGQHKGYEYSRTGNPTRNALEEALAAIENGEYGLAFASGLAATTTVLSLLKSCDHIVAGDDLYGGTYRLLERVVKNWGVTTTYVDIDDISNFAKAIQPNTKLIWVETPTNPLLKIIDIAALANIAEQNNLILVVDNTFASPYFQRPLDNGADIVVHSTTKYLGGHSDIIGGAVVTSNEQLYTELKFYQNAIGAVPSPFDSWLVLRGIKTLAVRMREHEKNALLLAQFLEQHPKVERVYYPGLPSHEQHQLAKSQMSGFGGMISLELKGDFADVEKFASRLQLFLLAESLGGVESLLCYPAKMTHGSLPQEERYKRGINDNLVRLSVGIENVLDLQADLENALS

SEQ ID NO: 13784 - DNA, 1212 bp, Pseudomonas fluorescens PfO-1
  CDS (1)..(1212): transl_table=11
atgagtcaggaatgggatgccggtcggctggacagcgacctcgaaggcgtagcgttcgataccctggccgtacgtgccggtcagcaccgtacgccggaaggcgagcacggtgatccgatgttcttcacttccagctatgtgtttcgcaccgccgccgatgcggctgcgcggtttgccggggaagtgccgggcaacgtctactcgcgttacaccaacccgaccgttcgcgccttcgaagagcgcattgccgcgctggaaagcgccgagcaggcggtggccacggccaccggcatggccgcgatcatggctgtggtgatgagcctgtgcagcgccggcgaccatgtgctggtgtcgcgcagtgtgttcggttcgaccatcagcctgttcgagaagtatttcaagcgttttggcgtggaagtcgattacgtgccgctggccgatctgtcggcctggggcgcagcgatcaagtccaacaccaaattgctgttcgtcgagtcgccgtccaatccgttggctgaactggtggatatcaccgctctgtcggaaatcgcgcacgccaagggtgcgatgctggtagtcgacaactgcttctgcacgcctgccttgcagcagccgctgaagctgggcgcagacatcgttgtgcattcggccaccaagttcatcgatggccagggccgttgcatgggcggcgtggttgccggtcgcagcgaacagatgaaagaagtcgtcggcttcctgcgtaccgccgggccgaccctcagcccgttcaacgcctggatcttcctcaaggggctggaaaccctgaacctgcggatgaaggcgcactgcgccaatgcccaacaactggctgagtggctggagcagcaggatggcatcgagaaggtgcattacgccggtctcaagagccatccgcagcacgaactggctcagcgtcagcagaagggcttcggcgcggtggtgagctttgaggtcaagggcggcaaagagggtgcctggcgtttcatcgatgcgacccgtttgatctcgattactgccaacctcggtgacagcaaaaccaccatcacccacccgagcaccacgtcccatggccgtctggcgccgcaggagcgtgaggcagccggcattcgtgacagcctgatccgcatcgcggtcggtctggaagacgtggctgacctgcaagccgacctgtcgcgcggtctggcggcgttgtga

SEQ ID NO: 13785 - protein, 403 aa, Pseudomonas fluorescens PfO-1
MSQEWDAGRLDSDLEGVAFDTLAVRAGQHRTPEGEHGDPMFFTSSYVFRTAADAAARFAGEVPGNVYSRYTNPTVRAFEERIAALESAEQAVATATGMAAIMAVVMSLCSAGDHVLVSRSVFGSTISLFEKYFKRFGVEVDYVPLADLSAWGAAIKSNTKLLFVESPSNPLAELVDITALSEIAHAKGAMLVVDNCFCTPALQQPLKLGADIVVHSATKFIDGQGRCMGGVVAGRSEQMKEVVGFLRTAGPTLSPFNAWIFLKGLETLNLRMKAHCANAQQLAEWLEQQDGIEKVHYAGLKSHPQHELAQRQQKGFGAVVSFEVKGGKEGAWRFIDATRLISITANLGDSKTTITHPSTTSHGRLAPQEREAAGIRDSLIRIAVGLEDVADLQADLSRGLAAL

SEQ ID NO: 13786 - DNA, 1179 bp, Pseudomonas fluorescens PfO-1
  CDS (1)..(1179): transl_table=11
atgagccagcacgacaagaacgcccgtcaacaaggcttcgccacccgcgtgatccatgccgggcaaacgccggatccgaccaccggcgcgctgatgccgccgatctacgccaactccacgtacctgcaagacagccctggcgtgcacaagggtttcgactatggccgctcgcacaacccgacgcgttttgccctggagcgctgcgtggcggatctggagggcggcacccaggcgttcgccttcgcgtctgggctggcgacgatttccaccgtactcgaactgatcgatgccggctcgcacatcgtgtccggcaatgacctgtacggcggcacgttccgcctgttcgacaaggtgcgccagcgcagtgccgggcatcgtttcagctacgtcgatctggccgatctgtcagcgttcgaagcctcgctgcaggacgacacgcgcatggtcatggtcgagactccgaccaacccgctgctgagcctgtccgacctcgccgccattgcgcgcatctgcaaggcccgcgggatcatctgcgtggccgacaacacctttgccagcccatggattcagcgtcctctggaactgggcttcgacatcgtgctgcactcgaccaccaagtacctgaacggtcactccgacgtgatcggcgggatcgcggtcgttggcgacaatcctgcgctggccgaacgtctgggctttctgcagaacgccgtcggcgccatctccggcccgttcgacgcgttcctcaccctgcgcggcgtgaaaaccctggcgctgcgtatggagcgtcactgcagcaacgcgctggagctggcgcgctggctggagcagcagccgcaggtcaaacgcgtctactacccgggtctggaatcccacccgcaacacgaactggccaagcgtcagatgcgtggtttcggcggaatgatttccctggatctgaacagtgatctggcaggcgcccggcgtttcctggagaacgtgcagatcttcgccctggccgaaagcctcggtggtgtggaaagcctgatcgagcacccggcgatcatgactcacgcgaccattccggcggaaacccgcgccaaacttggcatcggtgacagcctggtgcgtctgtcggtgggcgtcgaggacatcgaggacctgcgtgcggatctggcgcaggcgttggccagtatctaa

SEQ ID NO: 13787 - protein, 392 aa, Pseudomonas fluorescens PfO-1
MSQHDKNARQQGFATRVIHAGQTPDPTTGALMPPIYANSTYLQDSPGVHKGFDYGRSHNPTRFALERCVADLEGGTQAFAFASGLATISTVLELIDAGSHIVSGNDLYGGTFRLFDKVRQRSAGHRFSYVDLADLSAFEASLQDDTRMVMVETPTNPLLSLSDLAAIARICKARGIICVADNTFASPWIQRPLELGFDIVLHSTTKYLNGHSDVIGGIAVVGDNPALAERLGFLQNAVGAISGPFDAFLTLRGVKTLALRMERHCSNALELARWLEQQPQVKRVYYPGLESHPQHELAKRQMRGFGGMISLDLNSDLAGARRFLENVQIFALAESLGGVESLIEHPAIMTHATIPAETRAKLGIGDSLVRLSVGVEDIEDLRADLAQALASI

SEQ ID NO: 13788 - DNA, 1215 bp, Rhodobacter sphaeroides 2.4.1
  CDS (1)..(1215): transl_table=11
atgggtatcgcgtttcgtgaaggacggacgggcatgacgaaggactggaagacaaggacgcaactcgtccacgggggcagccgccggagccagtatggcgaaatggccgaggcgatcttcctgacccagggcttcgtctacgactcggccgaacaggccgaagcgcgcttcatcgagaccggcgccgacgaattcatctatgcccgctacggcaaccccacgacgcgcatgttcgaagagcgcatcgcggccgtcgagggcaccgaggatgcgttcgccaccgcctcgggcatggccgcgatccacggcgtgctcacctcgatcgtgcgggcgggcgatcatctggtggcggcgcgcgctctgttcggctcctgcatctacatcctcgaggaggtgctgggccgattcggcgtcgaggtgaccttcgtcgacggcaccgatctcgatcagtggcgcgcggcggtgcggcccggcacgaaggccgtgttcttcgagtcggtctcgaatccgacgctcgaggtggccgatatcggcgccatcgccgagatcgcccatgccgtgggcgcgctcgtcatcgtggacaatgtcttcgcgacgcccgtcttctcgacggcggtgcggcagggcgcggatgtggtgatctattcggccaccaagcacatcgacgggcaagggcgcgcgctcggcggcgtggtctgcgcctcgcaggccttcatccgcaaggtgctcgaacccttcatgaagcacaccggcggctcgatgagccccttcaacgcctggctcatgctgaacgggatggcgacgctcgacctgcgctgccgcgcgatggccgacacggccgagaagatcgcccgcgcgctcgagggccatccgcagctcggccgcgtgatccatcccgcgctggaaagccacccgcagcacgagatggccaaggcgcagatggagcgtcccggcacgatgatcgcgctcgacctcgccgggggcaaggaggcggccttccgcttcctcgacgccctgaggatcgtgaagatctccaacaatctgggcgatgcccgctcgatcgcgacccacccggcaacgaccacccaccagcgtctttccgacgcgcagaaggcccatctcggcatcacgcccgggctcgtgcggctgtcggtggggctcgaggatgcggacgacctgatcgccgatctgaaacaggcgctcgcggtgatctga

SEQ ID NO: 13789 - protein, 404 aa, Rhodobacter sphaeroides 2.4.1
MGIAFREGRTGMTKDWKTRTQLVHGGSRRSQYGEMAEAIFLTQGFVYDSAEQAEARFIETGADEFIYARYGNPTTRMFEERIAAVEGTEDAFATASGMAAIHGVLTSIVRAGDHLVAARALFGSCIYILEEVLGRFGVEVTFVDGTDLDQWRAAVRPGTKAVFFESVSNPTLEVADIGAIAEIAHAVGALVIVDNVFATPVFSTAVRQGADVVIYSATKHIDGQGRALGGVVCASQAFIRKVLEPFMKHTGGSMSPFNAWLMLNGMATLDLRCRAMADTAEKIARALEGHPQLGRVIHPALESHPQHEMAKAQMERPGTMIALDLAGGKEAAFRFLDALRIVKISNNLGDARSIATHPATTTHQRLSDAQKAHLGITPGLVRLSVGLEDADDLIADLKQALAVI

SEQ ID NO: 13790 - DNA, 1194 bp, Rhodobacter sphaeroides 2.4.1
  CDS (1)..(1194): transl_table=11
atggccgatcgcgacgacattcccgaaagcctcgtgcgccggacgccctggcccgagagcgtgagccggccggtggtgacgccgctgcagccctcggtggtctatgcctcgctcgaccccgaccagctcgacgcgcaatatgcggggcaggtcaagggtttcacctatgcccgcgagggccatcccaatgccgaggtgctggcgcgcaagatcgatgcgctggaaggggccgagggcgggatcgtcgtgggctcggggatggcggcggtggcggcggtgctactgggccttctgcgtgcgggcgatcatgtggtgggcggcgaccagctctatggccggtcgctgcggatgatggccgaggatctgccgcggctcgggatcgccacctcgctcgccgatgccaccgatgcggcggcggtcgaggcggcgctccggcccgagacgaaactcgtgctgatcgaggtggtctcgaacccgacgcttcgggtagccgatctcgatggcatcgccgcgctctgccgcgcgcgggggatccttcttgccgtcgacagcaccttctcgaccccgcgggggatccggcccttcgaccatggcgcggatatcgtgatccattcggtgacgaagcttctggccggccattcggacgtgacgctcggctatgtcgcctgccgcacggccgagctgcgccgggcggtcgagctgttcgcggtgacgacgggccttacgcccagcccgttcgactgctggctggccgagcgcgggcttctctccttccacctccgctacgaccgggccgaggagactgccgcccggctggccgatcatctggcgggtctgccgggggtgcggcgcgtgatctatccgctgcgggccgatcatcccgatcaggcacgagcagtggcgctgctcggacggcgcggcggcaacatgctgtccttcgagctcgagggcgggcgcgcggcggccaatgcgctgacccgcgccatgccggccgtggccttcgcgcccacgctgggcgacgtcggcaccacgctctcgcacccggcctcctcctcgcaccgggcggtcgcgcctgaggtgcgggcgcggctcggcatttcggagggcttcttccgcatctcggtgggcgtcgaggaggcggatctcctgatccgcgacttcaccgcgggtgtggccgcagcccgcgacgcctga

SEQ ID NO: 13791 - protein, 397 aa, Rhodobacter sphaeroides 2.4.1
MADRDDIPESLVRRTPWPESVSRPVVTPLQPSVVYASLDPDQLDAQYAGQVKGFTYAREGHPNAEVLARKIDALEGAEGGIVVGSGMAAVAAVLLGLLRAGDHVVGGDQLYGRSLRMMAEDLPRLGIATSLADATDAAAVEAALRPETKLVLIEVVSNPTLRVADLDGIAALCRARGILLAVDSTFSTPRGIRPFDHGADIVIHSVTKLLAGHSDVTLGYVACRTAELRRAVELFAVTTGLTPSPFDCWLAERGLLSFHLRYDRAEETAARLADHLAGLPGVRRVIYPLRADHPDQARAVALLGRRGGNMLSFELEGGRAAANALTRAMPAVAFAPTLGDVGTTLSHPASSSHRAVAPEVRARLGISEGFFRISVGVEEADLLIRDFTAGVAAARDA

SEQ ID NO: 13792 - DNA, 1284 bp, Burkholderia sp. 383
  CDS (1)..(1284): transl_table=11
atggcctatcgcaactatcacaagcgcaagattgcagaccgggaactccatcccgaaacccagatgatgtcgtacggctacgatccgttcctgtcggaaggatcggtgaagccgcccgtgttcctcacgtcgacgttcgcgttccgcacggccgaggacggcgccgaattcttcgacgtcgtggccggacgcaagccgtcgcccgaaggcgaaggcgcgggcctcgtctacagccgtttcaatcacccgaacctggagatcgtcgaggatcgcctcgcgctgctcgacgattccgaagccgctgtcgtgacgtcgagcggcatgtcggccatcgccgcgatcctgctgacctttctgcggccgggcgactgcgtcgtccagtccgtgccgctgtatggcggcaccgaaacgctgatctcgaagttcctgcccgagtggggcatccgctccgaagtgattgccgacggactgtccacccacgcgatccgcgccgcgctcgaagcggccgcgcaaaagggcaacgtgcggatgtgctacatcgagacgcccgccaacccgaccaacgcgctgttcgacctcgaagggctgcgcagcgagatcgacgcgttcgaggctcgccacggctatcgtccgctgtcggtctgcgacaacacgctgctcgggccgctgtaccagaagccgtcgcggcaaggcatcgacctgagcgtgtactcgctgacgaaatacatcggcgggcatagcgacctcgtcgccggcggtgtcacgggcacccgcgagctgatcacgaagatccgctcgatccgcagcacgctcggctcgcagctcgacccgcattcgtgctggatgatcacgcgctcgatggaaacgctcgtgctgcgcatgcagcaggccgcccgcagcggcagcaccgtcgctcgctggctcgccgacaatccgcatcggccggtgcgcgtgctgcaccccgagctcatcgacgaaccggcctatcaggccgtctatcagcgccagtgcaccggacccggctcgacgttcgcgttcatcctcgacggcggccgcgagcaggcgttcaggttcatcaaccacctgacgctcttcaagtcggcggtcagtctcggcggcacggagtcgctgatctgccatccggcatcgacgacgcattcgggcgtgccggccgacgcgcgtgcggcggcgggcgtgtcggaagggttgattcgcgtgtcggtcgggctcgaacatccggacgacctgatcgccgacctgtcgtacgcgctggagcattgctga

SEQ ID NO: 13793 - protein, 427 aa, Burkholderia sp. 383
MAYRNYHKRKIADRELHPETQMMSYGYDPFLSEGSVKPPVFLTSTFAFRTAEDGAEFFDVVAGRKPSPEGEGAGLVYSRFNHPNLEIVEDRLALLDDSEAAVVTSSGMSAIAAILLTFLRPGDCVVQSVPLYGGTETLISKFLPEWGIRSEVIADGLSTHAIRAALEAAAQKGNVRMCYIETPANPTNALFDLEGLRSEIDAFEARHGYRPLSVCDNTLLGPLYQKPSRQGIDLSVYSLTKYIGGHSDLVAGGVTGTRELITKIRSIRSTLGSQLDPHSCWMITRSMETLVLRMQQAARSGSTVARWLADNPHRPVRVLHPELIDEPAYQAVYQRQCTGPGSTFAFILDGGREQAFRFINHLTLFKSAVSLGGTESLICHPASTTHSGVPADARAAAGVSEGLIRVSVGLEHPDDLIADLSYALEHC

SEQ ID NO: 13794 - DNA, 1143 bp, Synechococcus sp. CC9605
  CDS (1)..(1143): transl_table=11
gtgaacacaggcctgaacacccgggtgatccaccacggcgacagttttgcgggagacaccggcaccgtgatgccgccgatcttccccaccagcacctttgcccatggcaacgccggcggatttgattacacccggtccggcaaccccaacttccgcatccttggtggggtactcgcctcggttgaagtctgtgcccacgccaccgtgttcgcctccggcgtcagcgccattaccgccgtggtgtcccaactgaaacagggcgatctggtgctctgcgaagagaacctctacggctgcaccgtgcggctgttcgagcaggtgttcgcgaagttcggattggaaaccgcttgggtggacttcactcagccggccgcactggagcagatccaagcccagaagccggcgatggtgtggctggagagccccaccaaccctctgcttaaagtgattgacctggaggcggtgtgtgccatcacccaacccctcggcatccccgtggtggtggacaacaccttcgccaccgccctggtgcagcgccccctggatctgggcgccaccctctcgctcaccagcacaaccaagtacatcaatggccactccgatgccctcggcggagccgtgtgcaccaacgatcccgagtggcaccagaaaatggtgttctcccagaaggccctgggcctgcagccctcaccctttgattgctggctgatcacgcggggcatcaagaccctgccactgcggctcaagcagcagatggccaatgccgcggccctggccgatcaactggcggggcacgccaaggtgaactgggtgcgttacccccaccgcagtgatcacccgcagcatcaggtggcagcccgtcagatgcgcgccggtggcgccatcgtgacggtgagcttcaacgccagccaggagcagacctatgccctctgcaaacagctgcgctggttcaccatggccgaaagcctgggcggcatcgaaagcctgatctgccaccccgccaccatgacccacgccgcggtgtctgctgaggtgaaggccaaactgggcatccacgatggcctggtgcgcttctcggtgggctgcgaagacctcgccgatctgcaggccgatctggaccaggccctggagctgctggcgtga

SEQ ID NO: 13795 - protein, 380 aa, Synechococcus sp. CC9605
MNTGLNTRVIHHGDSFAGDTGTVMPPIFPTSTFAHGNAGGFDYTRSGNPNFRILGGVLASVEVCAHATVFASGVSAITAVVSQLKQGDLVLCEENLYGCTVRLFEQVFAKFGLETAWVDFTQPAALEQIQAQKPAMVWLESPTNPLLKVIDLEAVCAITQPLGIPVVVDNTFATALVQRPLDLGATLSLTSTTKYINGHSDALGGAVCTNDPEWHQKMVFSQKALGLQPSPFDCWLITRGIKTLPLRLKQQMANAAALADQLAGHAKVNWVRYPHRSDHPQHQVAARQMRAGGAIVTVSFNASQEQTYALCKQLRWFTMAESLGGIESLICHPATMTHAAVSAEVKAKLGIHDGLVRFSVGCEDLADLQADLDQALELLA

SEQ ID NO: 13796 - DNA, 1176 bp, Geobacter metallireducens GS-15
  CDS (1)..(1176): transl_table=11
atgaacatcgcaacccagacagcacagatcggacttgagtgggacacccgcaccggcgcggtgacggtccccatctaccagacggccaccttccggcacccggggctcggccagagcaccggctacgactatacccgctccggcaaccccacccggcaggccctggaggaggggatcgcccgcctggagggaggcgcccggggcttcgcctacgcctcgggcatggccgccatcgccaatctcctcctcctcttcaagaagggggaccacttggtggtgaccgaggatctctacggcggtacctgtcgtctcttcgaccagatcttcacccagtacgagctctccttcacctacgtggacacgagcgacatcaaggcagtgcgtgccgccatccgcccagaaacgaaggccctcttcgtggagtccctcaccaacccgctcctcaaggtagccgacatcgcggccctctcggccctctgccgggagcgggggcttctccacatcgtggacaacaccttcctcaccccctatctcctgcgccccttcgaccatggggccgacatcaccgtctacagcgccaccaagtacctggccggccacaacgacacggtctccggcctcgtggcggtgaaggacccgcagctggccgagcgggtctacttcctccagaactcggtgggtgcggtcctgggcccccaggattcctggctcaccatccgggggatgaagaccctttcggtgcgcctcgaccgacagcaggagaacgcagggcgggtcgcccagtggctttcgaatcacccgcgggtgcggaaggtctactaccccggcctctccggccaccccggccaccccggccatgaactcctcgcccgccaggcacggggcttcggtgccatgattgccttcgaggtggacgagcatgcgctcgtggagcgtttgcttctgaagacggaagtgatatccttcgccgagagcctcggcggggtggaaaccctcattaccttcccccaggtccagacccatgccgatattccgcccgaactgcggcagcggcttgggatcaacgatgtgctcctgcgcctctccgtggggatcgaggacgcggacgacctgatcgacgacctggcccaggcgtttgaaggcggggaccagggatcgggaaccggggaccggtaa

SEQ ID NO: 13797 - protein, 391 aa, Geobacter metallireducens GS-15
MNIATQTAQIGLEWDTRTGAVTVPIYQTATFRHPGLGQSTGYDYTRSGNPTRQALEEGIARLEGGARGFAYASGMAAIANLLLLFKKGDHLVVTEDLYGGTCRLFDQIFTQYELSFTYVDTSDIKAVRAAIRPETKALFVESLTNPLLKVADIAALSALCRERGLLHIVDNTFLTPYLLRPFDHGADITVYSATKYLAGHNDTVSGLVAVKDPQLAERVYFLQNSVGAVLGPQDSWLTIRGMKTLSVRLDRQQENAGRVAQWLSNHPRVRKVYYPGLSGHPGHPGHELLARQARGFGAMIAFEVDEHALVERLLLKTEVISFAESLGGVETLITFPQVQTHADIPPELRQRLGINDVLLRLSVGIEDADDLIDDLAQAFEGGDQGSGTGDR

SEQ ID NO: 13798 - DNA, 1164 bp, Prochlorococcus marinus str. MIT 9312
  CDS (1)..(1164): transl_table=11
atgggaaataagacaaataatatcaaaaagccaggtgttaagaccttatctattcaccatggggaaacatttgcagaagacacgggatgcattatgcctcctattttttctacatctactttcaagcatggcaataaagaaagtttcgactacaccagatcaggaaatcccaactttaaaattctagaaaacatacttaaatcaatagaagattctaaatactgtacagtttttggatctggaattagcgcggtaactgcaattacatcaacactaaaatcaggcgataagatactctgcgaatcaaatctttatggttgtacagtgaggatgttcgaaaaaattttcaagaaatttggggtagaagttttatacacagattttacaaataaaaataatattaaaaagatttcaaacttcgcgccaactttgatatggctagaaagtccaactaatccacttttaaaggtgcttgatattaaggcgatttgtgatgaagcgaataaattgcaaatacccgtagttgtggacaacaccttttctacagcccttattcaaaaacctttggaacttggcgcaacactatcgcttgtaagcacaacaaaattcattaatggacatagtgatgcacttggtggagcagtacttacaaataatgagatatggaatagtaagatgcttttctctcaaaaagccctggggcttcaaccatctccttttgatagttggctcattactagaggagtaaaaacccttcctttaagaatcgaacaacaaactcgaagtgcagaattaatttctgaagaattagagaatcataaaataattagtaaagtaatttatccttttaatcaaaaacacccgcaatttaatttagcaaaatctcaaatgatatctggaggttcgatgatcaccctaaaattaaatttaaataaagaggatacttttaaattatgcaagtctctcaaatatttctcgctagctgaaagccttggaggagttgaaagtttaatttgtcacccggcaacaatgactcatgcttctgtggatgataaaacgaaaaatctactagggatagatgatgcccttgtcagattatcaattggatgtgaagatgcaaacgatttaatctcggatattttatttgctttaaataaattttga

SEQ ID NO: 13799 - protein, 387 aa, Prochlorococcus marinus str. MIT 9312
MGNKTNNIKKPGVKTLSIHHGETFAEDTGCIMPPIFSTSTFKHGNKESFDYTRSGNPNFKILENILKSIEDSKYCTVFGSGISAVTAITSTLKSGDKILCESNLYGCTVRMFEKIFKKFGVEVLYTDFTNKNNIKKISNFAPTLIWLESPTNPLLKVLDIKAICDEANKLQIPVVVDNTFSTALIQKPLELGATLSLVSTTKFINGHSDALGGAVLTNNEIWNSKMLFSQKALGLQPSPFDSWLITRGVKTLPLRIEQQTRSAELISEELENHKIISKVIYPFNQKHPQFNLAKSQMISGGSMITLKLNLNKEDTFKLCKSLKYFSLAESLGGVESLICHPATMTHASVDDKTKNLLGIDDALVRLSIGCEDANDLISDILFALNKF

SEQ ID NO: 13800 - DNA, 1173 bp, Rhodospirillum rubrum ATCC 11170
  CDS (1)..(1173): transl_table=11
atgagcgcgtccatcatcaccaccaccaagggcttcgccacctgggccgtccacgccggccatggcgccgatgcgaccaccggcgcggtcatgacgccgatctacgccacctcaaccttcgcccaatcctcgccgggcaagcatacggggtgggaatacgctcgctcgggcaatccgacccgcgccgcctttgaacgcgccgtcgccgaattggaaggcggcaccaacggctatgccttcgcctccggcctcgccgccgaggcgaccattctcgatctgctcgaccacggcgcccatatcatcgccggcgacgacctgtacggcggatcctggcgattgtttgaaaaggtgcgggcgcgctcggccggcttgacggtcagctatgtcgatcccagcgaccttggcgccgtggcccaggcgatcaccccgcagaccaagctgatctggatcgaaacgccaagcaatccgctgctcaagatcgccgacctcgcggctttggccgccttggccaaggagcatggcctgcgcacggtggtcgattcgaccttcgccacgccgtggatccagcgcccccttgatcttggcatcgatatcgtcgtccattcggcgaccaaatacctgaacggtcattccgacgtgatcgccggggtggtggtggtcaaggatcccgatctcgccagccagttgggcttcctgcaaaacgccaccggcgccgtgctcgatcccttcgccgccttcctggccctgcgcggcctgaagaccctggccctgcgcatggaccgccattcggccaatggcttggccgtcgcccatgccctggaaggccgggccaaggttcgccgcgtgctttatcccggcctcgccagccacccccagcacgcactggcccgccagcagatgcgcgccttcggcggcatgctcaccctggatctcgagagcgatctggccggaaccgtgcgcttcctggaagccttgaaactgttcaccctggccgaaagcctgggcggcgtggaaagcctagccggccatccggtgaccatgagccacggatcgatcccggtcgaacgccggacggcccttggcatcaccgacaccctggtccgcctgtcggtcggcatcgaagacgccggcgatctgatcgccgatctcgatcaggcgctggccgtcgtctga

SEQ ID NO: 13801 - protein, 390 aa, Rhodospirillum rubrum ATCC 11170
MSASIITTTKGFATWAVHAGHGADATTGAVMTPIYATSTFAQSSPGKHTGWEYARSGNPTRAAFERAVAELEGGTNGYAFASGLAAEATILDLLDHGAHIIAGDDLYGGSWRLFEKVRARSAGLTVSYVDPSDLGAVAQAITPQTKLIWIETPSNPLLKIADLAALAALAKEHGLRTVVDSTFATPWIQRPLDLGIDIVVHSATKYLNGHSDVIAGVVVVKDPDLASQLGFLQNATGAVLDPFAAFLALRGLKTLALRMDRHSANGLAVAHALEGRAKVRRVLYPGLASHPQHALARQQMRAFGGMLTLDLESDLAGTVRFLEALKLFTLAESLGGVESLAGHPVTMSHGSIPVERRTALGITDTLVRLSVGIEDAGDLIADLDQALAVV

SEQ ID NO: 13802 - DNA, 1287 bp, Moorella thermoacetica ATCC 39073
  CDS (1)..(1287): transl_table=11
atgactaccaatcaccagtatcgttttgccaccctggccgttcaagccggccaggagcccgatccggctacgggagctcgcgccgtgcctatctaccagactacttcctatgtcttccgggatgccgatcatgccgccgccctcttcggcctgagggaagaaggtaatatatatacccggattatgaatcccactaccgatgtctttgaaaaaaggatggctgccctggagggcggtgtcggcgccctggcaacggcttccggccaggcggccatcaccctggccatagctaatatcgccaccgccggacaggagattgttgcttccaccagcctttacggcggcaccttcagtctttttaattcaaccctgcccaagtttggtattaaaacccgttttgtcgacagcgccgaaccggaggatttccgggctgccattacagaccggaccagggccctttatgtggaaatcctgggcaatcccaagctggacgtgccggacctggaggccctggctgccatcgcccacgaggctggtattcctttaatcgttgataacaccttcgccacgccttacctgtgccgtccgtttgaattcggagccgatatcgtcgtgcactcggcgaccaagtttatcggcggccatggtacttccattggcggcataattgtcgattccggtaaattcaattgggataacggtaaatttcccggactggtagaacccgatcccagttatcacggcctcagttacgtccagtcctttggcccggcggcctacatcgtcaaggcgcgggtccagctcttgcgggacctgggaccggccttaagtcctttcaatgccttccttttcctgcagggactggaaactctgcacctgcggatggagcgccacgtccaaaatgctaccaggatcgccggctggctggcagagcacccggctgtcgcctgggtgagctatccgggcctacccggccatccctactacgaacgggcccgaaaatacctgcctaaaggagcgggggccattttgacctttggtattaagggcggcaaggaggccggtaagaagtttatcaacagcgtgaaactcttctccctcctggccaacgtgggtgatgcccattccctggtcattcacccggccagtaccacccatcagcagctgacaccggaggaacagctggcctcgggtgttaccgaagatctggtccgcatctccgtgggcctggaggacgtagaagacctgattgccgacctggaccaggcattaaacaggagccggtag

SEQ ID NO: 13803 - protein, 428 aa, Moorella thermoacetica ATCC 39073
MTTNHQYRFATLAVQAGQEPDPATGARAVPIYQTTSYVFRDADHAAALFGLREEGNIYTRIMNPTTDVFEKRMAALEGGVGALATASGQAAITLAIANIATAGQEIVASTSLYGGTFSLFNSTLPKFGIKTRFVDSAEPEDFRAAITDRTRALYVEILGNPKLDVPDLEALAAIAHEAGIPLIVDNTFATPYLCRPFEFGADIVVHSATKFIGGHGTSIGGIIVDSGKFNWDNGKFPGLVEPDPSYHGLSYVQSFGPAAYIVKARVQLLRDLGPALSPFNAFLFLQGLETLHLRMERHVQNATRIAGWLAEHPAVAWVSYPGLPGHPYYERARKYLPKGAGAILTFGIKGGKEAGKKFINSVKLFSLLANVGDAHSLVIHPASTTHQQLTPEEQLASGVTEDLVRISVGLEDVEDLIADLDQALNRSR

SEQ ID NO: 13804 - DNA, 1137 bp, Moorella thermoacetica ATCC 39073
  CDS (1)..(1137): transl_table=11
atgcgtctggctacagagctggtccagctgggagtagggtatgatagtaaaacgggagctatcagcacgcctatctaccagtcagctaccttccgtcacccggccctggggcagagtactggttttgactacagccggacaggcaaccctacccgccaggtcctggaagaaggcctggccgggctggagggaggctgtcgcgccctggcctttgcctccggcatggccgccattaccgccgttctctgccttttccggcccggcgaccacctggtggtttctgaggatttatacggcggtacttacaggctgctaaaccaagtagcggttcccttggggctggagttttcccttgtagatactactgacctggctgccctggctgcatctataaggaacaatacgaaaggcatcttcctggagacacctaccaacccactaatgaaaatcaccgatattgccgccgtggttgccctggcccgccagaggggcctgttgactattgtagataatacttttatgaccccttacctgcagcgacccctggaactgggagcggacctggtggtccacagcgccaccaaatatttaggcggtcacaatgatgtagttatgggggcagcgatagccgcccgggaggatctcagcgaaaggctggcctttatccaaaataccatcggcgcgattcccggtccccaggactgctggctggtaatccggggcttgaaaaccctggccgtacgcctggagcgagcccaggccaacgcttttgagctggcccggtggctggccgaacaccccctggtgaccagggtttattatccgggcctcccccatcatcccggtcacgaaatatgtaaaaaacagtccagcgggttcggggccatgctttcctttgaagtcaagcacgccggactggtggagcagattttacagcgcttaaaaattatttcctttgcggaaagcctgggtggggtagaaagcttgatcacttttccggaacgccagacccatgccgaaatccctgctgagatgcgtcttaaactgggcatcaatgatcgtttgttacgtttgtcagtcggactggaagacttgaacgatctcaaggccgacctggaccaggctctggcctgttaa

SEQ ID NO: 13805 - protein, 378 aa, Moorella thermoacetica ATCC 39073
MRLATELVQLGVGYDSKTGAISTPIYQSATFRHPALGQSTGFDYSRTGNPTRQVLEEGLAGLEGGCRALAFASGMAAITAVLCLFRPGDHLVVSEDLYGGTYRLLNQVAVPLGLEFSLVDTTDLAALAASIRNNTKGIFLETPTNPLMKITDIAAVVALARQRGLLTIVDNTFMTPYLQRPLELGADLVVHSATKYLGGHNDVVMGAAIAAREDLSERLAFIQNTIGAIPGPQDCWLVIRGLKTLAVRLERAQANAFELARWLAEHPLVTRVYYPGLPHHPGHEICKKQSSGFGAMLSFEVKHAGLVEQILQRLKIISFAESLGGVESLITFPERQTHAEIPAEMRLKLGINDRLLRLSVGLEDLNDLKADLDQALAC

SEQ ID NO: 13806 - DNA, 1152 bp, Moorella thermoacetica ATCC 39073
  CDS (1)..(1152): transl_table=11
atgcagagaggaacgcgactgatccatcaccgcttatctatggattctgctaccggaggggtgagtatccccatccaccagagcgtggtatttgcccaggaaagcctggatcagccgggcgaatacgaatacacccgttccggcaatcctacccggcgggccctggaagaggccatcgccgagctggaaggaggtaattacggttttgcttttgcttccggaatggcagctatcaccgccgctttaagccttttttcgtccggcgaccacctgctggtatccagggatatctatggcggcacctaccgggccctggccgaggttttcccgcgtttcggcctggaagtaaccttcgtggataccaccaacctggagacagtggcggcccagatccggccttctaccaaagggctttacctcgaaaccccttccaacccgctgatgaaaatcaccgacctggccagggccgccgccctggccagggaacacggcttgataaccatagcagacaataccttcatgactccctacctgcagcggcccctggaactgggaattgacatcgtcgtccacagcgccaccaaatacctgggcggccacagcgactgcctggcaggcctggctgtcaccagggacgccggcctggccagggaactgaccctgctgcaaaacaccctggggaccgtcctggccccccatgagtgctggctgattttacggggcatcaagactctgaaggtgcgcctgctccaacaacaacggacggcgactgtactggcggaatggttacgcaaacacccgcaagtgaaggccgtctactacccgggcctggaggggcacccgggccgggaaacgcactttcgccaggccgacggtggcgggggcgtactctccttccgcctggctacgccggaactggcccgccaggtcattaacaacgtcagactgccggtcattggttccagcctgggggctgtggagagcatcatctccctaccggccaccatgtcccacggcagcctgccgggagagctaaagcgcgaactcgggatcacccccgacctggtacggctgtcggtgggtctggaggaggcggaagacctgcaggccgacctggagcaggcactggattctccccgggggcacaggtaa

SEQ ID NO: 13807 - protein, 383 aa, Moorella thermoacetica ATCC 39073
MQRGTRLIHHRLSMDSATGGVSIPIHQSVVFAQESLDQPGEYEYTRSGNPTRRALEEAIAELEGGNYGFAFASGMAAITAALSLFSSGDHLLVSRDIYGGTYRALAEVFPRFGLEVTFVDTTNLETVAAQIRPSTKGLYLETPSNPLMKITDLARAAALAREHGLITIADNTFMTPYLQRPLELGIDIVVHSATKYLGGHSDCLAGLAVTRDAGLARELTLLQNTLGTVLAPHECWLILRGIKTLKVRLLQQQRTATVLAEWLRKHPQVKAVYYPGLEGHPGRETHFRQADGGGGVLSFRLATPELARQVINNVRLPVIGSSLGAVESIISLPATMSHGSLPGELKRELGITPDLVRLSVGLEEAEDLQADLEQALDSPRGHR

SEQ ID NO: 13808 - DNA, 1218 bp, Burkholderia thailandensis E264
  CDS (1)..(1218): transl_table=11
atgcgcttgaaaacggatgaacggaacatggacgactctctcaacttcgacacgctcgccgtccgctcgggcacgctgcgcagcgaattcaacgagcattcggaagcgctcttcctgacgtcgagcttctgctatgcgagcgcggccgaggcggccgagcgcttcaagcattcggaagactattacacgtactcgcgcttcacgaacccgaccgtcacgatgttccaggatcgcctcgcggcgctcgagggcggcgaggcgtgcatcgcgaccgcatccgggatggcggcgatcacgtcggtcgtgatggccgcgttgcaggcgggcgatcacctcgtcagctcgcgcagcctgttcggctcgacgctcgggctgttcgggcagatcttcgcgaagttcgggatcgagacgacgttcgtcgatccggccgatctcgatgcatggcgcgccgccgtgcgccccgagacgaagatgttcttcctcgagacgccgtcgaacccgatgacggagctcgccgacatcgaggcgatcggcaagatcgcgaaggcggcgaatgcgctgttcgtcgtcgacaactgtttctgcagcccggtgctgcagcagccgctcaagctcggcgcggacgtcgtgatgcactcggcgaccaagttcctcgacggccagggccgcgtgctcggcggcgcgctcgtcggctcgaaggcgttcatcatggagaaggtgtttccgttcgtgcgcaccgcggggccgacgctgtccgcattcaatgcatgggtgctgctcaagggcatggagacgctgtcgctgcgtgtgaaccggcaatcggagaacgcgctcgagatcgcccgctggctcgaggcgcatccggccgtgaagcgcgtgttctatcccgggctcgaatcgcatccgcaatacgcgctcgcgcggcgtcagcaaaagtcgggcggctcggtcgtatcgttcgagctgaagggcgacacgcccgagcagcagcgcgcgaacgcgtggcgcgtgatcgacggcacgaagatcgtgtcgatcactgcgaacctcggcgacacgcgcacgacgatcacgcatccggcgacgacgacgcatagccggatcacgccggaagcgcgcgaggcggcgggaatcaccgaagggctgatccggctcgcggtcgggctcgaggctccggcggacatccgcgacgatctcgcgcgcgggctcgcgggctga

SEQ ID NO: 13809 - protein, 405 aa, Burkholderia thailandensis E264
MRLKTDERNMDDSLNFDTLAVRSGTLRSEFNEHSEALFLTSSFCYASAAEAAERFKHSEDYYTYSRFTNPTVTMFQDRLAALEGGEACIATASGMAAITSVVMAALQAGDHLVSSRSLFGSTLGLFGQIFAKFGIETTFVDPADLDAWRAAVRPETKMFFLETPSNPMTELADIEAIGKIAKAANALFVVDNCFCSPVLQQPLKLGADVVMHSATKFLDGQGRVLGGALVGSKAFIMEKVFPFVRTAGPTLSAFNAWVLLKGMETLSLRVNRQSENALEIARWLEAHPAVKRVFYPGLESHPQYALARRQQKSGGSVVSFELKGDTPEQQRANAWRVIDGTKIVSITANLGDTRTTITHPATTTHSRITPEAREAAGITEGLIRLAVGLEAPADIRDDLARGLAG

SEQ ID NO: 13810 - DNA, 1308 bp, Syntrophus aciditrophicus SB
  CDS (1)..(1308): transl_table=11
ttgagaggtcatatgagtacggatcaaaaaagttggaaaagagaaaccattcttctgcatggcggacaggaatccgacccgtcaacggggtcccgagccgtccccatctaccagaccacatcgtatcagttccgggatacggagcatgcagccaatctgttttccctgaaagaatctggaaacatctatacacggttgatgaatccaactacggacgtcctggagagacggatcgccctcctcgacggcggggcaggggcgctggccacggcaagcgggcaggccgctatcacgctggcgctgctcaatatcgcccaggccggcgatgaaatcgtgtccgccgataatctttatggcggcacctacaatctttttcactacaccttcccccgtctggggatcagggtgcgctttgtgaaatccaacgacctgaaggccctggaacaggccatcacgccgaagaccaaagccttctatgctgagtccctgggcaatcccaaactcgacgtggccgatcttgaaggcatttcggccattacccgggtccatggcatccccttcgtcctcgataacacagtgtcgccttacctcttaaagcccctcgatttcggtgtggatattatcgtctactcggcaaccaagtttatcggggggcatggcacctcccttggcggcctcatcgtcgactcgggaaaatttgactggactaacggcaaatttcccctcattgccgatcccgaccccagttaccacgggattaactttgtggaagccctgaagccgattggaaacatcgcctatatcatcaaggcgagggtgaccctgctacgggatatggggcccgccctgtcgccattcaatgcctttctcttccttcaggggctggaaacactgcatttgcggatgatccgccatgccgaaaacgccctggccgttgcgcattatctggaaaagcatcccaaggttagctgggtcaattaccccggattgccgggcagtccggaaaaggcaaaggctgataaatatctgcctgcaggcgccggggccataatcggcttcggaatcaaaggcggactggaatccgggaaaaaattcatcgattccctgtccctggtttcccatctggccaatgtcggcgatgccaagaccctggccattcacccggcgacaacgactcatcagcaactttcgccggaagagcagctggcaacgggcgtgacgccggatttcatccggctgtccatcggcatcgagcatatcgatgatatcctgaacgaccttgagcaggccttcgaaaaggtatcctga

SEQ ID NO: 13811 - protein, 435 aa, Syntrophus aciditrophicus SB
MRGHMSTDQKSWKRETILLHGGQESDPSTGSRAVPIYQTTSYQFRDTEHAANLFSLKESGNIYTRLMNPTTDVLERRIALLDGGAGALATASGQAAITLALLNIAQAGDEIVSADNLYGGTYNLFHYTFPRLGIRVRFVKSNDLKALEQAITPKTKAFYAESLGNPKLDVADLEGISAITRVHGIPFVLDNTVSPYLLKPLDFGVDIIVYSATKFIGGHGTSLGGLIVDSGKFDWTNGKFPLIADPDPSYHGINFVEALKPIGNIAYIIKARVTLLRDMGPALSPFNAFLFLQGLETLHLRMIRHAENALAVAHYLEKHPKVSWVNYPGLPGSPEKAKADKYLPAGAGAIIGFGIKGGLESGKKFIDSLSLVSHLANVGDAKTLAIHPATTTHQQLSPEEQLATGVTPDFIRLSIGIEHIDDILNDLEQAFEKVS

SEQ ID NO: 13812 - DNA, 1179 bp, Frankia sp. CcI3
  CDS (1)..(1179): transl_table=11
atgcatatggagcagcccgctgagggattcgagaccatcgcgatccatgccggccaggagcccgatcccgtcacgggagcggtggtgacgccgatccaccagtcctcgacgttcgcccaggatggcgtgggtgggcttcggagcggttacgagtacagtcgttcggcgaatccgacccgtaccgcgctggagacctgcctcgccgcactggaacgcgggacggtcggcctcgctttctcctccggcatggcggcggcggacgccctgctgcgaaccgtctgccggcccggagaccacgtcatcatcccggcggacgcctatggcggcacctaccggctcatcgcccgggtgctcgccgactggggcgtcgaccacaccagcatcgatctcaccgacctcgatgcggtgcgagtcgcgatccgtccgggcaccacgcgactggtgtggtgcgaaaccccgaccaatcccatgctgtccatcgccgacatcgtcgctctctcgtcgctggcgcatgacgcgggggcgctgctgacggtcgacaacacgttcgcttcgccctacctgcagcagccactgaccctgggggcggacgcggtggtgcattccacgacgaagtatctcggtggccacagcgatgtcgtcggcggcgcgctcgtggtcggcgatccggacctgggcgcccggctacggttcctgcagaacgcggccggcgccgtcgccggccccttcgacagctggctggtactgcgcggtgtcaagacgctccccgttcggatggaccggcactgcgacaacgctcggcgtatcgcggccgagctcgccacgcaccccgctgtcggggccgtccgctacccgggttcgaccggccatgcgggtcacgacatcgccgcgaagcaaatgcgcgacttcgggggaatggtctcgttcacccttcgggccggcccccaggcggccgtggcggcatgtggccggaccaggctgttcactctcgccgagtcgttgggtggggtggaatccctgatcgaacatccggcgagcatgacccatgcctcggtggagggctcgccgctcgcggtacccgcggacctcgttcggctctcggtcgggatcgaatcagtggacgacctcgtcgccgatctgcaccaggcgctgcgcgggctttccgacggatccgcgtag

SEQ ID NO: 13813 - protein, 392 aa, Frankia sp. CcI3
MHMEQPAEGFETIAIHAGQEPDPVTGAVVTPIHQSSTFAQDGVGGLRSGYEYSRSANPTRTALETCLAALERGTVGLAFSSGMAAADALLRTVCRPGDHVIIPADAYGGTYRLIARVLADWGVDHTSIDLTDLDAVRVAIRPGTTRLVWCETPTNPMLSIADIVALSSLAHDAGALLTVDNTFASPYLQQPLTLGADAVVHSTTKYLGGHSDVVGGALVVGDPDLGARLRFLQNAAGAVAGPFDSWLVLRGVKTLPVRMDRHCDNARRIAAELATHPAVGAVRYPGSTGHAGHDIAAKQMRDFGGMVSFTLRAGPQAAVAACGRTRLFTLAESLGGVESLIEHPASMTHASVEGSPLAVPADLVRLSVGIESVDDLVADLHQALRGLSDGSA

SEQ ID NO: 13814 - DNA, 1137 bp, Desulfitobacterium hafniense Y51
  CDS (1)..(1137): transl_table=11
atgaaaatgaatattttaaccgaactggctcagatcggcaatcgccgggatccttacggagcgatcagctttcctgtttaccattcgtctacctttgctcaccccggcttcggccaaagcacaggctttgattactcacgaaccggtaatcccacccgccaagcattagaagatgctatggcaagcctggaagagggtaccaaagggtttgctttttcctcaggcatgggtgccatcactaccatcctctccttattctcccagggcgagcatcttctcgtcaccgaagatctctatggaggaacctaccgcatccttgaagaggtcttcagccgctttggcctccaagtcacttttgttgattccagtgatctcgacaccatcgcaaaagagatccgcccccacacaaaagccatcttcaccgaaacaccgaccaaccctctaatgaagattgccgacctaaaggggatcgcttccttgtgccagaagcacggtctcttaaatatagtggacaatacttttcttacaccctatttgcaaaaaccactgaccttgggagcagacattgttattcatagtggcaccaaatatcttggcggccataatgatgtcgtggcgggcctcgtcgtggttcaaggagaagagcttgcagctcgctttggacgtttgcagaactctctcggcgctacattgggcccccaagattcctggctaattatccggggattgaaaaccttggccctgcgcatgagagcacaagaagaaaatgccctccagattgcacaatggctggagacgcatccccttgtcaccgcggtctattatcccggacttaagcatcatcccggctatgcaactcagcttgaacaagcccggggcttcggtgctatgctatctttccgggtaaaaagtcccagcttaatccccgagatattaaaatccctcaaaattatctcctatgcggaaagccttggtggtgtagaatctctaatcacttatcccgctacccaaacccatgccgatatccctcacgaagtaaggacaaggcttggggtggacgattgtcttctccggttatcactgggtattgaagccgccgaggatctcattggcgatttagaacaagctttaaaatag

SEQ ID NO: 13815 - protein, 378 aa, Desulfitobacterium hafniense Y51
MKMNILTELAQIGNRRDPYGAISFPVYHSSTFAHPGFGQSTGFDYSRTGNPTRQALEDAMASLEEGTKGFAFSSGMGAITTILSLFSQGEHLLVTEDLYGGTYRILEEVFSRFGLQVTFVDSSDLDTIAKEIRPHTKAIFTETPTNPLMKIADLKGIASLCQKHGLLNIVDNTFLTPYLQKPLTLGADIVIHSGTKYLGGHNDVVAGLVVVQGEELAARFGRLQNSLGATLGPQDSWLIIRGLKTLALRMRAQEENALQIAQWLETHPLVTAVYYPGLKHHPGYATQLEQARGFGAMLSFRVKSPSLIPEILKSLKIISYAESLGGVESLITYPATQTHADIPHEVRTRLGVDDCLLRLSLGIEAAEDLIGDLEQALK

SEQ ID NO: 13816 - DNA, 1194 bp, Saccharophagus degradans 2-40
  CDS (1)..(1194): transl_table=11
atgacagataatcaggacgacaatttagcaggcttggcgctcgatactctagctattcgtgcgggtcaccatcgtacccacgagggtgagcacagcgaacctattttcactacttctagctatgtattcgaatctgcagcacaagctgctgcgcgctttggtggttcagagcctggcaatgtgtattcgcgctacaccaacccaaccgtacgcttattcgaagagcgcattgccgcgctagaaggtgcagaagacggtatagcaaccgcgtcggggatggccgcaattttaagtacttgcatggccctgcttgaagccggcgataaagttgtgtgttctcgcagtgtttttggtaccacaacggtgctgtttaccaaatatatgcagaaatttggtatagaggttgtaatggtgccactcacaaatctagatgcttggcgcgatgccgtttgcgaaaaaaccaaattgctattcgtggaaacgccttcaaaccctttgtgtgatgtggcagatatagctgcgttggccgaaatagcccacagtaaagacgctttgctggtagtcgataactgtttttgttcgcccgcgctacaaaagcctttggcattaggcgccgatttggttgtgcattcggcaactaagtacctagacgggcagggtagatgcttggggggagcggtagttggccctgcagagcccatagatttaattcgcggctttattcgcagttgtggcccctctatgagcccatttaacgcgtgggttttcgcgaagggtttagaaacattgcgcttgcgtatggaggctcattctaaaagcgctttggaactagcgctatggttgcaggctaatcctgccgtagagaaagtgttttacgcgggtttgccagagcacccagggcatgcacttgccgccaagcagcaaagcgcatttggtggcgtgttgtcgtttagagtaaaaggtgggcaagctgaggcgtggaaggttatagatagcacaaaattcttatctattactgccaatttaggcgatgcaaaaaccactatttgccatcctgccaccacgactcatggccgtttatcggatcaagaaaaagtagaagcgggaatcacgcaaaacttaattcgtgtggctgtaggcttagaggatatcgacgatatcaaagccgatctagcgagaggtttgggcgcctag

SEQ ID NO: 13817 - protein, 397 aa, Saccharophagus degradans 2-40
MTDNQDDNLAGLALDTLAIRAGHHRTHEGEHSEPIFTTSSYVFESAAQAAARFGGSEPGNVYSRYTNPTVRLFEERIAALEGAEDGIATASGMAAILSTCMALLEAGDKVVCSRSVFGTTTVLFTKYMQKFGIEVVMVPLTNLDAWRDAVCEKTKLLFVETPSNPLCDVADIAALAEIAHSKDALLVVDNCFCSPALQKPLALGADLVVHSATKYLDGQGRCLGGAVVGPAEPIDLIRGFIRSCGPSMSPFNAWVFAKGLETLRLRMEAHSKSALELALWLQANPAVEKVFYAGLPEHPGHALAAKQQSAFGGVLSFRVKGGQAEAWKVIDSTKFLSITANLGDAKTTICHPATTTHGRLSDQEKVEAGITQNLIRVAVGLEDIDDIKADLARGLGA

SEQ ID NO: 13818 - DNA, 1179 bp, Methylobacillus flagellatus KT
  CDS (1)..(1179): transl_table=11
atgagtcagcatgaatggcatgcagaaacactgggtgtgcgtgcgggtagtgagcacaccccattcggggaaaattccgaggccatgttcctgacatccagtttcgtattcgaaaatgctgcgcaggcagctgcacgttttggcggccaggagccgggcaatatctattcgcggtttaccaatcctaccgtcagcatgttccagaacaagctggcggcattggaaggggcggagttttgcgtggccacttcttccggcatgtctgccattctggcatgcgtcatgggcgtgtgttccgctggcgatcatgtcgttgcctcgcgcagcatcttcggcacgtcggtacaattgttcagcaatatcctcaagcgctgggggctggagaccactttcgtccagctttctgacccggaagcatggacagcggcggtcaagcccaataccaagctgttcttcctggagacaccttccaatccgctcaccgaaatctgcgatattgcagtagtggccgagattgcgcaccaggccggagcgttgcttgcagtggataactgcttttgcacacctgcattacagaagccgctggcgctcggggcagatatcgtggtgcattctgccaccaagtatatcgacggacagggtcgttgcctgggcggtgcggtattgggccgcaaagatgtgctggaaccggtgtacggctttctacgcacggctggccccaccatgagtgcattcaacgcctgggtgttcctcaaggggttagagacgttgcatttgcgcatggaggcgcatgcgcgcaatgctttggcattggctcaatggctggagcagcagccgcgtgtcgaacgcgtgtattacccgggtctgccgtcccacccacaatatgcgctggcgcagaagcaacagaagagcggcggcgccatcgtgtcattcgacgtcaaaggtggccagcctgcggcctggcatttgatcgatgccaccagaatgctttccattaccgcgaaccttggtgatgcgaaaagcacgattacgcatccggcaacgacaacccatagccgtgtcagtgcggaagcccgggcagcggcgggaatcggggatgggttggtgcgcattgctgttggactggaacacatcgatgacatcaaggccgaccttgcctggcttggtcatcaggattaa

SEQ ID NO: 13819 - protein, 392 aa, Methylobacillus flagellatus KT
MSQHEWHAETLGVRAGSEHTPFGENSEAMFLTSSFVFENAAQAAARFGGQEPGNIYSRFTNPTVSMFQNKLAALEGAEFCVATSSGMSAILACVMGVCSAGDHVVASRSIFGTSVQLFSNILKRWGLETTFVQLSDPEAWTAAVKPNTKLFFLETPSNPLTEICDIAVVAEIAHQAGALLAVDNCFCTPALQKPLALGADIVVHSATKYIDGQGRCLGGAVLGRKDVLEPVYGFLRTAGPTMSAFNAWVFLKGLETLHLRMEAHARNALALAQWLEQQPRVERVYYPGLPSHPQYALAQKQQKSGGAIVSFDVKGGQPAAWHLIDATRMLSITANLGDAKSTITHPATTTHSRVSAEARAAAGIGDGLVRIAVGLEHIDDIKADLAWLGHQD

SEQ ID NO: 13820 - DNA, 1191 bp, Burkholderia xenovorans LB400
  CDS (1)..(1191): transl_table=11
atggacgactccctgaacttcgatacgctggcagtccgctcgggcacggtgcgcagcgacttcaacgaacattcggaagcgattttcctgacctcgagcttcgtgttcgcgagtgccgcggacgccgccgagaaattcaggaattccgaagacaactacacctattcgcgcttcacgaatccgaccgtttcgatgttccaggatcggctggccgcgctcgaaggcggcgaagcctgcatggcgacggcctcgggcatggccgcgatcatgtcggtggtgatgtcggcgttgcaggcgggcgaccatctggtgagctcgcaggcgttgttcggctccacgctcggcatgttctcgcagatcttcagcaaattcggcatcacgaccacgttcgtcgatccgaccgatctggacgcgtggaaaaacgccgtgcgcccggagacgaagatgttcttcctcgaaacgccgtcgaatccgctgaccgaagtcgccgatatcgaagcgatcggcaagatcgccaaggcgtcgaacgcgctgttcgtggtcgacaactgcttctgcagcccggccttgcagcagccgctgaagctcggcgcggacgtcgtgatgcattcggccaccaagttcctcgacggtcagggccgcgtgcttggcggcgcgctggtcggctcgaagcagttcatcatggagaaggtgttcccgttcgtgcgcagcgccgggccgacgctgtccgcgttcaacgcgtgggtgctgctcaagggcatggaaacgctatcgctgcgcgttgaaaagcagtcggcgaatgcgcttgaaatcgcgcgctggctggaaacgcatccggccgtgaatcgcgtgttttatccggggctggaatcgcatccgcagcatgcgctggccatgcgtcagcagaaggcgggcggcgcaatcctgtcgttcgaactgaagggcgacacgcccgagcagatgcgcgcgaatgcatggcgtgtgatcgacaacacgaaaatctgctcgatcaccggcaacctcggcgatacgcgcaccaccatcacgcacccggccacgaccacgcatggtcgcgtgacgtcggaagcgcgcgcggcggcgggcatcagcgaaggcttgatccgtcttgcggtgggtctggagaacgccggcgatatccgcggcgatctggagcgcggactggcgggttga

SEQ ID NO: 13821 - protein, 396 aa, Burkholderia xenovorans LB400
MDDSLNFDTLAVRSGTVRSDFNEHSEAIFLTSSFVFASAADAAEKFRNSEDNYTYSRFTNPTVSMFQDRLAALEGGEACMATASGMAAIMSVVMSALQAGDHLVSSQALFGSTLGMFSQIFSKFGITTTFVDPTDLDAWKNAVRPETKMFFLETPSNPLTEVADIEAIGKIAKASNALFVVDNCFCSPALQQPLKLGADVVMHSATKFLDGQGRVLGGALVGSKQFIMEKVFPFVRSAGPTLSAFNAWVLLKGMETLSLRVEKQSANALEIARWLETHPAVNRVFYPGLESHPQHALAMRQQKAGGAILSFELKGDTPEQMRANAWRVIDNTKICSITGNLGDTRTTITHPATTTHGRVTSEARAAAGISEGLIRLAVGLENAGDIRGDLERGLAG

SEQ ID NO: 13822 - DNA, 1173 bp, Acidobacteria bacterium Ellin345
  CDS (1)..(1173): transl_table=11
atggctcccatggccgattccataaagaagtctcacggctttcaaacgatagccgtccatgccggcaggaatgttgatccctccaccggcgcggtcgctatgcccatctatccttccacgacgttcgagcgcgataccgacggtgccttctcccgcggctacagttacatccgcgacgccaaccccaatcgcaaggccctcgaagcctgcctgagcgcgcttgaagtgggcgaagaagccatcgccttcagttccgggatgggcgccacgttttcggtctttcaaattctctcgcccggcgatcacgtcgtgcttcatcgcgacatgtattacggcgtccgcgaactcatcaacggcatcttcacgcgctacgggatccagcacaccgtagttgacatgcgcaaccttgacgagactcgtgccgcggttcgaccaggcacaaagctcttctggctcgaaacgccaaccaacccgctgatcgaagtcgtggccatcgaacccatcgctgcgattgcccacgagcacggtgcgctcttcgcctgcgagaacaccttcgccacgccggcattgcagcgcccgctcgaactcggcgccgatctcgtcgtccactcgctcacgaaatacctctccggccatagcgacgccatgggtggcgcggtcatcctcaagcgggccggcgacctcgcccacaagattcgcgatttccaacacaacggcggcgccgttctctccccgttcgattgctggctgattctgcgcggtatcgaaagcctcccggcccgcatgcgcatccattgcgaaaacgcacagaagatcgccgaatttctctcagcgcacgcagcggtgtcgaaggttcgctacccgggcctaacgaacgatcccggtcacgcaatcgccaagcggcaaatgcgtgccttcggtggcatgctctctttcgaaattcgtggcgcacgtgcggaagccttcctcgtttcctcacgctttcagctaatcatccgcgccaccagcttgggaggcacccacacactggtcgagcatcgtgcctccatcgagggcgcgcacacgcgcgctcccgaatcgctcctgcgaatgtccgttggcctcgaagacaccgccgatctcatcgacgacctcgaccaggcgctgaccgcattgccgggttccctgctctga

SEQ ID NO: 13823 - protein, 390 aa, Acidobacteria bacterium Ellin345
MAPMADSIKKSHGFQTIAVHAGRNVDPSTGAVAMPIYPSTTFERDTDGAFSRGYSYIRDANPNRKALEACLSALEVGEEAIAFSSGMGATFSVFQILSPGDHVVLHRDMYYGVRELINGIFTRYGIQHTVVDMRNLDETRAAVRPGTKLFWLETPTNPLIEVVAIEPIAAIAHEHGALFACENTFATPALQRPLELGADLVVHSLTKYLSGHSDAMGGAVILKRAGDLAHKIRDFQHNGGAVLSPFDCWLILRGIESLPARMRIHCENAQKIAEFLSAHAAVSKVRYPGLTNDPGHAIAKRQMRAFGGMLSFEIRGARAEAFLVSSRFQLIIRATSLGGTHTLVEHRASIEGAHTRAPESLLRMSVGLEDTADLIDDLDQALTALPGSLL

SEQ ID NO: 13824 - DNA, 1203 bp, Acidobacteria bacterium Ellin345
  CDS (1)..(1203): transl_table=11
gtgccttccgaagacctcgacatttccactctcgccattcgcggcggacgttcgctggactctcatgccagctcgattttgtttccgctctaccagaccagcacgtttgttcatgacgccgttggcgtggacaaagggttcagctattcgcgggtgtcgaatccgaccgtagatgccctggagaaagccatcggcgtgctggaaggaacgcctcccgccgtttgcttccgcacgggcatggcggcggtgaccaccttgttcctatcggtgctgcgcgcgggcgaccatgcggtgctttcggaagtgatctacggcgggacgatgcggctcttccgcgagatcctcgatcacctgggaatcacggcttcgttcgtggacacgtcggacgcagccaacgtggagcgggcgatccggccagagacgaagatcatcttcattgaaacaccgggcaatccgacgctgaagctcaccgacattgcagccgtggcggaggtcgctaaacggcattccatcctgctcgcggtggacaacacattcctgacgtcgctgctgcaaaacgtcttcgaactcggagccgacatatcgcttctctcgacgacgaagtacattgatggccataacgcgacgctcggtggatcactcgcgacgcacgacgaaaagttgctggagcggttccgattgatacgtaagaccataggcacaacgcaagcgcccttcgaagcgtggctgacgttgcagggaatgaagacgctgccggctcggttgaaactgcattgcgaaaatgcgcagatcatcgcggagtggctggaggcacatcctgccgtcgctcgcgtttacttcccggggctcgattcgtgtgaacagaaagctcttgcggacaagcaacagaacgcacccggcggaatgattgctttcgaactgaaagccggatttgacgccacgattcgagctctgaaccacgtgaagctgtgctcgcgagcggagagcctcggcgggctcgagacgctgattacgcatccttcgtctaccacacatgcggatgttgagcctcaggtgcgacgggcgctggggatttcggatgggttggtacgactgtccgtaggattggaggccgcgcaagacatcattgccgatctcgaacaagcatttgaggcggccgggtgttgtccggcatcggaggaggtccgcaatgaagttcgctag

SEQ ID NO: 13825 - protein, 400 aa, Acidobacteria bacterium Ellin345
MPSEDLDISTLAIRGGRSLDSHASSILFPLYQTSTFVHDAVGVDKGFSYSRVSNPTVDALEKAIGVLEGTPPAVCFRTGMAAVTTLFLSVLRAGDHAVLSEVIYGGTMRLFREILDHLGITASFVDTSDAANVERAIRPETKIIFIETPGNPTLKLTDIAAVAEVAKRHSILLAVDNTFLTSLLQNVFELGADISLLSTTKYIDGHNATLGGSLATHDEKLLERFRLIRKTIGTTQAPFEAWLTLQGMKTLPARLKLHCENAQIIAEWLEAHPAVARVYFPGLDSCEQKALADKQQNAPGGMIAFELKAGFDATIRALNHVKLCSRAESLGGLETLITHPSSTTHADVEPQVRRALGISDGLVRLSVGLEAAQDIIADLEQAFEAAGCCPASEEVRNEVR

SEQ ID NO: 13826 - DNA, 1170 bp, Acidobacteria bacterium Ellin345
  CDS (1)..(1170): transl_table=11
atgaagttcgctagccgtctcgtaagtttcgatcccgctccgggcgatcgctatcgccccatcgccacgccgatatatcagacggcaacctttgagcaggaacacgccgatgaattcggcgaatacgactattcgcgcagcggcaatcccacgcgcacggtgctggaaaagcatctggcatcgctggaaaacgggacccgcggcttttgcttctcgagcggcatggcggcgataaccaccacgaccaagcttctgcgctccggcgacgacattcttgccgacagcgatctctacggcggaacctgtcgtttgtttaccaaagtcctcgagaagacgggtatttccgcgcgctatgccgacgccgcgaatctcgagcaattcgcgcagcagatcaggccggagacgaagctggtctatgtcgagacgccgacgaatccgctgctccgcgtgctcgacttacgcaagctcgccgagatagctcacgcgaatggcgcgattctgtgcgtggacaacagcacgatgtcgccgtacctgcagaatcccctcgatcttggcgcggacatagtgctgcattcggcgacgaaatatctcggcggccatcatgatgtgacggctggcgcgatcgtggtgaaagacgaggaactggcgaagcaggtctatttcatccagaacgcggagggcaatggactctcgccgttcgattgcttcctgctgctgcgcggcattaagaccctaaagctgcgcgtggattgccagcagcgcaatgcgcttacgatcgcgaaatttctggcgtcgcatccagacgtgaagaaggtctattatccgggacttgccgatcatccgggatacgaattgcagcggtcgcaggcgcgcggatccggaggcgtattgagttttacgactggctcggtggaagtttcgaaaacggtcgcggaactgacgaagcttttccggattaccgtgagcttcggcagtgtgaattcgtccatcagcttgccggggaacatgtcgcatgcgagcgttccgccgcaggtcttggcgcaacgtgatcttccggcagacttggtgcgtatctcggtcgggattgaagacgaagaggacctgattgccgatctcgatcaagcgttgcaagtcgcgacggggaagacattggcggcaagtacgcggtga

SEQ ID NO: 13827 - protein, 389 aa, Acidobacteria bacterium Ellin345
MKFASRLVSFDPAPGDRYRPIATPIYQTATFEQEHADEFGEYDYSRSGNPTRTVLEKHLASLENGTRGFCFSSGMAAITTTTKLLRSGDDILADSDLYGGTCRLFTKVLEKTGISARYADAANLEQFAQQIRPETKLVYVETPTNPLLRVLDLRKLAEIAHANGAILCVDNSTMSPYLQNPLDLGADIVLHSATKYLGGHHDVTAGAIVVKDEELAKQVYFIQNAEGNGLSPFDCFLLLRGIKTLKLRVDCQQRNALTIAKFLASHPDVKKVYYPGLADHPGYELQRSQARGSGGVLSFTTGSVEVSKTVAELTKLFRITVSFGSVNSSISLPGNMSHASVPPQVLAQRDLPADLVRISVGIEDEEDLIADLDQALQVATGKTLAASTR

SEQ ID NO: 13828 - DNA, 1158 bp, Acidobacteria bacterium Ellin345
  CDS (1)..(1158): transl_table=11
atggccaagaaagattctgggttttcgacgaagtgtgttcacgttgggcaagaaccggagcaactgactggttccgtcggtgttccgatttacgcgacctccacatacgcccaggacgaacttggcaagccgcgtctcggctatgagtactcgcgggtgtcgaatccaacgcgtgatcggttggagaaaaacctcgctgcgcttgagggcggcgtagattccaaggtctttgccagcgggatggcggcagtgagcgcgatgtgctcgctgttgaagaagggcgaccatgttgtttgttcgtcgaacgtatatggtggcgtgccgcggttgttcaaccaggtgctggtgaattacgggctggagtttacgtacgtcgatacgtcggacctgaaggcgaccgagaaggcgatccgcaggagcacgaagtacgtttacatcgagacgccgacgaaccctctgatggtgctgagcgacatcgaggccatctcgcagatcgcgcacaagaagggcaccgaggttgttgtcgataacaccttcatgtcgccgtattttcagaagccgattgccctcggcgccgacatggtgctgcactccacgacgaaattcctcaatggccatagcgacggacttggcggtgtgctggtctgcacgacgaaagagcagtccgagaagctggcgttcattcaaaaatcagtcggtgcgatcatgtcgccgtttgaaagttggctgattctgcgcggcgtgaagactcttgccgtccgcatgaaacagcatgacgagagcgggcgggtcgtcgccgatttcctcgcgaagcagaagaagatcaagaaagtgttctatccgggattgccagaccatccgcagcacgagctcgcgaagcagcagatgacgggcttcggcgcgctcatcacattcgaaaccggatcgctcaacaacgcgaagaagcttttgaaacgagtgaaagtttgcacgttgggtgaatcgcttggtggagtggagacgttgatctcgcatccggcgacaatgacgcatgctgcgctgggcgaaaagggaagagcggccatcggactgaccgatggcatggtgcgcatctcggtcggcattgaggacgtggaagacctcatcactgacctggagcaggcaatttcagttctctag

SEQ ID NO: 13829 - protein, 385 aa, Acidobacteria bacterium Ellin345
MAKKDSGFSTKCVHVGQEPEQLTGSVGVPIYATSTYAQDELGKPRLGYEYSRVSNPTRDRLEKNLAALEGGVDSKVFASGMAAVSAMCSLLKKGDHVVCSSNVYGGVPRLFNQVLVNYGLEFTYVDTSDLKATEKAIRRSTKYVYIETPTNPLMVLSDIEAISQIAHKKGTEVVVDNTFMSPYFQKPIALGADMVLHSTTKFLNGHSDGLGGVLVCTTKEQSEKLAFIQKSVGAIMSPFESWLILRGVKTLAVRMKQHDESGRVVADFLAKQKKIKKVFYPGLPDHPQHELAKQQMTGFGALITFETGSLNNAKKLLKRVKVCTLGESLGGVETLISHPATMTHAALGEKGRAAIGLTDGMVRISVGIEDVEDLITDLEQAISVL

SEQ ID NO: 13830 - DNA, 1203 bp, Silicibacter sp. TM1040
  CDS (1)..(1203): transl_table=11
atgtccgagaccaaaggctttgccacccgcgccatccaccacgcctatgacccgatgcagaacgagggcgcgctgacgccgccgctgcatctgacctccaccttcgtgttcgaaaatgccgaagccggcggcgagatgttcgcaggcgagcgcgaggggcatatctacagccgaatctcgaacccgacctgttcgcttctggagcagcgtatcgcaacgctagaaggggccgaagccggtctggcgctggcaagcggcatgggcgcggtgacggcgattctctggacgctcctcagccccggtgacgaggtgatcgtcgacaagacgctctatgggtgcacctttgcctatatgcgccatgggcttgcaaaatggggcgtgaccatcacccacgtcgacatgaccgaccccgccgccctgagcgccgccgtgagcgagaagacccgcgtcgtctatttcgagacgcccgccaaccccaacatgcgcttggtcgacatcaaacgcgccgcagagattgcgcattccgtcgacgcgcgcgttgtggtcgacaacacctatgcgacgccctacctcacgcgcccgatcgagcttggcgcggatctggtgctgcattcggcgaccaaataccttggtggtcacggcgatgtggtcgcagggcttgtggcgggcagcgccgagcttttgaccgaaatccgccttgtcggcatgaaggacatgaccggtgcggtgatggcgcccttcaatgcgatgctgatcatgcgcggcttgaaaacactggcgctacggatggaccgtcattgtgcctcggcgcagaccgtcgcggagtggctagaggcccagcccggcgtcgccaaggtctatttccccggtctcaagagctctgaacagcacgagatcgccaaggcgcagatggcgcagcccggcggcatgattgcctttgaactcgagggcggcatggaggccgggatcagcctgatgaaccgcctgcagatgatccagcgcgcggtgtcgcttggcgatgcggagacgctcatccagcacccggcttcgatgacacattccacctatacccccgaggaacgcgcggaacatggcatcagcgatggcttggtgcgcttgtccgtggggcttgaagaggtttcggacattctcgatgatcttcagcaagctctgtcgcctcagatgcgtcaggctgccgagtga

SEQ ID NO: 13831 - protein, 400 aa, Silicibacter sp. TM1040
MSETKGFATRAIHHAYDPMQNEGALTPPLHLTSTFVFENAEAGGEMFAGEREGHIYSRISNPTCSLLEQRIATLEGAEAGLALASGMGAVTAILWTLLSPGDEVIVDKTLYGCTFAYMRHGLAKWGVTITHVDMTDPAALSAAVSEKTRVVYFETPANPNMRLVDIKRAAEIAHSVDARVVVDNTYATPYLTRPIELGADLVLHSATKYLGGHGDVVAGLVAGSAELLTEIRLVGMKDMTGAVMAPFNAMLIMRGLKTLALRMDRHCASAQTVAEWLEAQPGVAKVYFPGLKSSEQHEIAKAQMAQPGGMIAFELEGGMEAGISLMNRLQMIQRAVSLGDAETLIQHPASMTHSTYTPEERAEHGISDGLVRLSVGLEEVSDILDDLQQALSPQMRQAAE

SEQ ID NO: 13832 - DNA, 1146 bp, Myxococcus xanthus DK 1622
  CDS (1)..(1146): transl_table=11
atgcgcttcgacacgcttgccatccacgccggtcaggagccggatcccaccaccggcgccatcatgacgcccgtctacctgacgtccacctacgtccaggacggccccggagagcacaagggctacgagtacagccggacgcagaaccccacccgcaaggcgctccaggactgtctggccgcgctcgagggggcgaagtacggcgcggccttcgcctccggcctggcgggtacggacatgctgatgcacatgctggactcgggcgaccacgtggtcgtctcggacgatgtgtacggcggcaccttccgcctcttcgacaaggtgttccggcgggccgggctgcacttctccttcgtggacctgtccaagccggagaacttcgaggcggcgattacgccgaagacgaagatggtgtgggtggagtcccccaccaacccgatgctcaagctcatcgacctggcgcgcatcgccgaggtcgccaagaagcggaacatcctctccgtcgccgacaacacgttcatgacgccgtacttccagcgcccgctggacctcggcttcgacgtggtggcgcactccaccaccaagtacatcaacggccacagcgacgtggtgggcggcttcgtctgcaccagccgtgaggacgtggcagagaagatgtacttcctccagaacgcggtgggcggcgtgtccggcgccttcgacagcttcatggtactgcgcggcgtgaagacgctgcacgtgcgcatggaccgccacgcctccaacgcgatgaaggtggcgcagttcctggcgtcccacccgaaggtgaagaaggtcacctacccgggtctggaggcgcacccgcagcacgcgctggcgaagcagcagatgtccggctttggcggcatggtgaccttcgacatccaggggggcctggaggccgcccgcaccttcctcaagacggtgaaggtgttcgcctgcgccgagtcgctcggcggcgtcgagtccctcatcgagcacccggccatcatgacccacgcctccattcccaaggagacgcgcgagcagctcggcatcaccgacggcttcatccgcctgtcggtgggcatcgaggacgcgcgggacctggtggacgacctgtcccaggcgctcgacgccgcgaagtag

SEQ ID NO: 13833 - protein, 381 aa, Myxococcus xanthus DK 1622
MRFDTLAIHAGQEPDPTTGAIMTPVYLTSTYVQDGPGEHKGYEYSRTQNPTRKALQDCLAALEGAKYGAAFASGLAGTDMLMHMLDSGDHVVVSDDVYGGTFRLFDKVFRRAGLHFSFVDLSKPENFEAAITPKTKMVWVESPTNPMLKLIDLARIAEVAKKRNILSVADNTFMTPYFQRPLDLGFDVVAHSTTKYINGHSDVVGGFVCTSREDVAEKMYFLQNAVGGVSGAFDSFMVLRGVKTLHVRMDRHASNAMKVAQFLASHPKVKKVTYPGLEAHPQHALAKQQMSGFGGMVTFDIQGGLEAARTFLKTVKVFACAESLGGVESLIEHPAIMTHASIPKETREQLGITDGFIRLSVGIEDARDLVDDLSQALDAAK

SEQ ID NO: 13834 - DNA, 1179 bp, Mycobacterium sp. MCS
  CDS (1)..(1179): transl_table=11
atgactgaacagcgcagcgcccacggacccgcccacggactcgccactggactcgccacgaaggccatccacgccgggtacgcccccgacccccgcaccggtgcggtcaacacgccgatctacgccagctcgaccttcgcccaggacggtgtcggagggctgcggggcggcttcgagtacgcccgcaccggcaacccgacgcggcagtccctggagtcggcgctggccgcggtggaggaagccgggtacggccgggccttcgcctccgggatggccgccaccgactgtgcgttgcgcgcggtgctgcgccccggtgaccatctcgtcatcccggacgacgcctacggcggcacgttccggctgatcgacaaggtgttctcccagtggggcatcagctacacggcggtcgcgctgtcggacctcgacgccgtccgggcggcgatcaccccgcagaccaagatgatctgggtcgagacgccgaccaacccgctgctgtcgatcgccgacatcgccggtatcgcaggcatcgcggccgaatcggggctgaaggtgttggtggacaacacctttgcctcgcccgcgttacagcagccgttgctgctcggcgcggacatcgtgttgcactccaccacgaagtacatcggcggacactccgacgtggtcggcggcgcgctgctgaccaacgacgaggaactcgacacggcgttcgccttcctgcagaacggatcgggcgccgtcccaggaccgttcgacgcctacctcaccctgcgcggactcaagacgctggtggtgcggatgcagcgacacagcgagaacgctgcggcggtcgccgaattcctcgacggccacccggcgatcgacacggtgctctatcccggtctgcccagccatcccggccacgacgtggccgccaagcagatgagcgggttcggcggcatggtgtcggtgcggctacacggcgggcccaaggcggctcgcgaattctgcgcccgcacaggcattttcatcctcgccgaatcgctgggcggggtggagtcgctgatcgagcatccgggtgcgatgacgcacgcgtccaccgccggatcccaactcgaggtgcccgaggatctggtgcggctgtcggtcggcatcgaggaccgcgcggatctgatcgccgacctggagcaggcgctagcctaa

SEQ ID NO: 13835 - protein, 392 aa, Mycobacterium sp. MCS
MTEQRSAHGPAHGLATGLATKAIHAGYAPDPRTGAVNTPIYASSTFAQDGVGGLRGGFEYARTGNPTRQSLESALAAVEEAGYGRAFASGMAATDCALRAVLRPGDHLVIPDDAYGGTFRLIDKVFSQWGISYTAVALSDLDAVRAAITPQTKMIWVETPTNPLLSIADIAGIAGIAAESGLKVLVDNTFASPALQQPLLLGADIVLHSTTKYIGGHSDVVGGALLTNDEELDTAFAFLQNGSGAVPGPFDAYLTLRGLKTLVVRMQRHSENAAAVAEFLDGHPAIDTVLYPGLPSHPGHDVAAKQMSGFGGMVSVRLHGGPKAAREFCARTGIFILAESLGGVESLIEHPGAMTHASTAGSQLEVPEDLVRLSVGIEDRADLIADLEQALA

SEQ ID NO: 13836 - DNA, 1233 bp, Rubrobacter xylanophilus DSM 9941
  CDS (1)..(1233): transl_table=11
gtggcgagcggaggagaggaacagaggaggttcgagacccgggcggtgcacgccggggagagccgcccgggggcgggcggcgaccgcggcggggacggcttctaccccatctcgacccccatctacgcctccaccaccttctcccacgccgacgcgcagaccaccgaccgggtgctcggcggggaggagccgggctacagctacgcccggtggggcaaccccagcgtggccgccctggaggaggcgctgaccgcgctcgaggccccgcagggcggggcccgggcgctggccttcgcctcggggatggcggcgatgcacgcggcgctgaccgcggcggagctcggcgagggggcaagggttctggccgccgatcagctctacggctccacggccacgctgctgctccagatcttcggccccgccgggaccgaggcctccttcttcgacgcctacgacccgggcgaggcggagaagaaggtctcctcgctcaggccgcgggcggtggtggtggagacgatctccaaccccctgctgagggttgcggacatcccccggctcgcggagatctcccgctcccacggcgccgccctgatcgtggacaacaccttcggcaccccctacctccagcgccccctggagctcggggcggacatggtggtccacagcgccaccaagtacctctcggggcacggggacgtcaccgcgggggtggtggccgccggacccccgtacgacgctgcgctggagcagatccgcaagaccgtcggctccaccctggggccgttcgaggcctggctgctgcaccggggcctgaagacgctgccgctgaggatctcccgccagtgcgccaacgcccgcaggatcgccgcctggctcgccgaacaccccaaggtcttccgggtgcaccacccctccctggagggccacccggaccgggaggcgaccgggcgcctgctcgccgacacgggcgggctggtggccttcgagctcgcggccgagggccgggaggcggccttccgctttctgaacgcgctcaggctctgcgtccgggccccgagcctcggcgacatctacaccctggccatccacccggcgacctcatctcaccgggagctgccgccctcccgcagggagcagctcggggtgagggagaacctgatccggctctccgccggcatcgagcacccggaggacatcatcgcggatctggagcaggcgctggagcggctgtag

SEQ ID NO: 13837 - protein, 410 aa, Rubrobacter xylanophilus DSM 9941
MASGGEEQRRFETRAVHAGESRPGAGGDRGGDGFYPISTPIYASTTFSHADAQTTDRVLGGEEPGYSYARWGNPSVAALEEALTALEAPQGGARALAFASGMAAMHAALTAAELGEGARVLAADQLYGSTATLLLQIFGPAGTEASFFDAYDPGEAEKKVSSLRPRAVVVETISNPLLRVADIPRLAEISRSHGAALIVDNTFGTPYLQRPLELGADMVVHSATKYLSGHGDVTAGVVAAGPPYDAALEQIRKTVGSTLGPFEAWLLHRGLKTLPLRISRQCANARRIAAWLAEHPKVFRVHHPSLEGHPDREATGRLLADTGGLVAFELAAEGREAAFRFLNALRLCVRAPSLGDIYTLAIHPATSSHRELPPSRREQLGVRENLIRLSAGIEHPEDIIADLEQALERL

SEQ ID NO: 13838 - DNA, 1191 bp, Mesorhizobium sp. BNC1
  CDS (1)..(1191): transl_table=11
atgacaaaaagattcaacgacgactggaagcctcaaacccgccttgttcatggcggcacactgcgctcctcctttggcgaaacctccgaagccctctatcttacccagggttttgtctatgagaccgccgaggcggccgaagcgcgcttcaagggtgaggatccgggtttcatctactcgcgctatgccaatcccacggtggacatgttcgagagccgcatgtgcgcgctcgaagaggccgaggatgcacgcgctaccgcctccgggatggccgccgtggcagcggccctcctgtgttcggtcaaggccggcgaccatgtggtggcagcgcgcgcgcttttcggctcctgccgctggatcgtggaaacgctgatgccgcgctacggcatcgagacgacgctcgtcgacggtacgaggatggaggcgtgggaggaggcggtgcgcaagaacacaaagctgttcttcctggaaagcccgaccaacccgacgctcgaaatttgcgatattgccagtatcgccaagcttgccgacagcatcggcgcgcggctggtggtggataacgtctttgccacgccgctcctgcagaagccgttggaactgggcgcgcatgtggtggtctattccgcaacgaagcatatcgatggccaggggcgctgtctcggcggcgtcgtgctttccgacaaggaatggatcgacgagaacctgcacgactacttccggcataccggccccagcctttcgcccttcaacgcatggacgctgctcaagggtctggagacgctacccatgcgcgtgcgccagcagatggaaagcgcggcgcacgttgcggattacctggccgatcatccgaaggtcgagcgcgtgatctatcccggccggcccgatcatccgcaggccgatctcgtaaagcgtcagatgaagggcggctccacgctcgtctgccttgacatcaagggcggcaagcagggtgctttcgcattttcaaacgcccttgagatcatccgcatttccaacaatctcggcgacgccaagagcctgatcacgcacccggccaccacaacgcacaagaacctctcggaggaagcgcggctcgaagccgggatccagcagggaacactgcgcctgtcgctcggcctggaagatacggaagacctcttgaaggatatcgagcaggcgctggcgaccgtgtaa

SEQ ID NO: 13839 - protein, 396 aa, Mesorhizobium sp. BNC1
MTKRFNDDWKPQTRLVHGGTLRSSFGETSEALYLTQGFVYETAEAAEARFKGEDPGFIYSRYANPTVDMFESRMCALEEAEDARATASGMAAVAAALLCSVKAGDHVVAARALFGSCRWIVETLMPRYGIETTLVDGTRMEAWEEAVRKNTKLFFLESPTNPTLEICDIASIAKLADSIGARLVVDNVFATPLLQKPLELGAHVVVYSATKHIDGQGRCLGGVVLSDKEWIDENLHDYFRHTGPSLSPFNAWTLLKGLETLPMRVRQQMESAAHVADYLADHPKVERVIYPGRPDHPQADLVKRQMKGGSTLVCLDIKGGKQGAFAFSNALEIIRISNNLGDAKSLITHPATTTHKNLSEEARLEAGIQQGTLRLSLGLEDTEDLLKDIEQALATV

SEQ ID NO: 13840 - DNA, 1176 bp, Cytophaga hutchinsonii ATCC 33406
  CDS (1)..(1176): transl_table=11
atggaatatacaaatttcgaaacactggccatccgtacacaaacagaaagaagtcaaaacagagagcatagtgctccgatttacatgacctccagttttgtatttgaagacgcagaacaggcaagagccatgtttgctgatgaagtaggtggaaatttatatacccgtttttcaaacccgaacaattcggaattcattgaaaaaatgtgcctgatggaaggcgctgaagatggctttgctactgcttcaggcatgtctgccgtattttcaagtatggcaccgtttctcaactcgggcgatcatattttattatgcaaatctgtattcggatcaagcttgcagatcgtaacacagatatttccaaaatggggtattgaatatacctttgctccgattgacaaacctgaaacatgggaaagcctgatcaaaccaaatacaaaaatggttatgatcgaaacaccttcaaatcccgcgcttgatttaattgatcttgaatggctttcttctttgtgtaaaaaacacaagatcttactaaatgttgacaattgttttgcaacaccatatttgcagaatccaattaagttaggtgctgatattgttacacattctgctactaagtttattgacggccagggacgtgccatcggtggtatcatcttagcatccaaagaactgatcaaacaggtacgtttcttttgcagacataccggaccggctctgtctccctttaattcctggattttttctaaaagccttgaaacacttgctgtacgtatggacagacattgtgaaaatgcattgaagcttgcaacatttttagaacagcatccggatgtagagcttgtgaaatatccgtttttaccaagccatccgcaatatcaattagccaaaaaacaaatgcgtgcaggcggcggtattgttacattcattattaaaggcggtgttgacagagggcgtaaatttctgaatgcaacagaaatggcttctcattctgcaaacctgggtgatacacgcactattgttacacacccggcatctacgacacattcaaaattatcggatgcagacagagagtctgtaggaatcttccccggcacgatccgtatctctgttgggcttgaacattcggatgatataatcgcagaaatcagacaggcattggaaaattccaaataa

SEQ ID NO: 13841 - protein, 391 aa, Cytophaga hutchinsonii ATCC 33406
MEYTNFETLAIRTQTERSQNREHSAPIYMTSSFVFEDAEQARAMFADEVGGNLYTRFSNPNNSEFIEKMCLMEGAEDGFATASGMSAVFSSMAPFLNSGDHILLCKSVFGSSLQIVTQIFPKWGIEYTFAPIDKPETWESLIKPNTKMVMIETPSNPALDLIDLEWLSSLCKKHKILLNVDNCFATPYLQNPIKLGADIVTHSATKFIDGQGRAIGGIILASKELIKQVRFFCRHTGPALSPFNSWIFSKSLETLAVRMDRHCENALKLATFLEQHPDVELVKYPFLPSHPQYQLAKKQMRAGGGIVTFIIKGGVDRGRKFLNATEMASHSANLGDTRTIVTHPASTTHSKLSDADRESVGIFPGTIRISVGLEHSDDIIAEIRQALENSK

SEQ ID NO: 13842 - DNA, 1155 bp, Clostridium perfringens ATCC 13124
  CDS (1)..(1155): transl_table=11
atgaagaagaattctttattaatacatgggggtataagtatagatgaaaaaactggggcagtaaatattccaatatatcaaacatccacatacaagcaaagatcttttggggagaatagtggatatgaatattcaagaacaggaaacccaactagggaatcattagaaaagttaattgcagatatagaatatggaaaaagagggtttgcctttgcatcaggtcttgcagcaattactgcagtattaagtttatttaaaagtggagataaattattaattactaataatctttacggtggaacatttagagtaattgataagatattctctaactttggtataggatatgaaataattgatgactttacaaatattgaagaaaaaattgacgatagtgttaaagctatttatatagaaacacctacaaaccctctgttagatgttatagatataaaaatagcatcagatagagctaaaaagtataatttattaacaatagtagataacacatttatgactccatattttcaaaatccattaaatcttggggcagatatagttattcattcagcaactaaatatcttggggggcacagtgatttagttgctgggcttgtagttgtgaaagatgaagagcttggagagaaaatacactttatacaaaactctactggtggaatacttcaaccttttgatagcttcttactaataagaggaatcaaaactttatcagtaagaatggatagacatgaattaaatgctaattttatagctgaaaagttaggtgatttagaggggatagagaatgtatattatccaggacttaaaactcatattggacatgatatacaaaagaaacaagcttcaggctttggaggaataatctctttcactttaaataagaaatataattatgagaagttctttaatagtttagaacttataacctttggggaaagcttaggtggagtagaatctttggcatgtcacccagcttctatgactcatgcagctatgccattagaacttagagaacgtataggaataacagataggttaataagaatttcagttggtatagaagataaagaggatattttagaagatatacaacaagctttagtaaaggctggtgataaaaatgaaatattataa

SEQ ID NO: 13843 - protein, 384 aa, Clostridium perfringens ATCC 13124
MKKNSLLIHGGISIDEKTGAVNIPIYQTSTYKQRSFGENSGYEYSRTGNPTRESLEKLIADIEYGKRGFAFASGLAAITAVLSLFKSGDKLLITNNLYGGTFRVIDKIFSNFGIGYEIIDDFTNIEEKIDDSVKAIYIETPTNPLLDVIDIKIASDRAKKYNLLTIVDNTFMTPYFQNPLNLGADIVIHSATKYLGGHSDLVAGLVVVKDEELGEKIHFIQNSTGGILQPFDSFLLIRGIKTLSVRMDRHELNANFIAEKLGDLEGIENVYYPGLKTHIGHDIQKKQASGFGGIISFTLNKKYNYEKFFNSLELITFGESLGGVESLACHPASMTHAAMPLELRERIGITDRLIRISVGIEDKEDILEDIQQALVKAGDKNEIL

SEQ ID NO: 13844 - DNA, 1173 bp, Rhodococcus sp. RHA1
  CDS (1)..(1173): transl_table=11
atgagtgagcagcgcagcaaagcggacaacatcagctggcaggggttctccaccaaggccgtgcacgcaggattcgacccggacccgcagacgggcgccgtcaacgtcccgatctacgcgagttcgacgttcgcgcaggacggcgtcggcggcatgcgaaacggattcgaatacgcccgcaccggcaaccccacccgacgaccgctcgaggccaacctcgccgccctcgagtcgggcacgtacggtcgcgccttcggctcgggcatggccgccaccgactgcctgctccgtgccgcgctccgccccggcgaccacctcgtcatcccgaacgacgcctacggcggaacgttccgcctgatcgacaaggtcttcacccagtggggcatcgagtacacgcccgccgcggtgtccgacgtggacgccgtccgggcagccatccgccccaacaccaagctcgtgtgggtcgagacgcccaccaacccgctcctcaacatcggtgacatcgaggcactgtccgacgtcgcgcacgaggcaggagcgaagatcgtcgtcgacaacacgttcgcctcgccgtacctgcagcagccgctgcagctcggcgccgacgtcgcgctgcactcgaccaccaagtacatcggcggacactccgacgtcgtcggtggcgcactcgtcaccaacgacgaggagctcgacacggcgttcgcgttcctgcagaacggtgcgggcgcggtccccggacccttcgacgcgttcctcacgctccgcggcatcaagaccctctccctgcgcatggagcggcacagcgacaacgccgagaaggtcgtcgaactgctcaccgggcaccccgcggtgtcccaggtcatctaccccggactcgagtcgcatcccggccacaaggtcgcggagaagcagatgcgccgcttcggcggcatgatctcggtccgcctcgcaggcggcaagcaggctgcgctggacttctgctcgcgcaccgagatcttcacgctggccgagtcgctcggcggtgtcgagtcgctgatcgagcacccgggcgccatgacccacgcctcgaccgccggttcgctgctcgaggtcccggacgacctggtgcgcctgtccgtcggcatcgaggatgccgccgacctcgttggcgacatcgagcaggcactgaagtag

SEQ ID NO: 13845 - protein, 390 aa, Rhodococcus sp. RHA1
MSEQRSKADNISWQGFSTKAVHAGFDPDPQTGAVNVPIYASSTFAQDGVGGMRNGFEYARTGNPTRRPLEANLAALESGTYGRAFGSGMAATDCLLRAALRPGDHLVIPNDAYGGTFRLIDKVFTQWGIEYTPAAVSDVDAVRAAIRPNTKLVWVETPTNPLLNIGDIEALSDVAHEAGAKIVVDNTFASPYLQQPLQLGADVALHSTTKYIGGHSDVVGGALVTNDEELDTAFAFLQNGAGAVPGPFDAFLTLRGIKTLSLRMERHSDNAEKVVELLTGHPAVSQVIYPGLESHPGHKVAEKQMRRFGGMISVRLAGGKQAALDFCSRTEIFTLAESLGGVESLIEHPGAMTHASTAGSLLEVPDDLVRLSVGIEDAADLVGDIEQALK

SEQ ID NO: 13846 - DNA, 1110 bp, Haemophilus somnus 129PT
  CDS (1)..(1110): transl_table=11
atgacacaacaatatgctctagatacattactggctcagaccggtaatagaacagatgaaagaaccggtgcggtatctacgccgatttttctttccactgcttatggtcatcatggaattggtgaaagtacgggatttgattatacccgcactaaaaatccaacgagaacggtattagaagaaacaattgcaaaattagaaggtggagatcgtggatttgcctgttcttcaggaatggcggctattcaattattgatgaacttatttgcgtcacctgatgaatggattgtttccagcgatgtttatggcggaacttatcgcctattggattttgcacataagaatattcatggtgtcaaacctgtttatgtcaatacagcttcaagtgaagaaattgaaaaggcaatcactgagaatacaaaggcgatttttgttgaaacaccatcgaatccgttaatggaagaatgtgatgtggcagaaattgcgaaaatagctaaaaaatacaaattgctattgattgtagacaatacttttttaactcctgttttatttagaccaatggaacatggtgcagatattgttattcatagtggaacaaaatatattgctggtcataacgacacattggtagggttaattgttgccaaagggcaagagatctgtaaccgcttatattatattcaaaatggtgcaggtcccgtattatcaccttttgattcttggttgaccattcgaggcatgaagacacttgcattgcgaatggaacgtcatcagaaaaatgcacaggaattggcaaactttttaagagaacagccacaagtaaaagatgtgttatatccaaataaaggagggatgctatcttttcgtcttcaaaatgaaaattgggtaaatccttttcttaaagcaatgaagttaattacttttgctgagagtttaggcggtacggaaagtttcattacgtatccggcgacacaaacgcatatggatattcctgaggttgaacgtgttgctcgaggtgtatgcaatcgtttactacggttttctgtaggattggagaatgtagaagatattaaagcggatttattacaggcattttctcaactaaagtaa

SEQ ID NO: 13847 - protein, 369 aa, Haemophilus somnus 129PT
MTQQYALDTLLAQTGNRTDERTGAVSTPIFLSTAYGHHGIGESTGFDYTRTKNPTRTVLEETIAKLEGGDRGFACSSGMAAIQLLMNLFASPDEWIVSSDVYGGTYRLLDFAHKNIHGVKPVYVNTASSEEIEKAITENTKAIFVETPSNPLMEECDVAEIAKIAKKYKLLLIVDNTFLTPVLFRPMEHGADIVIHSGTKYIAGHNDTLVGLIVAKGQEICNRLYYIQNGAGPVLSPFDSWLTIRGMKTLALRMERHQKNAQELANFLREQPQVKDVLYPNKGGMLSFRLQNENWVNPFLKAMKLITFAESLGGTESFITYPATQTHMDIPEVERVARGVCNRLLRFSVGLENVEDIKADLLQAFSQLK

SEQ ID NO: 13848 - DNA, 1158 bp, Synechococcus sp. CC9311
  CDS (1)..(1158): transl_table=11
ttgcagcgtcctgtcccagaaccggcgacagccacccgggccattcaccatggcgaaagcttcgccagcgaaaccggcacggtgatgccacccatctacgccacatccacctttgagcatggcaacccgggcggattcgattacacccgctctggcaaccccaatttccgcatccttgagggcgttttggcctctgttgaggcgtgcagccacgccacggtgtttggttcgggagtaagcgcgattaccgcgattgtctccaccctgagccagggagatctggtgctctgcgaagagaacctctacggctgcaccgtgcgcttgttcgagcaagtgtttgccaagttcggggtgcgcaccgaatgggttgatttcaccactcccaatgctgtagcccgcatcgagaagcagcggccggcgatggtctggctggagagtcccaccaacccactgctcaaggtgattgacctcgatgcggtctgcagcgcagcaagcgccgccggcgtgcccgtcgtcgtggacaacacgttcgccaccgccttggttcaacgccctttggcactcggcgccaccctctcactcaccagcaccacgaaatacatcaacgggcattcggatgccctcggtggtgtggtttgcaccgataatcccagctggcatcaaaaaatggtgtttgcccaaaaagcattggggctgatgccctcacccttcgactgttggctgatcacccggggcatcaaaacgctgcccctgcgcctgaaccaacagatggcgaatgcggctgcggtggcggatcacttggcatcccatcccgctgtgtcttgggtgcgctaccccgggcgagacgatcatccgcagagggctgtggccttgcgccaaatgaacggaggtggagcgatcgtgacgattggattaaatgcgaaccgtgaacaggtctatgccatatgcaaagccctgcgttggttcacgatggccgaaagccttggcggagttgagagcttgatctgccatccagccaccatgacccacgccgccgtttcttccgagatcaaagcagccctaggaatcagcgacggactgattcgtctatcccttggctgcgaagacatcagtgacctgttgatcgatcttgatcacgcgctcaccctgcttccgtga

SEQ ID NO: 13849 - protein, 385 aa, Synechococcus sp. CC9311
MQRPVPEPATATRAIHHGESFASETGTVMPPIYATSTFEHGNPGGFDYTRSGNPNFRILEGVLASVEACSHATVFGSGVSAITAIVSTLSQGDLVLCEENLYGCTVRLFEQVFAKFGVRTEWVDFTTPNAVARIEKQRPAMVWLESPTNPLLKVIDLDAVCSAASAAGVPVVVDNTFATALVQRPLALGATLSLTSTTKYINGHSDALGGVVCTDNPSWHQKMVFAQKALGLMPSPFDCWLITRGIKTLPLRLNQQMANAAAVADHLASHPAVSWVRYPGRDDHPQRAVALRQMNGGGAIVTIGLNANREQVYAICKALRWFTMAESLGGVESLICHPATMTHAAVSSEIKAALGISDGLIRLSLGCEDISDLLIDLDHALTLLP

SEQ ID NO: 13850 - DNA, 1194 bp, Shewanella sp. MR-4
  CDS (1)..(1194): transl_table=11
atgcaagatgaatcaagcaagcagtggaaagccgcaacccaagccattcatgccgggcatgagcgcgaagcctttggtactttggtgacgccactttatcaaacggcgacctttgtctttgagtcggcgcagcaaggtggtgagcgattcgctggcaacgaacccggttatatttatactcgcctaggtaacccgacagttgccgagctggaacgtaaaatggcgattttagaaggggcagaagcggcggcagcaacggcttctggcatgggggccgtatcggcggcgctgttggctaacctccagatgggcgatcatttagtggcttccaatgcggtttatggctgcaccttcgcccttatgaccagccaatttgcccgcttcggtatcgaagtcaccttagtcgattttaccgatttagcggccattgagcgggccatcaaagccaacactcgggtgattttttgcgaaactccggttaatcctcatttacaggtgtttgatctcaaaggtatcgccgatattgcgaaacggcatcagcttgtcagcattgtcgataatacttttatgacgccgctgctgcagcaacccttggcattcggtatcgatttagtggtacacagtgcgactaagtatttgaatggacacggcgatgtaattgccggcgtcgtgtgtggcagtgaagagcagctgcacagagtgaaatatgaaatcctaaaagatatcggcgccgtcatgtctccccacgatgcttggctgattttgcgcgggctgaaaaccttagatgtgcgtttgcagcgccattgtgacagtgcccagcgtgttgccgagtttttggagcaacatcctgctgtgactcgggtgtattatccagggcttaaatctcattcagggcaccgatttattggtggacagatggcgagagctggtggcgtgattgcctttgagttagccgcctctcttgagcaagccatggcttttgtgggttaccttaagctgttttcaatcgctgtaagtttgggggatgcggaatcccttattcagcacccagcttccatgacccattcgccctacacgccagaggctcgccaagccgcggggataagtgataatttactgcggatctcaatcggtttagaggattgtgacgatatcatcgaggatttaaaccaagccttggccatgctggcataa

SEQ ID NO: 13851 - protein, 397 aa, Shewanella sp. MR-4
MQDESSKQWKAATQAIHAGHEREAFGTLVTPLYQTATFVFESAQQGGERFAGNEPGYIYTRLGNPTVAELERKMAILEGAEAAAATASGMGAVSAALLANLQMGDHLVASNAVYGCTFALMTSQFARFGIEVTLVDFTDLAAIERAIKANTRVIFCETPVNPHLQVFDLKGIADIAKRHQLVSIVDNTFMTPLLQQPLAFGIDLVVHSATKYLNGHGDVIAGVVCGSEEQLHRVKYEILKDIGAVMSPHDAWLILRGLKTLDVRLQRHCDSAQRVAEFLEQHPAVTRVYYPGLKSHSGHRFIGGQMARAGGVIAFELAASLEQAMAFVGYLKLFSIAVSLGDAESLIQHPASMTHSPYTPEARQAAGISDNLLRISIGLEDCDDIIEDLNQALAMLA

SEQ ID NO: 13852 - DNA, 1182 bp, Shewanella sp. MR-4
  CDS (1)..(1182): transl_table=11
atgaccgcaggcaaattagtgaccgaacgtcaattagccacattagcagtgcgtcagggtatcgaaagcgatactcagcatggcgcggtggtgccgccaatttacctgtcgactaattacgccttcgatggtcataaaaatcctcgcgaatttgattacagtcgttccggcaatcctacccgcagcatcttaggtgatgccttagctaagctggaaaagggcgcaactggcgtggtgacttgcactggcatggcagccattaccttagtcactaccttgctcggcccagatgacttgctggtggttccacacgattgttacggcggttcgtaccgtttattcaccaacctcgcgaaaaaaggccaatttaaactgctggtggtcgatcaaaccgatgctcaagcgcttgagcaagccatcgcccagcaacctaagatggtatggattgaaaccccctctaaccctctgctgcgagtcgtcgatatcgaagctatcgccaaggcgagccacgcagtgggcgctttagtggtagtggacaacactttcctctcgcccattttgcagcaaccgctgttactcggtgccgatatcgttatccactccaccactaagtacatcaatggtcacagcgatgtggtgggcggcgcggtgatcgccaaagatcctcaactcggtgagaccttacattggtggtcgaacactttaggtttaactgggtctgccttcgacagttatcaaaccctgcggggtctgcgtaccttagccgtgcgcattcgcgagcaccaaagcaatgcccagcgtattctggacgtgctgacgagcagccctgtggtgagcaaagtgtattacccaggacttgcggatcaccccggccatgccattgccgccaagcagcaaaaaggctttggcgctatgctgagttttgagcttaagggcggcgaggccgaagtggtcgcctttttagatgccttaagtttattcagcgtggccgagagcttaggtggcgttgagagtctcgtggccgtgcccgcgactatgacccatagggcgatggagccccaagcgcgttatgaagctggcattaaagacaccctattacgtttgtcggttggtattgaagatgccgacgacttagttgcagatattcaagcaggattggccgccgttgcggcttgtcagtag

SEQ ID NO: 13853 - protein, 393 aa, Shewanella sp. MR-4
MTAGKLVTERQLATLAVRQGIESDTQHGAVVPPIYLSTNYAFDGHKNPREFDYSRSGNPTRSILGDALAKLEKGATGVVTCTGMAAITLVTTLLGPDDLLVVPHDCYGGSYRLFTNLAKKGQFKLLVVDQTDAQALEQAIAQQPKMVWIETPSNPLLRVVDIEAIAKASHAVGALVVVDNTFLSPILQQPLLLGADIVIHSTTKYINGHSDVVGGAVIAKDPQLGETLHWWSNTLGLTGSAFDSYQTLRGLRTLAVRIREHQSNAQRILDVLTSSPVVSKVYYPGLADHPGHAIAAKQQKGFGAMLSFELKGGEAEVVAFLDALSLFSVAESLGGVESLVAVPATMTHRAMEPQARYEAGIKDTLLRLSVGIEDADDLVADIQAGLAAVAACQ

SEQ ID NO: 13854 - DNA, 1182 bp, Shewanella sp. MR-7
  CDS (1)..(1182): transl_table=11
atgaccgcaggcaaattagtgaccgaacgtcaattagccacattagcagtgcgtcagggtatcgaaagcgatactcagtatggcgcggtggtgccgccaatttacctgtcgactaattacgccttcgatggtcataaaaatcctcgcgaatttgattacagccgttccggcaatcctacccgtagcatcttaggtgacgccttagctaagctagaaaagggcgcaaccggtgtggtgacttgcactggcatggcagccattactttagtgactaccttgctcggcccagatgatttgctggtggtgccacacgattgttacggcggttcgtaccgtttattcactaacttggctaaaaagggccaatttaaactgctggtggtcgatcaaaccgacactcaagctctcgagcaagccatcgcccagcaacctaagatggtgtggattgaaactccatcaaaccctctgctgcgagtcgtcgatatcgaagctatcgcgaaggcgagccacgccgtgggtgctttagtggtagtggacaacactttcctctcgccaattttgcagcaagcgttgttactcggtgccgatatcgttatccactccaccactaagtacattaatggtcacagcgatgtggtgggcggcgcggtgatcgccaaagatcctcaactcggtgagaccttacattggtggtcaaacaccttaggtttaaccggttctgccttcgacagttatcaaaccctgcggggtctgcgtaccttggccgtgcgcattcgcgagcaccagagcaatgcccagcgtattgtggacgtgctgacgagcagcccagtggtgagtaaagtgtattacccaggccttgcggatcaccccggccatgccattgccgccaagcagcaaaaaggctttggcgctatgctgagttttgagcttaagggcggcgaggccgaagtggttgcctttttaggtgccttaagcttattcagcgtggccgagagtttaggtggcgttgagagtctcgtggccgtgcctgcgactatgacccacagggcgatggagccccaagcgcgttatgaagctggcattaaagacaccctattacgtttgtcggttggtattgaagatgccgaagacttagttgcagatattcaagcaggattggccgccgttgcggcttgtcagtag

SEQ ID NO: 13855 - protein, 393 aa, Shewanella sp. MR-7
MTAGKLVTERQLATLAVRQGIESDTQYGAVVPPIYLSTNYAFDGHKNPREFDYSRSGNPTRSILGDALAKLEKGATGVVTCTGMAAITLVTTLLGPDDLLVVPHDCYGGSYRLFTNLAKKGQFKLLVVDQTDTQALEQAIAQQPKMVWIETPSNPLLRVVDIEAIAKASHAVGALVVVDNTFLSPILQQALLLGADIVIHSTTKYINGHSDVVGGAVIAKDPQLGETLHWWSNTLGLTGSAFDSYQTLRGLRTLAVRIREHQSNAQRIVDVLTSSPVVSKVYYPGLADHPGHAIAAKQQKGFGAMLSFELKGGEAEVVAFLGALSLFSVAESLGGVESLVAVPATMTHRAMEPQARYEAGIKDTLLRLSVGIEDAEDLVADIQAGLAAVAACQ

SEQ ID NO: 13856 - DNA, 1194 bp, Shewanella sp. MR-7
  CDS (1)..(1194): transl_table=11
atgcaagatgaatcaagcaagatgtggaaagccgcaacccaagccattcatgccggacatgagcgcgaagcctttggtactttggtgacgccactttatcaaacggcgacctttgtctttgagtcggcgcagcaaggtggtgagcgattcgctggcaacgaacccggttacatttatactcgcctaggtaacccgacagttgccgagctggaacgtaaaatggcgattttagaaggggcagaagcggcggcggcaacggcttctggtatgggggccgtgtcggcggcgctgctggctaacctgcagatgggcgatcatttagtggcttccaatgcggtttatggttgcacctttgcccttatgaccagccaatttgcccgcttcggtatcgaagtcaccttagtcgattttaccgatttagcggccattgagcgggccatcaaacccaatactcgggtgattttttgcgaaactccggtaaatcctcatctacaggtgtttgatcttaaagatatcgccgatattgcgaaacggcatcagcttgtcagcattgtcgataatacttttatgacgccgctgctgcagcaacccttggcattcggtatcgatttagtggtacacagtgcgactaagtatttgaatggacacggcgatgtaattgccggcgtcgtgtgtggcagtgaagagcagctgcacagagtgaaatatgaaatcctaaaagatatcggcgccgtcatgtctccccacgatgcttggttgattttacgcgggctgaaaaccttagatgtgcgcttgcagcgccattgtgacagtgcccagcgtgtcgccgagtttttggagcaacatcctgctgtgactcgggtgtattatcctgggcttgagtctcactcaggatatcgatacatcggaggtcagatgaagcgcgccggaggtgtgatagcctttgaattagccgccgatctagcccaggcgatggcatttgttggttatcttaagctgttttcaatcgccgtaagcttgggggatgcggaatcccttattcagcacccagcttccatgacccattcgccctacacgccagaggcgcgtcaggccgcagggataagtgataatttactgcggatctcaatcggtttagaggattgtgacgatatcatcgaggatttaagccaagctttggcaatgctcacttaa

SEQ ID NO: 13857 - protein, 397 aa, Shewanella sp. MR-7
MQDESSKMWKAATQAIHAGHEREAFGTLVTPLYQTATFVFESAQQGGERFAGNEPGYIYTRLGNPTVAELERKMAILEGAEAAAATASGMGAVSAALLANLQMGDHLVASNAVYGCTFALMTSQFARFGIEVTLVDFTDLAAIERAIKPNTRVIFCETPVNPHLQVFDLKDIADIAKRHQLVSIVDNTFMTPLLQQPLAFGIDLVVHSATKYLNGHGDVIAGVVCGSEEQLHRVKYEILKDIGAVMSPHDAWLILRGLKTLDVRLQRHCDSAQRVAEFLEQHPAVTRVYYPGLESHSGYRYIGGQMKRAGGVIAFELAADLAQAMAFVGYLKLFSIAVSLGDAESLIQHPASMTHSPYTPEARQAAGISDNLLRISIGLEDCDDIIEDLSQALAMLT

SEQ ID NO: 13858 - DNA, 1221 bp, Alkalilimnicola ehrlichei MLHE-1
  CDS (1)..(1221): transl_table=11
atgagtgatcagggcgattcccaccacgacgatccgcgccacccgagccactgggcgcccgccacccgggcggtgcgggcgggacagacccgcggcctggagcaggagcagagcgagcccatctacgccagttccagcttcacctaccgtagtgctgccgaggcggcggcacgtttctccggcgagagcccggggaatatctactcgcgctttaccaaccccacggtccggaccttcgagcagcggctcgccgccctggagggggccgaggcctgcgtggcgaccgcctccgggatgtcggcggtgctggccgctaccctggggctcctgcgggccggcgaccatattgtcgcctccagcggcctgttcggggccacggcctcgctgttcgccaattacctcccgcgctatgggatcgaggtcaccacggtcccgctcaccgacctccaggcctggtcggacgccatgcgtccgcagacccgcatgctcttcctggagacgccgtccaacccgctgaccgaggtggcggatatcgccgcgctggcggacctggcccggggccagggggcgtggctggcggtggacaactgcttctgcaccccggccctgcagcggccgctggagctcggcgcggatctggtcattcactcggcgaccaagtatctggacggtcaggggcggtgcatcggcggggcggtgtgcggcgatgcccaggtggtgggcgaacaggttttcggcttcctgcgcacggccgggccgagcatgagcccgttcaacgcctgggtgttcctcaaggggctggagaccctggccctgcggatggaggctcactgccggagtgcctcggagctggcccactggctggaggagcacccggccgtggagcgggtgttctatcccgggctcgcccgccatccccagcacgccctggcggcgcgccagcagtccgcctttggcggtatcgtcagcttcgaggtgcggggcgggcgcgacgcggcctggcgggtgattgacaatacccggttgctctccatcaccgcgaacctgggcgacgccaagagcaccatcacccacccggcgaccaccactcacggccgcaacacaccggagcaacgggcggcggcggggattacggaatcgctggtccgggtgtcggtggggctggaggcggtggcggatatccgcgctgatctggacgcggcgttgtcggccctggcgtag

SEQ ID NO: 13859 - protein, 406 aa, Alkalilimnicola ehrlichei MLHE-1
MSDQGDSHHDDPRHPSHWAPATRAVRAGQTRGLEQEQSEPIYASSSFTYRSAAEAAARFSGESPGNIYSRFTNPTVRTFEQRLAALEGAEACVATASGMSAVLAATLGLLRAGDHIVASSGLFGATASLFANYLPRYGIEVTTVPLTDLQAWSDAMRPQTRMLFLETPSNPLTEVADIAALADLARGQGAWLAVDNCFCTPALQRPLELGADLVIHSATKYLDGQGRCIGGAVCGDAQVVGEQVFGFLRTAGPSMSPFNAWVFLKGLETLALRMEAHCRSASELAHWLEEHPAVERVFYPGLARHPQHALAARQQSAFGGIVSFEVRGGRDAAWRVIDNTRLLSITANLGDAKSTITHPATTTHGRNTPEQRAAAGITESLVRVSVGLEAVADIRADLDAALSALA

SEQ ID NO: 13860 - DNA, 1182 bp, Alkalilimnicola ehrlichei MLHE-1
  CDS (1)..(1182): transl_table=11
atgaccgatgaccgccaccatttcggcacccgagcgctctgggccggcgagtccgaggacccgcactgccgggacgtggccctgccgattcaccacagtgtcaccttcgcctacgaggacgtcgacgagtggttcgatgtggcactggaccagaagcccggctatatctattcgcgcaacaagaatccgaccgtccgccccttggaactgaccatgcgggcgctggagggggccgaggaggccatcagcttctccaccggcatggccgccatcagcaacaccctctataccctgctggcccccggcgaccgggcagtggcgatcaaggatacctacggcggcaccaacaagattttcatcgagttcctgccccgggccggggtggatgtggcgatgtgcgacaccctcgacttcgacggtatcgaggcggagatccgtaagggctgcaagctgctctacctggaaacgcccaccaacccgaccctgaaggtggtcgacatcgcccggctctcccgggtggcccacgagcacggcgccaaggtgattgtggataacaccttcgccacgcccatcaaccagcggccgctggaactaggtgcagacctggtggtgtacagtgccaccaagtacctgaacggccactccgacgccatgggcggtatcctctgcggccccaaggggatcgttgaccaggtttaccactaccgggagatcaacggcgccaccctccacgccaacaccgcctacatgatcctgcgcgggctgaagaccctggagctgcgtattcaacgccacaacgagaacgcccagcgcatcgccgagtacttgcacgatcaccccaaggtggaccacgtcttctacccgggcctaccggatcaccacaaccacgccatcgccaaggcgcagatggacggttacggcggtatgctcagctttgcgctgaccggcgacttcgaccaagtgaagcgctttctgccgcgcctgcacctggcccacaaggccgccagcctgggctccgttaccaccctggtgggccctcccagggtgaccagccacgtggagctgaccgcagaggagcgtcgggcggcgggcattccggagagcctgatccgctactcggccggcatcgaaaacgccgaagacttgattgccgacctggagcaggccctggccggcctctga

SEQ ID NO: 13861 - protein, 393 aa, Alkalilimnicola ehrlichei MLHE-1
MTDDRHHFGTRALWAGESEDPHCRDVALPIHHSVTFAYEDVDEWFDVALDQKPGYIYSRNKNPTVRPLELTMRALEGAEEAISFSTGMAAISNTLYTLLAPGDRAVAIKDTYGGTNKIFIEFLPRAGVDVAMCDTLDFDGIEAEIRKGCKLLYLETPTNPTLKVVDIARLSRVAHEHGAKVIVDNTFATPINQRPLELGADLVVYSATKYLNGHSDAMGGILCGPKGIVDQVYHYREINGATLHANTAYMILRGLKTLELRIQRHNENAQRIAEYLHDHPKVDHVFYPGLPDHHNHAIAKAQMDGYGGMLSFALTGDFDQVKRFLPRLHLAHKAASLGSVTTLVGPPRVTSHVELTAEERRAAGIPESLIRYSAGIENAEDLIADLEQALAGL

SEQ ID NO: 13862 - DNA, 1278 bp, Alkalilimnicola ehrlichei MLHE-1
  CDS (1)..(1278): transl_table=11
gtgaaaccggaaaccctggcaatccacgcgggctacagcccggacccgaccaccaaggcggtggcggtgcccatctaccagaccaccagctacgccttcgacaacacccagcatggggcggatctgttcgacctcaaggtggagggcaacatctacacccgcatcatgaaccccaccaacgcggtgttggagcagcgggtggccgaactggaggggggtatcggcgggttggccgtggcctcgggtatggcggccatcacctacgcccttcagtgcatcacccggtccggtgacaatatcgtctccaccagcaagctctacggcggcacctacaacctgttcgcgcacaccatgcccaacttcggtatcgaggtgcgtatggccagccacgacgactttgaccggctggaggcgctgatcgatggcaagaccaaggcggtcttctgcgagacggtgggcaatccctccggcgagctggcggatatcgggcggctggcggagatcgcccaccgtcacggggtgccgctgatcgtggacaacaccgtgcccacgccctttctctggcggccgatcgatgacggcgcggatatcgtcgtgcactcactgaccaagttcatgggcggtcacggcaccaccgtgggcggggtcatcgtggattcgggcaagttcccctgggcggaccacggcgaacgcttcccgatgatggtggagccggacccgtcctaccacggggtggtctataccgaggccctggggccggccgccttcatcggccgctgccgggtggtgcccctgcgcaataccggcgccgcgctctcgcccatgaacgccttccagctgctgcaggggatcgagaccctgcacctgcgcatggagcggcacagtgagaacgccctggccgtggcgcagcacctgcagaaccacccgcaggtgacctgggtgaagtatgccggcctggagtccagcccggacgacccgctggtgcagaagtacatgcgcggtggtatggcctccggcatcctctccttcggtatccgcgggggcaaggaggccggggcgaagttcattgatgccctgcaactcatcacccgcctggtgaacatcggtgacgccaagtcgctggccactcatccggccaccaccacccaccgccagttgaacgaggcggagctggagcaggcgggggtcagtcaggacatggtgcgcatcgcggtgggcatcgagcacgtggacgacatcatcgcggacatcgaccaggccctggaggccgcaaaatag

SEQ ID NO: 13863 - protein, 425 aa, Alkalilimnicola ehrlichei MLHE-1
MKPETLAIHAGYSPDPTTKAVAVPIYQTTSYAFDNTQHGADLFDLKVEGNIYTRIMNPTNAVLEQRVAELEGGIGGLAVASGMAAITYALQCITRSGDNIVSTSKLYGGTYNLFAHTMPNFGIEVRMASHDDFDRLEALIDGKTKAVFCETVGNPSGELADIGRLAEIAHRHGVPLIVDNTVPTPFLWRPIDDGADIVVHSLTKFMGGHGTTVGGVIVDSGKFPWADHGERFPMMVEPDPSYHGVVYTEALGPAAFIGRCRVVPLRNTGAALSPMNAFQLLQGIETLHLRMERHSENALAVAQHLQNHPQVTWVKYAGLESSPDDPLVQKYMRGGMASGILSFGIRGGKEAGAKFIDALQLITRLVNIGDAKSLATHPATTTHRQLNEAELEQAGVSQDMVRIAVGIEHVDDIIADIDQALEAAK

SEQ ID NO: 13864 - DNA, 1200 bp, Hyphomonas neptunium ATCC 15444
  CDS (1)..(1200): transl_table=11
atggcggatgcacccggcggcgacaagaagggctggaagcctgcgacccaggcggtacgcggcggcctgatgcggtcccagcatggggagatttccgaggcgctgtatctgacctccggctacgcttacgactcggccgagcaggcgatgcgccggatggcgggcgaggaagaaggcttcgtctattcccgctatggcagcccgaccaatgagatgctgcaacagcgcctcgcgctgattgaaggcgccgaagcgtgccgggtgacgggctctggcatgggcgcgatttcgtcggccatcctggcgccgcttaaagcgggcgaccgggtggtggcggcgaccgcgctgtttggctcgtgccgctggatcattgccaaccagatgccgaagtttggcatcgaggcagtgttcgtggacggggccgatcttgatgcttggaagcgcgagatcgacaagggctgccagctggtgctgatcgaaagcccggccaatccgttgctcgacggcgtggacatcgaagcggtcgccaggctcgccaaggcggcgggcgcgctgctggtggtggacaatgtgtttgccacgccggtgcttcagcggccgctggaaatgggcgccgatgtgatcgcctattcggccaccaaacatatggacgggcagggccgcgttctgctgggcgcgatcctgacggacgccaagcggatgagtgatgtgtatgatccgtggctgcgccatatggggccggcggcctcgccgtttaacgcctgggtagtgctgaagggccttgagacgatgcagctgcgcgtggaagcgcagagccgcacggcggcgcggctggcggatgttctggccgatcatccggcggtcaatgccgtgcgctatccccaccgcaaggatcacccgcattatgaggtgcacaagcgccagatgaaatcgggcggcacgctgctcgcgctgtcgctcaagggcgggcaggacgcggcgttccgcttcctcaacgggctgcagctggtcgacatctgcaacaaccttggcgatacgaaatcgctggcctgtcatccctccaccacgacgcaccgcgcgttgagtgatgaggatcaggcggcgatggggcttgaccgcagctgggtccggctctctgttggtcttgaagacgcagatgatctggaagctgatcttctcgcttcgcttaacagcttgtga

SEQ ID NO: 13865 - protein, 399 aa, Hyphomonas neptunium ATCC 15444
MADAPGGDKKGWKPATQAVRGGLMRSQHGEISEALYLTSGYAYDSAEQAMRRMAGEEEGFVYSRYGSPTNEMLQQRLALIEGAEACRVTGSGMGAISSAILAPLKAGDRVVAATALFGSCRWIIANQMPKFGIEAVFVDGADLDAWKREIDKGCQLVLIESPANPLLDGVDIEAVARLAKAAGALLVVDNVFATPVLQRPLEMGADVIAYSATKHMDGQGRVLLGAILTDAKRMSDVYDPWLRHMGPAASPFNAWVVLKGLETMQLRVEAQSRTAARLADVLADHPAVNAVRYPHRKDHPHYEVHKRQMKSGGTLLALSLKGGQDAAFRFLNGLQLVDICNNLGDTKSLACHPSTTTHRALSDEDQAAMGLDRSWVRLSVGLEDADDLEADLLASLNSL

SEQ ID NO: 13866 - DNA, 1293 bp, Hyphomonas neptunium ATCC 15444
  CDS (1)..(1293): transl_table=11
atgtcaaaacctcagaagtcctatcgcaagcgcgagatcgcgggccataccctgagcccggaatctctggtgatgggatttggctacgaccccttcatgtctgaaggctcgatcaagccgccgattttcatgacgtccaccttcgccttcaagtcggcgcgcgaaggggaggcgttgtttcgccgcctcgccgggagaatggaggtgggcgatccggaagatgccgacctcatctacacccggttcaacaatccgaacatggaagtgctggaagaccggctgacgctttatgatgacggggaggcggcgctcgctttttcctccggaatgtcggccatcacgacggcgctttttgcctgcgcggaacctggtaccggcatcctccattccagccccctctatggcgcctcggaagtctttatccggagcttcatgccagactggggcgtgcgctcggcggagttcgatgcctggtcgacggaagaccagatcctcaaggcggcgcgcgatgcggtcgcccggttcgggccgatctcggtgatctttaccgaatcccccgccaaccccaccaatgcgctggtcgatattgccgcctgcgcccgtgtggccagtatactggagcaggagacgggccggcgccccatcctgatgtgcgacaataccatgatggggccagtcggccataagccgctgaagcatggggcagacctcgcgctttactcgctgaccaaatatgtcggcgggcattcggacctgatcgccggcggcattgtcggcaatgacgagatcctgaccaaggtccgccgtatgcggaattatctgggaacgatgctggacgcccactcgtgctggctgctgacacggtctctggagacggtgcagctgcggatggagcgggccttctccaatgcgcgtatctgcgccaattacctgaaggaccatcccaaggtcgcccgcgtgatgtatcccgaattcctggcggccggcgacccgcagcgcaaggtgttcgaggagcagtgcgacgcagcgggggctaccttttccttcgatgtgacgggcgggaaggaggctgcgttccggatgctggacaagctgcaactgatcaagctggccgtcagcctgggcgggaccgagagcctgatgtgccatcccggctcgaccacgcattctgccgttccggccgatgtgcgcgcccggatcggctttaccgacggcctcatccgcttttcggtcggcattgaggcccctgatgacttggtggtcgacctgaaacaggcgctggaacatgtgtga

SEQ ID NO: 13867 - protein, 430 aa, Hyphomonas neptunium ATCC 15444
MSKPQKSYRKREIAGHTLSPESLVMGFGYDPFMSEGSIKPPIFMTSTFAFKSAREGEALFRRLAGRMEVGDPEDADLIYTRFNNPNMEVLEDRLTLYDDGEAALAFSSGMSAITTALFACAEPGTGILHSSPLYGASEVFIRSFMPDWGVRSAEFDAWSTEDQILKAARDAVARFGPISVIFTESPANPTNALVDIAACARVASILEQETGRRPILMCDNTMMGPVGHKPLKHGADLALYSLTKYVGGHSDLIAGGIVGNDEILTKVRRMRNYLGTMLDAHSCWLLTRSLETVQLRMERAFSNARICANYLKDHPKVARVMYPEFLAAGDPQRKVFEEQCDAAGATFSFDVTGGKEAAFRMLDKLQLIKLAVSLGGTESLMCHPGSTTHSAVPADVRARIGFTDGLIRFSVGIEAPDDLVVDLKQALEHV

SEQ ID NO: 13868 - DNA, 1284 bp, Rhizobium leguminosarum bv. viciae 3841
  CDS (1)..(1284): transl_table=11
atgaccgccccgcatccttccaaaacccatatcggcaatcatgccctgcatcccgaaacgcagatgctaaattacggctacgatccggagctctcggaaggggcggtcaagccgccggtattcctcacctcgaccttcgtgttcaagacggcggaagatggccgcgacttcttcgattacgtgtctggccgtcgcgagccgcccgaagggaagggggcaggcctcgtctattcgcgcttcaaccatccaaacagcgagatcgtcgaggacaggctcgccgtctacgaacggacggaaagcggcgtgctgttttcatccggcatggcggcgattgccaccaccctgcttgccttcgtccggccgggcgatgcgatcctgcattcgcagccgctctacggcggaaccgaaacattgctggcgaagaccttcctgaacctcggcgccgccgccgtcggatttgccgacggcgtcagcgaaggatcggtgcagaaggcggctgaagaggcgatggccaagggccgcgtttccgtcatcctgatcgagacgcctgccaatccgaccaacagtctggtcgatgtggcgatgatccgacgcgtggccgacgcgatcggtgcaagacagggccatatgccgatcatcgtctgcgacaacaccctgctcgggccggtcttccagcgaccgatcgagcacggcgccgatatctcgctctattcgctgacaaaatatgtcggtggtcattccgatctgatcgccggcgccgttcttggccgcaaggcggtgatcaagcagatcaaggccttgcgcggcgcgatcggcacccagctcgatccgcattcctgctggatgctcggccgttcgctggaaacgctgcagctccgtatggaacgggcaaacagcaacgcgcgggccgtcgccgactttctgcgcgatcacccgaaggtcgagaaggttcactacctgccctaccacgatccggaatcgccggccggccggaccttcatcgcgcaatgcaccggcgccggctcgaccttctctttcgacatccgcggcggtcagcctgcctcgttcaaattcctgaacgcgctgcagatcttcaagctcgcggtcagcctggggggcacggaatcgcttgcgagccatccggccgccatgacgcattccggcgtgcccgccgatgtccgtcagcgcatcggcgttctggaatcgacgatccgtctttcgatcggcatcgagcatccggacgatctgatcgccgacctggagatagcactgcaggctgcgtga

SEQ ID NO: 13869 - protein, 427 aa, Rhizobium leguminosarum bv. viciae 3841
MTAPHPSKTHIGNHALHPETQMLNYGYDPELSEGAVKPPVFLTSTFVFKTAEDGRDFFDYVSGRREPPEGKGAGLVYSRFNHPNSEIVEDRLAVYERTESGVLFSSGMAAIATTLLAFVRPGDAILHSQPLYGGTETLLAKTFLNLGAAAVGFADGVSEGSVQKAAEEAMAKGRVSVILIETPANPTNSLVDVAMIRRVADAIGARQGHMPIIVCDNTLLGPVFQRPIEHGADISLYSLTKYVGGHSDLIAGAVLGRKAVIKQIKALRGAIGTQLDPHSCWMLGRSLETLQLRMERANSNARAVADFLRDHPKVEKVHYLPYHDPESPAGRTFIAQCTGAGSTFSFDIRGGQPASFKFLNALQIFKLAVSLGGTESLASHPAAMTHSGVPADVRQRIGVLESTIRLSIGIEHPDDLIADLEIALQAA

SEQ ID NO: 13870 - DNA, 1185 bp, Rhizobium leguminosarum bv. viciae 3841
  CDS (1)..(1185): transl_table=11
atgagcaagacctggcgcccggcaacccaactcgtccacggtggcacgctgcgttcgcaatacggcgagacgtccgaggcaatctatctcacccaaggcttcgtctacgagacgtcggaggcggccgaagcccgcttcaagggcgagacggagggcttcatctacgcccgttacggcagccccaccaacgacatgttcgaaaagcgcatgtgcctgctcgaaggcgccgaagatgcccgcgccaccgcttccggcatggccgccgtcaccgcggccatcctctgccagctgaaatcaggcgatcatatcgtcgcggcccgcgccctgttcggctcctgccgctgggtcgtcgagacgctggcgccgaaatacggcatcgactgcacgctgatcgacggccgggatctggcgaactgggaaaaggcgatcacgccgaagaccaaggtgtttttcctggaaagcccgaccaacccgacgctcgaagtgatcgatattgcaggcgtcgccaagctcgccaaccagatcggcgccaaggtcgtcgtcgacaatgttttcgcgacaccgctcttccagaagccgctggaactcggcgcccatatcgtcgtctattccgccaccaaacatattgacggccagggccgctgcctcggcggcgtcgtgctttccgacaaggaatggatcgacgagaacctgcacgactatttccgccataccggcccggccatgtcgccgttcaacgcctggactttgctgaagggcatcgagacgctgccgctgcgcgtgcgccagcagaccgagaatgccgcaaagatcgccgacttcctggccgagcaaggcaaggtcgccaaggtgatctatcccggccgcaaggaccacccgcaagccgatatcatcgccaagcagatgaccggcggctcgacgctggtcgccttcgagctgaagggcggcaaggatgcggcctttgcgctgcagaacgcgctcgagatcatcaagatctccaacaatctcggcgacagcaagagcctgatcacccatccggcgacgaccacgcacaagaacctgacggatgaggcgcgcgccgaactcggcatttctccgggcacggtccgcctttcggccggcatcgaggataccgacgacctgatcgaggatttcgcgcgggcgcttgccaaggtttcggcctga

SEQ ID NO: 13871 - protein, 394 aa, Rhizobium leguminosarum bv. viciae 3841
MSKTWRPATQLVHGGTLRSQYGETSEAIYLTQGFVYETSEAAEARFKGETEGFIYARYGSPTNDMFEKRMCLLEGAEDARATASGMAAVTAAILCQLKSGDHIVAARALFGSCRWVVETLAPKYGIDCTLIDGRDLANWEKAITPKTKVFFLESPTNPTLEVIDIAGVAKLANQIGAKVVVDNVFATPLFQKPLELGAHIVVYSATKHIDGQGRCLGGVVLSDKEWIDENLHDYFRHTGPAMSPFNAWTLLKGIETLPLRVRQQTENAAKIADFLAEQGKVAKVIYPGRKDHPQADIIAKQMTGGSTLVAFELKGGKDAAFALQNALEIIKISNNLGDSKSLITHPATTTHKNLTDEARAELGISPGTVRLSAGIEDTDDLIEDFARALAKVSA

SEQ ID NO: 13872 - DNA, 1185 bp, Pseudomonas aeruginosa UCBPP-PA14
  CDS (1)..(1185): transl_table=11
atgagccagcacgaccagcatcccgacgccccggcccaggccttcgcgacccgggtcatccacgccgggcaggcccccgatccctcgaccggcgcgatcatgccgccgatctatgccaactccacctacatccaggaaagccccggggtacacaaggggctcgactacggccgctcgcacaacccgacccgctgggccctggagcgctgcgtggccgacctcgagggcggcgcccaggccttcgccttcgcctccggcctggcggcgatctcctcggtgctggagctgctcgacgccggttcccacatcgtttccggaaatgacctctacggcggtaccttccgcctgttcgagcgggtccgccggcgcagcgccgggcatcgcttcagcttcgtcgacccgaccgacctgcaggccttcgaggccgcgctgaccccggaaacccgcatggtctgggtggaaaccccgagcaacccgctgctgcgcctcaccgacctgcgcgccatcgcccagctctgccgcgcccgcggcatcatcagcgtggccgacaacaccttcgccagcccctacatccagcgccccctggaactgggcttcgacgtggtggtgcactccaccaccaagtacctgaacggccattccgacgtgatcggcggcatcgccatcgtcggcgacaacccggacctgcgcgagcgcctgggcttcctgcagaactcggtgggcgccatctccgggccgttcgacgccttcctcaccctgcgcggggtgaagaccctggcgctgcgcatggagcgccattgcagcaacgccctggccctggcccagtggctggagcgccagccgcaggtggcgcgggtctactaccccggcctggcttcgcacccgcagcatgagctggcgaaacggcagatgcgtggcttcggcgggatgatctccctcgacctgcgctgcgacctggccggcgcccggcgcttcctggagaacgtgcggatcttctccctggcggagagcctgggcggggtggaaagcctgatcgagcatccggcgatcatgacccacgccagcatcccggcggaaacccgcgccgacctgggcatcggtgactcgctgatccgcctgtcggtgggcgtcgaggcgctggaggacctgcaggccgacctggcgcaggcgctggcgaagatctga

SEQ ID NO: 13873 - protein, 394 aa, Pseudomonas aeruginosa UCBPP-PA14
MSQHDQHPDAPAQAFATRVIHAGQAPDPSTGAIMPPIYANSTYIQESPGVHKGLDYGRSHNPTRWALERCVADLEGGAQAFAFASGLAAISSVLELLDAGSHIVSGNDLYGGTFRLFERVRRRSAGHRFSFVDPTDLQAFEAALTPETRMVWVETPSNPLLRLTDLRAIAQLCRARGIISVADNTFASPYIQRPLELGFDVVVHSTTKYLNGHSDVIGGIAIVGDNPDLRERLGFLQNSVGAISGPFDAFLTLRGVKTLALRMERHCSNALALAQWLERQPQVARVYYPGLASHPQHELAKRQMRGFGGMISLDLRCDLAGARRFLENVRIFSLAESLGGVESLIEHPAIMTHASIPAETRADLGIGDSLIRLSVGVEALEDLQADLAQALAKI

SEQ ID NO: 13874 - DNA, 1212 bp, Pseudomonas aeruginosa UCBPP-PA14
  CDS (1)..(1212): transl_table=11
atgactcaggactgggatgccgggcgtctcgacagcgacctggaaggcgcggccttcgacaccctggcggttcgcgccgggcaacggcggacgccggagggcgagcacggcgaggcgctgttcaccacttccagctacgtcttccgcaccgccgccgacgcggccgcgcggttcgccggcgaagtgccgggcaacgtctattcgcgctacaccaaccccacggtacgcaccttcgaggagcgcatcgccgccctcgaaggagccgagcaggcggtggccacggcgtcgggcatgtcggcgatcctcgccctggtgatgagcctgtgcagctccggcgaccacgtgctggtctcgcgcagcgtgttcggctcgaccatcagcctgttcgacaagtacttcaagcgcttcggtatccaggtcgactatccgccgttgagcgatctcgcggcctgggaggcggcgtgcaagccgaataccaagctgttcttcgtcgagtcgccatccaacccgctggccgagctggtggatatcgccgcgctggccgagatcgcccacgacaagggtgcgctgctggcggtggacaactgcttctgcacgccggccctgcaacagccgctgaagctcggtgcggacgtggtgatccactccgcgaccaagtacatcgacggccagggccggggcatgggcggggtggttgccggtcgcggcgagcagatgaaggaagtggtcggctttctccgcaccgccggaccgaccctcagcccgttcaacgcctggctgttcctcaagggcctggaaaccctgcgtatccgcatgcaggcgcacagcgccagtgccctggccctggccgaatggctggagcaccagccgggcatcgagcgggtctactacacgggcctgcagagccatcctcagcatgagttggcccggcgccagcagagtggcttcggcgcggtcgtcagcttcgacgtgaagggcgggcgcgatgccgcctggcgcttcatcgacgccacccggatggtctcgatcaccaccaacctgggcgacaccaagaccaccatcgcccacccggcgaccacctcccacggtcggctgtcccccgaggaccgcgcgcgcgccgggatcggcgacagcctgatccgggtcgcggtcggcctggaagacctcgacgacctcaaggccgacatggcccgggggctggccgcgctgtga

SEQ ID NO: 13875 - protein, 403 aa, Pseudomonas aeruginosa UCBPP-PA14
MTQDWDAGRLDSDLEGAAFDTLAVRAGQRRTPEGEHGEALFTTSSYVFRTAADAAARFAGEVPGNVYSRYTNPTVRTFEERIAALEGAEQAVATASGMSAILALVMSLCSSGDHVLVSRSVFGSTISLFDKYFKRFGIQVDYPPLSDLAAWEAACKPNTKLFFVESPSNPLAELVDIAALAEIAHDKGALLAVDNCFCTPALQQPLKLGADVVIHSATKYIDGQGRGMGGVVAGRGEQMKEVVGFLRTAGPTLSPFNAWLFLKGLETLRIRMQAHSASALALAEWLEHQPGIERVYYTGLQSHPQHELARRQQSGFGAVVSFDVKGGRDAAWRFIDATRMVSITTNLGDTKTTIAHPATTSHGRLSPEDRARAGIGDSLIRVAVGLEDLDDLKADMARGLAAL

SEQ ID NO: 13876 - DNA, 1140 bp, Oenococcus oeni PSU-1
  CDS (1)..(1140): transl_table=11
atgaaattcaatacaaaacttattcatggcggtattagcgaagattcatcaaccggggcagtttcaatccctatctatcgttcttcgacttttcatcaaaacaaggtcgctggaaatgcaaagtgggaatacgggcgcagtggaaatccaacccgtgcggctttggaaaaactgattgccgatttagaagaagggaaagccggttttgcttttgcctccggttcggcggcgattcatgcggttttttcattgttctcttccggtgatcacattgttgttggcgatgatgtttacggaggtactttccgtttgatagatcaggtgttaaaacgcttcggtttggaatttactgttgttgatacccgagatctgtccgcggttgaaaatgccatacaaaaaaatacccgggcaatttatttggaaacgccgaccaatcccttattgagaatcaccgatattaaaaaaattgccgagatttcaaaacactaccaacttcacacaattgtcgataatacctttgcgaccccttataatcaaaatccgttggttttgggagcggatattgttgttcatagcgcaacgaaatatttggctgggcacagtgatcttgtggccggtctggcagtgaccaacgatcctgaagttgccgacaaattagcttttcttcaaaactcgattggtagtgttttaggtcctgatgatagttggttattgcagcgggggattaaaactttagctgccagaatggaaattcatcataaaaatactcagcttatttatgattatttttctcgcaatgacaaggtcgcgcggatatattatcctggtgatcctgcttctcaaggatatgaaattgcaaaacgacaaatgtgtggttttggcggcatcatatcctttgaactggaaaaaggcttggacccgaagaaatttgttgagagtctgcggatcattgatttagcggaaagcttgggcggtgtcgaaagtttgatcgaaattccggccttgatgacacatgcctcgattcctcgagatattcgtttgaagaacggtattaaagacgagctgatccgtctatcggttggtttggaagatggtcaggatttactggacgacttaaaacagtcattcagcaagatttag

SEQ ID NO: 13877 - protein, 379 aa, Oenococcus oeni PSU-1
MKFNTKLIHGGISEDSSTGAVSIPIYRSSTFHQNKVAGNAKWEYGRSGNPTRAALEKLIADLEEGKAGFAFASGSAAIHAVFSLFSSGDHIVVGDDVYGGTFRLIDQVLKRFGLEFTVVDTRDLSAVENAIQKNTRAIYLETPTNPLLRITDIKKIAEISKHYQLHTIVDNTFATPYNQNPLVLGADIVVHSATKYLAGHSDLVAGLAVTNDPEVADKLAFLQNSIGSVLGPDDSWLLQRGIKTLAARMEIHHKNTQLIYDYFSRNDKVARIYYPGDPASQGYEIAKRQMCGFGGIISFELEKGLDPKKFVESLRIIDLAESLGGVESLIEIPALMTHASIPRDIRLKNGIKDELIRLSVGLEDGQDLLDDLKQSFSKI

SEQ ID NO: 13878 - DNA, 1140 bp, Leuconostoc mesenteroides subsp. mesenteroides ATCC 8293
  CDS (1)..(1140): transl_table=11
atgaaatttgatacacaacttattcatggtggcattagtgttgaccaatcaactggcgccgtatctgtccctattcatatggcttcaacctttaagcaaactaaaattggcgaggcaaaatatgaatattcaagatctggcaacccaacccgtgaagccgtagaaagcttaattgcagacttagaaaatggtactgctggctttgcttttgcatcaggatctgcggcgataagtactattttttcactattttcatctggggatcacattattgttggaaacgatgtttatggtggtacatttaggctaattgacaatgtcctaaaaagaacaggtcagacatttacaattgtcgatacccgtgatttatctgctattcaggaagctattcaagataatactgtcgccatttaccttgaaacaccaactaatcctctattacgcattagtgatatcaaggcaatttccgaacttgctcatcgtcataatttattaagtattgttgacaacacatttgcttctccttatgtacaaaagccaattgacctaggtgtggacattgttgttcacagcgcttcaaagtacttaggtggtcatagcgacctcattgccggcttagttgttactaaaggtgagaaacttagtgagaaaattaagttcttacaaaatgcgattggtgcaatcttggcccctcaggaaagttggctcctacaacgaggtatgaaaacgcttggattaagaatgcgtgctcaccagtcaaatgcgcaaacaatatttgattaccttaaaacacaagataaagttggtaaaatatatttccctggtgatcctgataatcctgaccatgctttagccaagcaacagatgaatggttttggtgccatgatttcatttgagctaaaggctgggctggatccagaacaattcattagtaacttaaaaatcgttaccttagcagagagtttaggtgcacttgaaagcctaattgaaattccagctaaaatgactcacggcgccattcctcgtaatatccggctatctcatggcattcaagacgaactaatccgtctctctgtgggtgttgaagatattgaagatttaattgaggacctagaacaaggttttaatcaattgaaataa

SEQ ID NO: 13879 - protein, 379 aa, Leuconostoc mesenteroides subsp. mesenteroides ATCC 8293
MKFDTQLIHGGISVDQSTGAVSVPIHMASTFKQTKIGEAKYEYSRSGNPTREAVESLIADLENGTAGFAFASGSAAISTIFSLFSSGDHIIVGNDVYGGTFRLIDNVLKRTGQTFTIVDTRDLSAIQEAIQDNTVAIYLETPTNPLLRISDIKAISELAHRHNLLSIVDNTFASPYVQKPIDLGVDIVVHSASKYLGGHSDLIAGLVVTKGEKLSEKIKFLQNAIGAILAPQESWLLQRGMKTLGLRMRAHQSNAQTIFDYLKTQDKVGKIYFPGDPDNPDHALAKQQMNGFGAMISFELKAGLDPEQFISNLKIVTLAESLGALESLIEIPAKMTHGAIPRNIRLSHGIQDELIRLSVGVEDIEDLIEDLEQGFNQLK

SEQ ID NO: 13880 - DNA, 1125 bp, Solibacter usitatus Ellin6076
  CDS (1)..(1125): transl_table=11
atgaaaatcgagacccgcgccgtccacgccggacgccatatcgaccccgccaccggcgccgtcaccagcccgatccacctttccaccacgttcgagcgcagcgaagccggtgaatatccgcgcggcttcagctactcgcgcgaagacaaccccaaccgccgcgcgctggaggaatgcctcgcggcgctcgagggcggccggcaggcgatctgcttttccagcggccttgcggtagtcacggcgctagtccagggcctggagcctggcgaccacatcgtcgcgccggacgacgtgtattggggactgcgcaaggtgatcggcgaagtcttcggcaagtggggcctggagaccagctacgtggacatgaccaacatcgacgatttccacgccgcgctgcgcgccaatacccggctggtctgggtggaaacgccctcgaatccgctgatgaaggtcaccgacctgactgcgattgtcgcgctcacccggcaggcaagtccgaacatcgtgaccgtctgcgacggcaccttcgcgacgccggtcctgcagcagccgctcgattgcggcatcgacatggtggcgcactccaccacgaagtacctgggcggccacagcgatgtcatcggcggcgcgctgatcacgcggcacgagaattacctgttcgagcgcgcgcgcaaatcgcagcgctacggcggcagcgtgccctcgcccttcgattgctggctgaccatgcgcggcatcgatacgctgccgtggcgggtgcgcgcgcaatcggaaaacgcgatgaaggtggcgcgattcctggcggcccatcatgccgtggaacgggtgcactacccgggcctgcccgatcatcccggacacaaggtcgccgcccgccagatgtcggcattcggagggatgctttcgttccaggtgcgcggcacgcgcgagacggcgctgggtgccgcggccaagtgcaagctcttcatccgcgcgaccagcctcggcggggcgcacagcttaattgaacatcgcgccagcgtggagggtccggatacacgcacgccgcagaatcttctgcgcctctcgatcggcctggagcacgccgacgatctcatcgccgacctcgcgcacgcgctggagtag

SEQ ID NO: 13881 - protein, 374 aa, Solibacter usitatus Ellin6076
MKIETRAVHAGRHIDPATGAVTSPIHLSTTFERSEAGEYPRGFSYSREDNPNRRALEECLAALEGGRQAICFSSGLAVVTALVQGLEPGDHIVAPDDVYWGLRKVIGEVFGKWGLETSYVDMTNIDDFHAALRANTRLVWVETPSNPLMKVTDLTAIVALTRQASPNIVTVCDGTFATPVLQQPLDCGIDMVAHSTTKYLGGHSDVIGGALITRHENYLFERARKSQRYGGSVPSPFDCWLTMRGIDTLPWRVRAQSENAMKVARFLAAHHAVERVHYPGLPDHPGHKVAARQMSAFGGMLSFQVRGTRETALGAAAKCKLFIRATSLGGAHSLIEHRASVEGPDTRTPQNLLRLSIGLEHADDLIADLAHALE

SEQ ID NO: 13882 - DNA, 1200 bp, Magnetococcus sp. MC-1
  CDS (1)..(1200): transl_table=11
atggccacgacaaaggataccaaattgggtttcaccacccgcgccatccaccacggctacgacccctacgctgggcacggttcactaaccccacccatctacatgagttccacctacacgtttgcgaccacagaatcggggcaaaaacgctttgccggtgaagaagagggctacatctacgcccgtgtaggcaaccccaccacggcgcttttggagcaacgtcttgctgaattagagggagccgaggccggattggtgaccgcctcaggcatgggggccaccagcgccctactttggacgctgcttaaacccggtgacgaaattattaccgataaaaccctctacggctgcacctatgccttttttaaccatggtctgcacaaatttggcgtcaccattacccacctggatctcaccgaccccacgcagctggcgcaagccatcagcgccaaaacccgcgtggtcttttttgaatcccctgccaatcccaacatgcgcttggtagatattgccgccatcgccgaaatcgcccaccagcaccatgcactggtggtggtggacaacacctattgcaccccttatttacaaagacctatcgagtttggtgcggattttgtggtacactctgcgacgaaatatctgggggggcatggggatctgctggccggtgcgattcttggccccaaagcggccttaaccgaggtgcgtttttatggcctcaaggatatgaccggggcggtgctctcggcccaagatgcctttttgattctgcgcggtctaaaaactctggcccttcgcatggatcgccactgtgccaatgccctcactttagcgcaattgctcgaagcccatccccaagtgacagcctgttactaccctggtctaccaagctttgcacagtacaccttggcccagcggcagatggcccaaccagggggcatcatagcctttgagctcaaagggggcatggaggcaggccgacgttttctggatgccctacagctgatcacgcgggcggtcagcttgggcgataccgagagtttggcccagcaccccgccagcatgacccactcggtctatcgcccagaagaacgggccgctcatctcattagcgagggcttggtgcgcctctcggctggtttggaagatcctgaggacctcatagccgatgtcacccaggctcttgccgcaatttcatga

SEQ ID NO: 13883 - protein, 399 aa, Magnetococcus sp. MC-1
MATTKDTKLGFTTRAIHHGYDPYAGHGSLTPPIYMSSTYTFATTESGQKRFAGEEEGYIYARVGNPTTALLEQRLAELEGAEAGLVTASGMGATSALLWTLLKPGDEIITDKTLYGCTYAFFNHGLHKFGVTITHLDLTDPTQLAQAISAKTRVVFFESPANPNMRLVDIAAIAEIAHQHHALVVVDNTYCTPYLQRPIEFGADFVVHSATKYLGGHGDLLAGAILGPKAALTEVRFYGLKDMTGAVLSAQDAFLILRGLKTLALRMDRHCANALTLAQLLEAHPQVTACYYPGLPSFAQYTLAQRQMAQPGGIIAFELKGGMEAGRRFLDALQLITRAVSLGDTESLAQHPASMTHSVYRPEERAAHLISEGLVRLSAGLEDPEDLIADVTQALAAIS

SEQ ID NO: 13884 - DNA, 1191 bp, Magnetococcus sp. MC-1
  CDS (1)..(1191): transl_table=11
atggaaaatggtaaaacgcgttatggcaaaaatacccgtgccctgcacgctggcctgcacgccagtgacgcacgggaaaacagtttggccatgcatgtgacctccagctttttcttcaatagcgccggtcaagccgccgctgtgtttggagatgaagaggagggcaatatttatagccgttttagcaaccccacggtagaggcttttgaacagcgcctagccgagttggaagagggcgaagcgtgtgttgccaccgcctcgggcatggcggccatttttggggtgttcatgcagcttttgcagcagggggatcatcttatccttagccgttcggtgtttggctcgaccatcaacgtggccaaaaactatctgaccaaatttggtatccagatagattttgtggggctggccgacatggatgggtggcgccgtgccatccggccaaacaccaaaatgttctatctggaaagccccgccaaccccaccttagagatggcagatttggccgccctcgggcagttggccaaggagcatggcattaaaatggtggtagataatgtcttttgcacgcccattttgcaaaaccccttaaacttgggggcccatttggtggtccattccgcgaccaaatatctggatggtcaggggcgtgtgctcgggggggggatcgtcggcgatgtggagctgattgaaggtcccatgcgtacctatatgcgcaatgccggcccggcactttcgccctttaacgcttgggtgctgtacaaaggattagagaccctggggcttcgggtcgagcgtcactgtgccaatgcgatgcaggtggcccaagcgctgtttgaacgggcggataccacccataaggtgcgctatccagggttagagagccaccctcaacatgggctggcctgccagcagatgcgcggttttggcggcgtgctctgtttggatttggaggatcgggcgcgcgcttacgcctttatggatcggctgcaactggcgaccattacggccaatttgggtgacagtaaaaccttggttacccaccccgcctccaccacccacgcgcgggttccacaaaaagagcgcattgaggctggcattggggagggcttggtgcgtttttccatcggcctagaagatgcccaggatattgttgatgacctgatgcaagctctgccgagtgtggcgtag

SEQ ID NO: 13885 - protein, 396 aa, Magnetococcus sp. MC-1
MENGKTRYGKNTRALHAGLHASDARENSLAMHVTSSFFFNSAGQAAAVFGDEEEGNIYSRFSNPTVEAFEQRLAELEEGEACVATASGMAAIFGVFMQLLQQGDHLILSRSVFGSTINVAKNYLTKFGIQIDFVGLADMDGWRRAIRPNTKMFYLESPANPTLEMADLAALGQLAKEHGIKMVVDNVFCTPILQNPLNLGAHLVVHSATKYLDGQGRVLGGGIVGDVELIEGPMRTYMRNAGPALSPFNAWVLYKGLETLGLRVERHCANAMQVAQALFERADTTHKVRYPGLESHPQHGLACQQMRGFGGVLCLDLEDRARAYAFMDRLQLATITANLGDSKTLVTHPASTTHARVPQKERIEAGIGEGLVRFSIGLEDAQDIVDDLMQALPSVA

SEQ ID NO: 13886 - DNA, 1155 bp, Mycobacterium smegmatis str. MC2 155
  CDS (1)..(1155): transl_table=11
atgagtgaacaccgcaagtggcacggtctggccacgaaagccatccatgccggttaccagcctgacccggcgaccggtgccgtcaacacgccgatctacgccagctcgacgttcgcccaggacggggtcggtgggctccgcggcgggttcgagtacgcccgcaccggcaacccgacgcggcagtccctcgaggccgcgctggccgcggtcgaggaggcccgcttcggccgggcgttcagctcgggcatggccgccaccgactgcgcgctgcgtgcggtgctgcgtccgggcgatcacgtcgtgatccccgacgacgcctacggcggcacgttccggctcatcgacaaggtcttcacgcactggggcatcagccacaccccggccgcgctgagcgacctcgactcggtgcgctcggcgatcacgcccaagacccgcctgatctgggtcgagaccccgaccaacccgctgctgaacgtcgccgacatcgcgggcatagtgcagatcgcgtcgtcgacgggtgtgaaggtgttggtggacaacacgtttgcctcaccggctctgcagcagccgctgctgctgggcgccgacatcgtgctgcactcgaccaccaagtacatcggcggtcactccgacgtcgtcggcggtgcgctgctgaccaacgacgaggaactcgacgccgcgttcgcgttcctgcagaacggcgcgggcggtgtgcccggaccgttcgacgcgtacctgaccatgcgcggactgaagaccctggtgctgcggatgcgtcagcacagcgagaacgccgcgctgatcgcggaattcctcgacgggcatcccgcggtccagaccgtgctgtaccccggtctgcccagccaccccaaccacgacgtcgcggcacggcagatgaccggcttcggcggcatggtgtcggtgcggttgcgtggtggcccacaggccgcgcgtgacttgtgctcgcgcacagagatcttcatcctcgccgagtcgctgggcggggtcgagtcgctgatcgagtacccgggcgcgatgacccacgcgtcgaccgcgggctcgcagctcgaggtgcccgacgacctggtgcggctgtcggtcggcatcgagcactcagcggacctgctggccgacctggagcaggccctgggctga

SEQ ID NO: 13887 - protein, 384 aa, Mycobacterium smegmatis str. MC2 155
MSEHRKWHGLATKAIHAGYQPDPATGAVNTPIYASSTFAQDGVGGLRGGFEYARTGNPTRQSLEAALAAVEEARFGRAFSSGMAATDCALRAVLRPGDHVVIPDDAYGGTFRLIDKVFTHWGISHTPAALSDLDSVRSAITPKTRLIWVETPTNPLLNVADIAGIVQIASSTGVKVLVDNTFASPALQQPLLLGADIVLHSTTKYIGGHSDVVGGALLTNDEELDAAFAFLQNGAGGVPGPFDAYLTMRGLKTLVLRMRQHSENAALIAEFLDGHPAVQTVLYPGLPSHPNHDVAARQMTGFGGMVSVRLRGGPQAARDLCSRTEIFILAESLGGVESLIEYPGAMTHASTAGSQLEVPDDLVRLSVGIEHSADLLADLEQALG

SEQ ID NO: 13888 - DNA, 1164 bp, Nocardioides sp. JS614
  CDS (1)..(1164): transl_table=11
atgagcagccagcagcaccggaccaagtccggcttcgagacgcgtgcgatccacgcggggtacgagcccgacgccgcgaccggagcggtcatcccgccgatctacgcgaccagcaccttcaagcaggacggggtgggcggcctgcgcggcgggtacgagtacagccgctccgccaaccccacccgcaccgcgctcgaggcgaacatcgcggcgttggaggagggggagcgcggcttcgcgttcgcctccggcctggcggccgaggacaccctggtgcgggcgctgtgccgacccggtgaccacgtggtgatccccgacgacgcgtacggcggcaccttccgcctcttcgacaaggtcgagcaggtctggggcctggcgcacagcccagcgccggtctccgacgcagaggcggtcgccgcggcgatccggcccggggagacgcggctcgtctgggtcgagaccccgaccaacccgctgctgaacatcggcgacctcgaggcgctcgccgccgtcgcccacgacgcgggggcgctgctggtcgtggacaacaccttcgcctcgccgtacctccagcagccgctgaccctgggcgcggacgtcgtcgtacactcgaccaccaagtactgcggcgggcactccgacgtcgtcggcggcgccctcgtggtcaaggacctcgacctcgccgagcgggtcggcttccaccagaacgcgatgggcgcggtcgcggggcccttcgacgcctggctgaccctgcgcggcctgaagacgctcgcgctgcgcatggagcggcactgcgacaacgccgagcgggtcgtcgacttcctcaccagccaccccgcggtcggcgacgtgatctaccccggcctggagacccaccccggccacgaggtcgcacagcggcagatgcgccgcttcggcggcatggtgtccttccgcgtgcacggcggggaggagcaggcgctcgcggtgtgcgaccgcaccgagatcttcacgctgggcgagtcgctcggcggcgtcgagtcgctgatcgagcaccccggccggatgacccacgccagcgtcgccggcaccgacctggaggtcccgccggacctggtccggctcagcgtcggcatcgagaccgccgatgacctggtcgccgacctcgagcgcgcgcttggctga

SEQ ID NO: 13889 - protein, 387 aa, Nocardioides sp. JS614
MSSQQHRTKSGFETRAIHAGYEPDAATGAVIPPIYATSTFKQDGVGGLRGGYEYSRSANPTRTALEANIAALEEGERGFAFASGLAAEDTLVRALCRPGDHVVIPDDAYGGTFRLFDKVEQVWGLAHSPAPVSDAEAVAAAIRPGETRLVWVETPTNPLLNIGDLEALAAVAHDAGALLVVDNTFASPYLQQPLTLGADVVVHSTTKYCGGHSDVVGGALVVKDLDLAERVGFHQNAMGAVAGPFDAWLTLRGLKTLALRMERHCDNAERVVDFLTSHPAVGDVIYPGLETHPGHEVAQRQMRRFGGMVSFRVHGGEEQALAVCDRTEIFTLGESLGGVESLIEHPGRMTHASVAGTDLEVPPDLVRLSVGIETADDLVADLERALG

SEQ ID NO: 13890 - DNA, 1290 bp, Azoarcus sp. BH72
  CDS (1)..(1290): transl_table=11
atgcccgatcatcgcttcggcatcgaatccctttgcctgcacgccggccagcagcccgacgccgaaaccggcgcgcgcgcggtgccgatctaccagaccacctccttcgtcttcgattcgcccgagcacgcggccgaactgttcaacctgcagaccttcggcaacgtctattcgcgcatctccaaccccacggtggcggtgttcgaagagcgcatggcggcgctcgaaggcggccgcgccgcgctcgccacctcgtccggcctggccgcgcagatgaccgcgctgctgaccctggcgcaggcgggcgacgaaatcgtcgcggcgcgcacgctgtacggcggcagctattcccagctcgacgtcagcctgcgccggctcggcatcagcacggtgttcgtcgatccgtccgacccggagaacttccgcgccgcgatcaccgaccgcaccaaggcggtgtatggcgagatcatcggcaaccccagcctcaacgtgttcgacgtggccgcggtggcggcgatcacccgggctgctggggtgccgctggtgatcgacagcacgctcgcctcgccctacctgtgccggccgcttgaacacggcgccgacatcgtcatccactcggccaccaagtacatcggcggccacggcaccaccatgggcggcgtgctggtcgaatccggcaccttcccgtgggacaacggccgcttcccgcagatggtcgaaccgtcgccgggctaccacggcgtgcgtttctacgaaaccttcggcaacttcggcttcacgatgaaggcgcgcatggaaaccctgcgcaccttcggccaggcgctgtcgccgttcaacgccttcatgctgctgcaggggctggagacgctgcatgtgcgcatggaccgccatgtcgccaatgcgcgcgcggtggcggacttcctcgccgcccacccggcggtggcgtgggtgaattaccccggcctcgccgccagccccgagcacgcgctggcgcagcgctatttccccaagggcccgggcgccatcctgtccttcggcatccgcggcggccagcccgccggcgagcgcttcatcgaggcgctgcagatgatcagtcacctcgccaacgtcggcgacgccaagaccctggtgatccacccggcctcgaccacccaccgccagctctccgaagaagagcagcgcgccgccggtgtgccgcccgacatggtgcggctgtcggtcggcatcgaaaccctggacgacatcctctgggatctcgaccaggcgctcgcgcgcggagccgcggcgtga

SEQ ID NO: 13891 - protein, 429 aa, Azoarcus sp. BH72
MPDHRFGIESLCLHAGQQPDAETGARAVPIYQTTSFVFDSPEHAAELFNLQTFGNVYSRISNPTVAVFEERMAALEGGRAALATSSGLAAQMTALLTLAQAGDEIVAARTLYGGSYSQLDVSLRRLGISTVFVDPSDPENFRAAITDRTKAVYGEIIGNPSLNVFDVAAVAAITRAAGVPLVIDSTLASPYLCRPLEHGADIVIHSATKYIGGHGTTMGGVLVESGTFPWDNGRFPQMVEPSPGYHGVRFYETFGNFGFTMKARMETLRTFGQALSPFNAFMLLQGLETLHVRMDRHVANARAVADFLAAHPAVAWVNYPGLAASPEHALAQRYFPKGPGAILSFGIRGGQPAGERFIEALQMISHLANVGDAKTLVIHPASTTHRQLSEEEQRAAGVPPDMVRLSVGIETLDDILWDLDQALARGAAA

SEQ ID NO: 13892 - DNA, 1170 bp, Azoarcus sp. BH72
  CDS (1)..(1170): transl_table=11
atggacgaattcgacttcgatacgctggcggtgcgggcgggcatagagcgtagccagttcaacgagcacagcgaggcgctgtacctgacctcgagcttcgtgttcaagagcgcggcgcaggcggcggcccgtttttccggcgaagaagagggcaatgtctacgcccgcttctccaaccccaccgtcaccgcgatgcagacccggctggcagcactggaaggggcggaagcctgcgtggcgaccgcgtccggcatgtcggcgatcctgtcgctggtgatggcgaccttgcaggcgggcgatcacatcgtcgcctccaacggcctgttcggggcaacccagcaactgctgggcggcatcatgagcaagttcggaatcgagaccacgttcgtgccggcgaccgacatcgccgcataccgcgctgcggtccgtccgcgcacgcggttgttcttcatcgaaacgccgtccaacccgctcaccgaggtggtcgacatagcggcggtggctgcggtggcgcacgaagcgggcgcgctgctggcggtggacaactgcttctgtacccccgcgctgcagcggccgctcgcactcggcgcggatgtcgtcgtgcattcggcgaccaagtatctcgacggccagggccgggtgctgggcggcgcggtggccggtgcccgtgcggtgaccgacgaggtgttcaagttcctgcgtaccgcggggccgacgctgtcgccgttcaacgcctgggtgatcctgaagggcctggagacgctgcgcgtgcgcatggaggcgcagtcggccactgcgctcgaactcgcgcgctggctggagcaacagcctggcgtcgcccgtgtttactacccgggcctgccttcgcatcctcagcacgaactggctatgcgccagcagaaaaccggcggcgccatcctcgccttcgacgtggagggcggacgcgacgccgcgtggcgtgtggtggatgcgacgcgcatgatctccatcaccgccaatctgggcgacaccaagaccaccatcacccatcctgctaccaccacccacggccgcgtgtctgccgaagcgcgcaaggcggcgggaattggcgatggtctgttgcgggtggcggtggggctggagtcgatcgaggacctcaaggccgacctcgcacggggtctggcgacctag

SEQ ID NO: 13893 - protein, 389 aa, Azoarcus sp. BH72
MDEFDFDTLAVRAGIERSQFNEHSEALYLTSSFVFKSAAQAAARFSGEEEGNVYARFSNPTVTAMQTRLAALEGAEACVATASGMSAILSLVMATLQAGDHIVASNGLFGATQQLLGGIMSKFGIETTFVPATDIAAYRAAVRPRTRLFFIETPSNPLTEVVDIAAVAAVAHEAGALLAVDNCFCTPALQRPLALGADVVVHSATKYLDGQGRVLGGAVAGARAVTDEVFKFLRTAGPTLSPFNAWVILKGLETLRVRMEAQSATALELARWLEQQPGVARVYYPGLPSHPQHELAMRQQKTGGAILAFDVEGGRDAAWRVVDATRMISITANLGDTKTTITHPATTTHGRVSAEARKAAGIGDGLLRVAVGLESIEDLKADLARGLAT

SEQ ID NO: 13894 - DNA, 1227 bp, Neisseria meningitidis FAM18
  CDS (1)..(1227): transl_table=11
ttgattgtttctatttttcagatagtgataaaatcttcgattattcacatctacataggcagagaccaaatgaaattcgccacgaaagccattcattccagctacgattgcgacgaacacaaccgcgcgctgatgccgccgatttatcaaaacagtatgtttgcgttgcacgagattggcgaaaatgtgccttaccgttattcgcgcctgagcaacccgacccgtcagattttagaagacaccgttgccgatttggaacacggtgcggcaggttttgcgttttccagcggtatggcgggaattgatgccgtatggcgcactttcctgcgcccgggcgataccattgtcgccgtcgccgatatttacggcggcgcgtatgatttattggtcgatgtttatcaaaaatggggggtgaacgttgtttttgccgatttgggcaatctggataatttggacaagctgcttaaagcgcacaaggtcaaactggtttggctggaaacgccgtccaatccgcttttgcgcttggtagacatcaaagcgcttgccgcgaaagccaaagcggccggcgcactggtcggcatcgacaacacctttgccacgccgtatctgcaacagcccttggatatgggttgcgattttgtgttccattccgctaccaaatatttgtgcggccattccgacgtgttgatgggcatcgtcgttgccaaaaccaaagagctggcgcagcctttgcacgatatgatggtgcataccggcgcggttgccggcccgatggactgctggctggtgttgcgcggcatcaaaacactggctctgcgcatgaacgcccattgccaaaacgcactcgaaatcgcgcgccgtttggaagcccatcctgccattgaaaaagtgttccatcccggcctgccgtctcacgaacattatgaactcgcccaagcgcaaatgcctaaaggcatcggcggcgtggtgacggtttatctcaaaaacgacacgcgcgaagcggcaaacagcgtgattaaaaacatgaaactggtcaaaatggcttccagcctcggcggcgtggaaagtttggtcaaccattgctattcccagtcccacagcggcgtgccgcataatgtgaaaatggaaatgggcatcaaagtcggcctgctgcgtttctccatcggcatcgaagacgcggacgatatttggaacgatatttccgccgcactcgatacaactttgtaa

SEQ ID NO: 13895 - protein, 408 aa, Neisseria meningitidis FAM18
MIVSIFQIVIKSSIIHIYIGRDQMKFATKAIHSSYDCDEHNRALMPPIYQNSMFALHEIGENVPYRYSRLSNPTRQILEDTVADLEHGAAGFAFSSGMAGIDAVWRTFLRPGDTIVAVADIYGGAYDLLVDVYQKWGVNVVFADLGNLDNLDKLLKAHKVKLVWLETPSNPLLRLVDIKALAAKAKAAGALVGIDNTFATPYLQQPLDMGCDFVFHSATKYLCGHSDVLMGIVVAKTKELAQPLHDMMVHTGAVAGPMDCWLVLRGIKTLALRMNAHCQNALEIARRLEAHPAIEKVFHPGLPSHEHYELAQAQMPKGIGGVVTVYLKNDTREAANSVIKNMKLVKMASSLGGVESLVNHCYSQSHSGVPHNVKMEMGIKVGLLRFSIGIEDADDIWNDISAALDTTL

SEQ ID NO: 13896 - DNA, 1215 bp, Acidovorax sp. JS42
  CDS (1)..(1215): transl_table=11
gtgaccgatcaaccactgcccgaggggctgcgccccgagaccctcgccgttcgcgaggccgtcgcgcgcagccagtggggcgagcacagcgaggcgctgtacatgaccagcagcttcgtgcagagcgactgcgaaagcgccgcacgccgcttcgccaacgaagagccgggctacacctacacccgcactgccaaccccacggtcagcagtttcgagcgccgcctggcggccatggagggcacggaatgcgcggtggccaccagcaccggcatgtcggccatcctgctgatggcgcttaccgtgctcaagagcggcgaccacgtggtggcctcgcagtccatgttcggctccacgctcaagctgctcgggtcggagctggcgcgcttcggcgtagagacgacctttgtctcgcagaccgacctgcagtcgtgggaggcggccatccgcccgaatacccgcttgctgtttgccgagacaccgaccaacccgctgggcgatctgtgcgacatcgccgcactggcgcagatcgcgcatgcgcgcggcctgctgttggcggtggacaacagcttctgctcgcccgcgctgcagcgcccggcgcaattgggcgctgacctggtggtctactcgggcaccaaactgctggacggccagggccgcgtgatggcgggcgccgtgtgcggcaccaccgcgctggtggacaaggtcatgggcaccttcatgcgcagcgcggggctgaacctgtcgccgttcaatgcatgggtggtgctcaaggggctggagacgctgtcgctgcgcgtgcgcgcgcaaagcgctgcggctttggaactggcgacctggctggccacacatcccaaggtggcgcgcgtgcactattcgggcctggctagtcatccgcagcatgcattggccatgcgccagcagggcggcatgggcgggccggtgctggcgttcgacgtggtgggacaaggcgcggcgcagttgcgcgcgaatgccttccacgtcatcgacagcacgcgcgtgtgctccatcaccgccaatctgggcgacgtgaagaccaccatcacccatccggccagcacctcgcacgggcgcctcacggaagagcagcgccaggcggccggcatcggccaggggctgatccgcgtctccgtaggcctggaacatatcgacgacctgaagaccgacctctgccgaggcctggacaccctgccatga

SEQ ID NO: 13897 - protein, 404 aa, Acidovorax sp. JS42
MTDQPLPEGLRPETLAVREAVARSQWGEHSEALYMTSSFVQSDCESAARRFANEEPGYTYTRTANPTVSSFERRLAAMEGTECAVATSTGMSAILLMALTVLKSGDHVVASQSMFGSTLKLLGSELARFGVETTFVSQTDLQSWEAAIRPNTRLLFAETPTNPLGDLCDIAALAQIAHARGLLLAVDNSFCSPALQRPAQLGADLVVYSGTKLLDGQGRVMAGAVCGTTALVDKVMGTFMRSAGLNLSPFNAWVVLKGLETLSLRVRAQSAAALELATWLATHPKVARVHYSGLASHPQHALAMRQQGGMGGPVLAFDVVGQGAAQLRANAFHVIDSTRVCSITANLGDVKTTITHPASTSHGRLTEEQRQAAGIGQGLIRVSVGLEHIDDLKTDLCRGLDTLP

SEQ ID NO: 13898 - DNA, 1326 bp, Acidovorax sp. JS42
  CDS (1)..(1326): transl_table=11
atgaccgtatccaccccacccggctctggagccgaccgtgccttcggcttcggcacgcgcgccatccacgccggcgcccagcccgaccccgtgaccggcgcgcgcgccacgcccatccaccagaccacgagcttcgtcttcgacgacgccgaacacgccagcagcctgttcaacctgcagaccttcggcaacgtctacagccgcatcagcaaccccacggtcgccgtgttcgaggagcgcatggccagcctggagggcggccgcgcggccctcgcctgcgccagcggcatggctgcgcagatggcggcgctgctggccatcctgaaggccggcgaccacatcgtggccgccagcacgctctatggcggcacggtggagcagctgggcgtgggtttcagccgcctgggcatcgagacgaccttcgtcgacccgtccgaccccgagaacttcacccgcgccatgcgcccgaacacgcgcgccgtgtacggcgagaccatcggcaacccgctggtcaacgtgctcgacatcgcggcgattgcggaggtggcccacgcccacggcgtgccgctggtcatcgacaacaccgtggccagcccctacctgtgcaacccgctggccctgggtgccgacatcgtggtgcacagcgccaccaagtacatcggcggccacggcaccaccatgggcggcgtggtggtggaaggcggcacattcccctgggacaacggccacttccccgagatggtggagcccagccgcgcgtaccacggcgtgaagttctacgagacctttggcgacttcggctacaccatgaaggcgcgcatggaggtcaaccgcaccttcggcggcgtgctctcgcccctcaacgcctggctgctgctgcagggcgccgagacgctgcacctgcgcatgcgcgagcattgccgcaacgcgctggccgtcgcgcggttcctgcagcagcacccgcaggtggcctgggtccactacccgggcctgccggactcgccgtactacgcgctggcgcaaaaacagttccgcacggtggatggcagccccggcgcctcgggcatcctcaccttcggcgtgaagggcggcgccgcggcgggcgagcggttcatcgacgcctgcgagttcctgagccacctggccaacatcggcgacgcgaagacgctggtgatccatcccgcctccaccacgcaccgccagctcaacgaggaggagctggcccgcgccggcgtgcgcgcggacatggtgcgcctgagcgtgggcatcgaggagctggacgacatcctctgggatatcgaccaagccctggcacgcacgcgctga

SEQ ID NO: 13899 - protein, 441 aa, Acidovorax sp. JS42
MTVSTPPGSGADRAFGFGTRAIHAGAQPDPVTGARATPIHQTTSFVFDDAEHASSLFNLQTFGNVYSRISNPTVAVFEERMASLEGGRAALACASGMAAQMAALLAILKAGDHIVAASTLYGGTVEQLGVGFSRLGIETTFVDPSDPENFTRAMRPNTRAVYGETIGNPLVNVLDIAAIAEVAHAHGVPLVIDNTVASPYLCNPLALGADIVVHSATKYIGGHGTTMGGVVVEGGTFPWDNGHFPEMVEPSRAYHGVKFYETFGDFGYTMKARMEVNRTFGGVLSPLNAWLLLQGAETLHLRMREHCRNALAVARFLQQHPQVAWVHYPGLPDSPYYALAQKQFRTVDGSPGASGILTFGVKGGAAAGERFIDACEFLSHLANIGDAKTLVIHPASTTHRQLNEEELARAGVRADMVRLSVGIEELDDILWDIDQALARTR

SEQ ID NO: 13900 - DNA, 1185 bp, Bifidobacterium longum DJO10A
  CDS (1)..(1185): transl_table=11
atgtccgctgaatacaacgccaagttcgccaacaccgacatcgccactcgcgccatccacgccggccaggagcccgacccgactaccggtgcggtcgtcacgccgatcttcgccacctccactttcaagcaggatggcgtgttgggcctcaggggaggccacgactactcccgctccatcaaccccactcgcaccagcttcgacgagcagctcgccgccgtggaaggcggcaagtacgcgctgagcttctcctcgggcttggccgccatcgacgtgctgctgcgctccaccatcaagcccggcgacaacatcctgctcggcaacgatgtgtacggcggcacctaccgcctgctctccaaggtgttcgtgccgtggggtgtgggcctcgacgtggtggacatcaccgatctgaaagccgtggaaaccgcattggcctccaagcactaccagtatgtgtgggtcgagaccccgtccaacccgctgctcaacatcaccgacatcgcggccaccaccgaagtcgcccacaagtacggcaccaaggtcgctgtcgacaacaccttcgcctcgcccgcccttcagcacccgctggccgatggcgccgatgtggtggtctactccaccaccaagtacatcggcggccactccgacgtggtcggcggtgccgtggtggtcaacgatgaggagacccgcgagaaggtcgccttcctgcagaacgccgccggcgcagtgccctccccgttcgactcctggctggacatccgcggcctgaagaccctggatctgcgcgtcaagcgccacagcgccaacgccctgaaggtggccgaatggctcgaatcccagccctctgatgtgattgagcgcgtctggtacccgggcctcgagtcccacccgggtcatgaaatcgccgcccgccagatgcacggcggcttcggcggcatcgtctccgtgcagctcgcggccggcgccgaggcggccaagcacttcgtggaccacacgcagatcttcacactggccgaatcgctcggcggtgtggaaagcctcatcgaggtgcccgccgccatgacccacgcctccgtggccggcaccaccctgcaggtgcccgccaacctggtgcgcatttcggtcggtatcgagaacgccgacgaccttatcgccgatctcaagcaggcgttggatcgtatctga

SEQ ID NO: 13901 - protein, 394 aa, Bifidobacterium longum DJO10A
MSAEYNAKFANTDIATRAIHAGQEPDPTTGAVVTPIFATSTFKQDGVLGLRGGHDYSRSINPTRTSFDEQLAAVEGGKYALSFSSGLAAIDVLLRSTIKPGDNILLGNDVYGGTYRLLSKVFVPWGVGLDVVDITDLKAVETALASKHYQYVWVETPSNPLLNITDIAATTEVAHKYGTKVAVDNTFASPALQHPLADGADVVVYSTTKYIGGHSDVVGGAVVVNDEETREKVAFLQNAAGAVPSPFDSWLDIRGLKTLDLRVKRHSANALKVAEWLESQPSDVIERVWYPGLESHPGHEIAARQMHGGFGGIVSVQLAAGAEAAKHFVDHTQIFTLAESLGGVESLIEVPAAMTHASVAGTTLQVPANLVRISVGIENADDLIADLKQALDRI

SEQ ID NO: 13902 - DNA, 1110 bp, Haemophilus somnus 2336
  CDS (1)..(1110): transl_table=11
atgacacaacaatatgctctagatacattactggctcaggcaggtaatagaacagatgaaagaaccggtgcggtatctacgccgatttttctttccactgcttatgctcatcatggaattggtgaaagtacgggatttgattatacccgcactaaaaatccaacgagaacggtattagaagaaacaattgcaaaattagaaggtggagatcgtggatttgcctgttcttcaggaatggcggctattcaattattgatgaacttatttgcgtcacctgatgaatggattgtttccagcgatgtttatggcggaacttatcgcctattggattttgcacataagaatattcatggtgtcaaacctgtttatgtcaatacagcttcaagtgaagaaattgaaaaggcaatcactgagaatacaaaggcgatttttgttgaaacaccatcgaatccgttaatggaagaatgtgatgtggcagaaattgcgaaaatagctaaaaaatacaatttgctattgattgtagacaatacttttttaactcctgttttatttagaccaatggaacatggtgcagatattgttattcatagtggaacaaaatatattgctggtcataatgacacattagtagggttaattgttgccaaagggcaagagatctgtgaccgcttatattatattcaaaatggtgcaggtcccgtattatcaccttttgattcttggttgaccattcgaggcatgaagacacttgcattgcgaatggaacgtcatcagaaaaatgcacaggaattggcaaactttttaagagaacagccacaagtaaaagatgtgttatatccaaataaaggagggatgctatcttttcgtcttcaaaatgaaaattgggtaaatccttttcttaaagcaatgaagttaattacttttgctgagagtttaggcggtacggaaagtttcattacgtatccggcgacacaaacgcatatggatattcctgaggttgaacgtgttgctcgaggtgtatgcaatcgtttactacggttttctgtaggattggagaatgtagaagatattaaagcggatttattgcaggcattttctcaactaaagtaa

SEQ ID NO: 13903 - protein, 369 aa, Haemophilus somnus 2336
MTQQYALDTLLAQAGNRTDERTGAVSTPIFLSTAYAHHGIGESTGFDYTRTKNPTRTVLEETIAKLEGGDRGFACSSGMAAIQLLMNLFASPDEWIVSSDVYGGTYRLLDFAHKNIHGVKPVYVNTASSEEIEKAITENTKAIFVETPSNPLMEECDVAEIAKIAKKYNLLLIVDNTFLTPVLFRPMEHGADIVIHSGTKYIAGHNDTLVGLIVAKGQEICDRLYYIQNGAGPVLSPFDSWLTIRGMKTLALRMERHQKNAQELANFLREQPQVKDVLYPNKGGMLSFRLQNENWVNPFLKAMKLITFAESLGGTESFITYPATQTHMDIPEVERVARGVCNRLLRFSVGLENVEDIKADLLQAFSQLK

SEQ ID NO: 13904 - DNA, 1143 bp, Actinobacillus pleuropneumoniae serovar 1 str. 4074
  CDS (1)..(1143): transl_table=11
atgaaaatgaccaaatacagtaacattgaaaccacattagtacagttaggcaaccgcaccgaccctagaacgggagcggtagccacaccgattgttttatcgaccgcttatggtcgtggcggtttgggcgaatcgaccggttgggattatattcgtaccaaaaacccgacccgtgccgtgttagagcaaggtattgctgatttagaggggggagatgccggttttgcaatggcatcgggtatggcggcaattcagttagtgatgtcattgtttaaagcgcctgatgagtggattatttcaagtgatgtatatggcggctcttaccgtttattcgatttcagtcataaacaccacaatacagtaaaaccggtttatgtaaataccgcagatttggcggcgattgaagcggcaattaccccaaacactaaagcgatttttgtcgaaacaccgtcaaacccattaatggaagagtgtgatgttgatgcaatttctaaaattgcgaaaaaacataacttaatgttaattgtggataataccttcttaacgccgattttattccgtccgattgaacacggtgcggatatcgtgattcacagtgcaacgaaatacctttccggtcataatgatgtgttagccggtttaatcgttgcgaaagattcggaagcaaccaaaaacgaagcgggtcaaaagctttcggaacgtttattctacttccaaaactgtgctggtgcggtgctttcgccgtttgattcttaccttgcggtgcgtggcttaaaaacccttgcgttacgtatggaacgccaccaatcgaatgctacggaattagcgagattcttaagcgagcaaccggagattgagtgcgtactttattcaggtaagagcggtatgctttcattccgtttacaaaaagaagagtgggtaccgaaattcttaaaagcgattaagttgattacctttgcggaaagtttaggcggtacggaaagttttatcacttatccgtccactcaaacacatatggatattccggaagcggagcgtattgcacgtggtatcaccaataacttactgcgtttctcagttggcttggaacatgttgaagatttaaaagtggatttacgccaagcgttcggacaactaaaataa

SEQ ID NO: 13905 - protein, 380 aa, Actinobacillus pleuropneumoniae serovar 1 str. 4074
MKMTKYSNIETTLVQLGNRTDPRTGAVATPIVLSTAYGRGGLGESTGWDYIRTKNPTRAVLEQGIADLEGGDAGFAMASGMAAIQLVMSLFKAPDEWIISSDVYGGSYRLFDFSHKHHNTVKPVYVNTADLAAIEAAITPNTKAIFVETPSNPLMEECDVDAISKIAKKHNLMLIVDNTFLTPILFRPIEHGADIVIHSATKYLSGHNDVLAGLIVAKDSEATKNEAGQKLSERLFYFQNCAGAVLSPFDSYLAVRGLKTLALRMERHQSNATELARFLSEQPEIECVLYSGKSGMLSFRLQKEEWVPKFLKAIKLITFAESLGGTESFITYPSTQTHMDIPEAERIARGITNNLLRFSVGLEHVEDLKVDLRQAFGQLK

SEQ ID NO: 13906 - DNA, 1773 bp, Magnetospirillum magnetotacticum MS-1
  CDS (1)..(1773): transl_table=11
ttgctgcggcggattcttgccgatacgcggaccatcgccatggtgggggccagcaccaactggaaccgtcccagctacttcgtcatgaagtaccttcagaccaagggatatcgggtgatcccggtcaacccggccgccgccggacaggagatcctgggcgagacggtgcgggccagcctgtcggagatcaccgagccggtggacatggtcgatgtctttcgccgctccgatcaggtggggccggtggctgatgaagccatcgccatgggcgccaaggtgctgtggatgcagttgggggtgcgcaacgacgaggccgccgccaaggccgaggcggcggggcttcaagtggtgatggaccgctgccccaagatcgaatacggccgcctgggcggcgagttggggtggagcggggtcaatacggggctgatccgcaatcaggcgcccgaggcgccgcgcgcccagggccgcaaggaccgccccatgccgccgcgcaatcaaagctatggcttcgagacccgcgccatccatgccggagccgcgcccgatccggccacgggggcgcgcatcacccccatctaccagacctcgtcctatgtgttcgaggacgccgaacaggcggcatcgctgttcaacctgcacactttcggcaacatctattcgcggctgaccaatcccaccgtttcggtgctggaggagcgggtggcgaccctggaaggcgggcgggccgccgtggccgccgcctcgggccatgccgggcagttcctgaccttcttcaccctgctggagccgggtgacgagttcctggcgtcgcgcaatctctatggtggctcgctcacccagttcggcctgaccttccgcaagttgggctggacctgccatttcgtcgatcccaaggacccggacaatttccgtaaggcgatgacgcccaagtgcaaggccatcttcgtggaaagtctggccaatcccggcggcgtggtggtggatctggaagccatcgccgccgtggcgcacgaggccggtattcccctggtggtggacaacaccctggccacgccctatctgtgccgcccgttcgattggggtgcggacatcatctgccattccaccaccaagttcctggccgggcatggcaattcattgggcggcgtggttgtggaatcggggcgtttcgactgggcgcagaacgacaagtttccgtccatgaccaagcccgagcccgcctatcacggcctgaccttctacgagaccttcggcgatttcggcttcaccaccaaggctcgcgccgtggcgctcagagattttggcccggccatggcgcccatgaacgccttcctgaccatcacgggcatcgagaccctgccgctgcgcatggagcgccatgtggagaatgcccgcaaggtggccgaattcctggaaacccatcccaaagtggcctgggtatcctatgccgggctgaaatccagcccctactttgatctggcggccaaatacctgcccaagggcgcaggttcggtcttcaccttcggggtcaagggcggttacgaggcggggatcaagatggtggaaggcgtgcggctgttctcccatctggccaatgtgggcgacacccgctcgctgatcctgcatccggcctcgaccacccaccgccagctcagcgacgaacagcgggtggcggcgggcgccggtcccgacgtgatccgcctgtcggtgggattggaaaccgccgacgacatcatccgcgatctggatcaggccctgtcggccatttcatag

SEQ ID NO: 13907 - protein, 590 aa, Magnetospirillum magnetotacticum MS-1
MLRRILADTRTIAMVGASTNWNRPSYFVMKYLQTKGYRVIPVNPAAAGQEILGETVRASLSEITEPVDMVDVFRRSDQVGPVADEAIAMGAKVLWMQLGVRNDEAAAKAEAAGLQVVMDRCPKIEYGRLGGELGWSGVNTGLIRNQAPEAPRAQGRKDRPMPPRNQSYGFETRAIHAGAAPDPATGARITPIYQTSSYVFEDAEQAASLFNLHTFGNIYSRLTNPTVSVLEERVATLEGGRAAVAAASGHAGQFLTFFTLLEPGDEFLASRNLYGGSLTQFGLTFRKLGWTCHFVDPKDPDNFRKAMTPKCKAIFVESLANPGGVVVDLEAIAAVAHEAGIPLVVDNTLATPYLCRPFDWGADIICHSTTKFLAGHGNSLGGVVVESGRFDWAQNDKFPSMTKPEPAYHGLTFYETFGDFGFTTKARAVALRDFGPAMAPMNAFLTITGIETLPLRMERHVENARKVAEFLETHPKVAWVSYAGLKSSPYFDLAAKYLPKGAGSVFTFGVKGGYEAGIKMVEGVRLFSHLANVGDTRSLILHPASTTHRQLSDEQRVAAGAGPDVIRLSVGLETADDIIRDLDQALSAIS

SEQ ID NO: 13908 - DNA, 1173 bp, Listeria monocytogenes str. 4b H7858
  CDS (1)..(1173): transl_table=11
gtggctaatgaatatgcgcaagatacggctgtgattaaagcgagcctcgggattgataaagagacaggtgcgcttaatacgccaattcatttatcgtctactttccatcagcatgactttgataattatcacgcttatgattatgcgagaagtgggaacccaacgagagaaaaagtggaacaagcgattgcggaactggaaggtggtacgaatggttttgcctttgctagtgggatggcggctgtttctgcagcgctctttactctttctaagggagaccattttatcattgcgaaagatgtgtacggcgggacgtttcgttttgtggagcaagtgttgccgcgttttgggattacgcatacttttgttgatacgacaaatattgacgaagttgcgaaggcatttcaagcgaatacgaaactggtttacttggaaacaccttctaatccgttgctgcatgtgacagatattcggactgttgcaaaacttgcgaaagcgaatgggtgttatacgtttgttgataatacatttttgacgccgttaattcaaaaaccgttagaattaggtgcagacttggttattcatagtgcgacgaaatttcttggagggcatagtgatattttggcggggctaattgtcaccaataatcctaatctggctgaagcagtgtactttttgcaaaattcgactggtggggttcttggagtgcaggattcgtggttgttattgcgcggactaaaaacactttctgtgcggatgaaggctgggacggaaacagcggagaaaattgcgctatttttaaatgcggagccagatgtggtggcagtgcattatccggggttaccttctcatgcgggttatgacattcaagtggaacaggcgacaagtggcggggccgttttatcgtttgatttaggcagtgaggaagctgtgcgagaactagtaacacatttggaattgccggtattttctgtgagtttgggcgcggtggagagtattctttcttacccggctaaaatgtctcatgcggctgttccggaagaggagcgtttggcgcaaggaattacgccaggattattacgtttttcagctggactagaagatgccgatgacttgattgctgatttaaaacaagcactttctttcattaagaagggaagtgttgcgaaatga

SEQ ID NO: 13909 - protein, 390 aa, Listeria monocytogenes str. 4b H7858
MANEYAQDTAVIKASLGIDKETGALNTPIHLSSTFHQHDFDNYHAYDYARSGNPTREKVEQAIAELEGGTNGFAFASGMAAVSAALFTLSKGDHFIIAKDVYGGTFRFVEQVLPRFGITHTFVDTTNIDEVAKAFQANTKLVYLETPSNPLLHVTDIRTVAKLAKANGCYTFVDNTFLTPLIQKPLELGADLVIHSATKFLGGHSDILAGLIVTNNPNLAEAVYFLQNSTGGVLGVQDSWLLLRGLKTLSVRMKAGTETAEKIALFLNAEPDVVAVHYPGLPSHAGYDIQVEQATSGGAVLSFDLGSEEAVRELVTHLELPVFSVSLGAVESILSYPAKMSHAAVPEEERLAQGITPGLLRFSAGLEDADDLIADLKQALSFIKKGSVAK

SEQ ID NO: 13910 - DNA, 1173 bp, Listeria monocytogenes str. 1/2a F6854
  CDS (1)..(1173): transl_table=11
gtggctaaagaatacgcgcaagatacggctgtaattaaagcgagcctcgggattgataaagaaacaggtgcgcttaatacgccgattcatttatcttctactttccatcaacatgattttgataactaccatgcttatgattatgcaagaagtggaaacccaaccagggaaaaagtggaacaggcgattgcagaattggaaggtggtacgaatggttttgcctttgctagtggaatggcggctgtttctgcggtactttttacgctttcaaaaggagatcattttattattgcaaaagatgtgtacggcgggacgtttcgtttggtggaacaagtgttgccgcggtttgggattacgcatacttttgttgatacaacaaatattgacgaggttgctaaggcgtttcaagcaaatacaaaattggtttatttggaaactccttctaatccgctgctacatgtgacggatattcgcacagttgctaaacttgcgaaagcgaatggttgctatacatttgtcgataatacatttttaacgccgctgattcaaaaaccgttagaattaggtgcggacttagttatccatagtgcgacgaaatttcttggtgggcatagtgatattttggcggggctaattgtcacaaataatcctaatcttgctgaagcagtgtactttttgcaaaattcgactggtggggttcttggagtgcaggattcgtggttgttattgcgcggactaaaaacactttctgtgcggatgaaggctgggacggaaacggcggagaaaattgcgctatttttaaatgcggagccagatgtggttgcggtgcattatccggggttaccgtcgcatgctgggtatgacattcaagtggaacaggcgacaagtggcggggctgttttatcgtttgatttaggcagtgaggaagcggtgcgagaactagttacacatttggaattgccagtgttctctgtgagtctaggtgcggtcgagagtattctttcttacccggctaaaatgtctcatgcggctgttccggaagaggaacgtttggcgcaagggattacgccaggattattacgtttttcagctggactagaagatgctgaagacttgattgcagatttaaaacaagcactttcattcattaagaagggaagtgttgcgaagtga

SEQ ID NO: 13911 - protein, 390 aa, Listeria monocytogenes str. 1/2a F6854
MAKEYAQDTAVIKASLGIDKETGALNTPIHLSSTFHQHDFDNYHAYDYARSGNPTREKVEQAIAELEGGTNGFAFASGMAAVSAVLFTLSKGDHFIIAKDVYGGTFRLVEQVLPRFGITHTFVDTTNIDEVAKAFQANTKLVYLETPSNPLLHVTDIRTVAKLAKANGCYTFVDNTFLTPLIQKPLELGADLVIHSATKFLGGHSDILAGLIVTNNPNLAEAVYFLQNSTGGVLGVQDSWLLLRGLKTLSVRMKAGTETAEKIALFLNAEPDVVAVHYPGLPSHAGYDIQVEQATSGGAVLSFDLGSEEAVRELVTHLELPVFSVSLGAVESILSYPAKMSHAAVPEEERLAQGITPGLLRFSAGLEDAEDLIADLKQALSFIKKGSVAK

SEQ ID NO: 13912 - DNA, 1134 bp, Bacillus cereus G9241
  CDS (1)..(1134): transl_table=11
atgagagcaaagacaaagttaattcatggtattcgcataggagaaccttcaactggatctgtaaatgtaccgatttatcaaacgagtacgtacaaacaagaggcagttggtaagcatcaaggatatgaatattcacgtacaggcaacccaacacgtgcagctttagaagaaatgatcgctgtattagaaaacggtcatgctggttttgcatttggttcaggaatggctgccattacagctacaattatgctattctcaaaaggtgaccacgttattttaacagatgatgtgtatggtggaacgtaccgcgtgattacgaaagtattaaatcgcttcggtattgagcatacatttgtagatacaacaaacttagaggaagttgaagaagcgattcgtccaaatacgaaagcgatttatgtagaaacaccaacgaatccattactaaaaattactgatattaaaaaaatatctactcttggtaaagagaaagatttattaacaattattgataacacattcatgacgccatattggcagtcgccgatttctttaggagcagatattgtgcttcatagtgcaacgaaatatttaggaggtcatagtgacgtagttgcaggtttagtagttgtaaatagcccgcaattagcagaagaccttcactttgtacaaaactcaacagggggcattcttggcccacaagatagcttcttactacttcgtggtttaaaaacattaggaattcgaatggaagagcatgaaacgaattcacgcgcaattgctgagtttttaaataatcatccaaaagtgaataaagtatattatccaggtcttgagtcacatcaaaaccatgaattagcaacagaacaagcaaatggatttggtgctattatctcatttgatgtagatagcgaagaaacattaaataaagtacttgagagattacaatactttacactggctgaaagtttaggagcagtagaaagtttaatttctatcccatctcaaatgacacatgcatcaatcccagcagatcgtcgcaaagaactaggaattacagatacattaattcgaatttctgtcggtattgaagacggagaagatttaattgaagatttagcacaagcgttagcataa

SEQ ID NO: 13913 - protein, 377 aa, Bacillus cereus G9241
MRAKTKLIHGIRIGEPSTGSVNVPIYQTSTYKQEAVGKHQGYEYSRTGNPTRAALEEMIAVLENGHAGFAFGSGMAAITATIMLFSKGDHVILTDDVYGGTYRVITKVLNRFGIEHTFVDTTNLEEVEEAIRPNTKAIYVETPTNPLLKITDIKKISTLGKEKDLLTIIDNTFMTPYWQSPISLGADIVLHSATKYLGGHSDVVAGLVVVNSPQLAEDLHFVQNSTGGILGPQDSFLLLRGLKTLGIRMEEHETNSRAIAEFLNNHPKVNKVYYPGLESHQNHELATEQANGFGAIISFDVDSEETLNKVLERLQYFTLAESLGAVESLISIPSQMTHASIPADRRKELGITDTLIRISVGIEDGEDLIEDLAQALA

SEQ ID NO: 13914 - DNA, 1134 bp, Bacillus anthracis str. A2012
  CDS (1)..(1134): transl_table=11
  misc_feature (1099)..(1099): k is g or t
atgagagcaaagacaaagttaattcatggtattcgcataggagaaccttcaactggatctgtaaatgtaccgatttatcaaacgagtacgtacaaacaagaagcagttggtaagcatcaaggatatgaatattcacgtacaggaaacccaacacgtgcagctttagaagaaatgattgctgtattagaaaacggtcatgctggttttgcatttggctcaggaatggcggctattacagctacgattatgttgttctcaaaaggtgaccacgttattttaacagatgatgtgtatggtggaacgtaccgcgtgattacgaaagtattaaaccgcttcggtattgagcatacatttgtagatacaacaaacttagaggaagtcgaagaagcgattcgtccaaatacgaaagcaatttatgtagaaacaccaacgaatccattactaaaaattactgatattaaaaaaatatctactcttgctaaagagaaaggtttattaacaattattgataacacattcatgacgccatattggcagtcgccgatctctttaggagcagatattgtacttcatagtgcaacgaaatatttaggaggtcatagtgacgtagttgcaggtttagtagttgtaaatagcccgcaattagcagaagaccttcactttgtacaaaactcaacaggaggtattcttggcccgcaagatagcttcttactacttcgtggtttaaaaacattaggaattcgaatggaagagcatgaaacgaattcacgcgcaattgctgagtttttaaataatcatccaaaagtaaataaagtatattacccaggtcttgcatcacatcaaaaccatgaattagcaacagaacaagcaaatggatttggtgctattatctcatttgatgtagatagcgaagaaacattaaataaagtacttgagagattacaatactttacactagcggaaagtttaggagcagtagaaagtttaatttctatcccatctcaaatgacacatgcatcaatcccagcagatcgtcgcaaagaactaggaattacagatacattaattcgaatttctgtcggtattgaagacggagaakatttaattgaagatttagcacaagcgttagcatag

SEQ ID NO: 13915 - protein, 377 aa, Bacillus anthracis str. A2012
  misc_feature (367)..(367): The Xaa at location 367 stands for Asp, or Tyr.
MRAKTKLIHGIRIGEPSTGSVNVPIYQTSTYKQEAVGKHQGYEYSRTGNPTRAALEEMIAVLENGHAGFAFGSGMAAITATIMLFSKGDHVILTDDVYGGTYRVITKVLNRFGIEHTFVDTTNLEEVEEAIRPNTKAIYVETPTNPLLKITDIKKISTLAKEKGLLTIIDNTFMTPYWQSPISLGADIVLHSATKYLGGHSDVVAGLVVVNSPQLAEDLHFVQNSTGGILGPQDSFLLLRGLKTLGIRMEEHETNSRAIAEFLNNHPKVNKVYYPGLASHQNHELATEQANGFGAIISFDVDSEETLNKVLERLQYFTLAESLGAVESLISIPSQMTHASIPADRRKELGITDTLIRISVGIEDGEXLIEDLAQALA

SEQ ID NO: 13916 - DNA, 1167 bp, Exiguobacterium sibiricum 255-15
  CDS (1)..(1167): transl_table=11
atgcgtaaaaagacagcattgattcatggaggaacaggcgtcgatcgagcaacaggtgccgttacacccccgatttatcaaacaagcacatacaaacaggaaaaaatcggtcagttaaaagaaggatatgagtattcccggacagcgaacccgacacggacgagcatcgaacgtctgattgccgatcttgaaggcggtgcacgcggttttgccttcggatcagggatggcagcgattcacgctgtctttaacctgctcgaatcaggcgaccacatcgtcatgacagatgacgtctacggcgggacattccgtttgatgcagcgtgtcttaccgaagttcaacatccaagtgacgttcgtcgatacgacggatctcgcggcgacggaagctgcggtgcaagacaacacgaagatgctgtatgtcgaaacaccgacgaacccattgttgaaagttacagatatcgcagcagttgctgagatcgcgaaacgcaacaacttgaaactcgtcgtcgataacacattcgcgacaccgtacttgcaacaaccactcgctctcggcgcagatatcgtcttgcacagcgcgacaaaatacatcggcggtcattcggacgtcgtcgccggacttgtcgttgtcaacagcgacgagctcggagaagatcttcacttcatccaaaactcgaccggcggtattcttggaccgcaggacagcttcctgctcgtccgtggattacggacacttggtatccggatggatgcaatcgaagaaacatcacacgatctcgttcacttcttacaggaacaggacgtcgtttcaaacatcttctatccgggacttccaacacatccgggtcacgcgacacaacagaaacaggcgaccggtttcggcggaatgatcagttttgatgtcggttcagcagaaaatgcggagaaactcgtcgaagcgacacatttcttcacattggctgaaagtcttggagcggtcgagagtttgatttccgttccggcacggatgacgcatgcgtcgattccagcagagcgtcgcgcagaactcggaattacagatggtctcgttcggatctcggtcggtcttgaggacgcggaagacttgaaagaagatttggcacgtgctttcagtctgcttcaaccggtttcagaaaaaactgtttga

SEQ ID NO: 13917 - protein, 388 aa, Exiguobacterium sibiricum 255-15
MRKKTALIHGGTGVDRATGAVTPPIYQTSTYKQEKIGQLKEGYEYSRTANPTRTSIERLIADLEGGARGFAFGSGMAAIHAVFNLLESGDHIVMTDDVYGGTFRLMQRVLPKFNIQVTFVDTTDLAATEAAVQDNTKMLYVETPTNPLLKVTDIAAVAEIAKRNNLKLVVDNTFATPYLQQPLALGADIVLHSATKYIGGHSDVVAGLVVVNSDELGEDLHFIQNSTGGILGPQDSFLLVRGLRTLGIRMDAIEETSHDLVHFLQEQDVVSNIFYPGLPTHPGHATQQKQATGFGGMISFDVGSAENAEKLVEATHFFTLAESLGAVESLISVPARMTHASIPAERRAELGITDGLVRISVGLEDAEDLKEDLARAFSLLQPVSEKTV

SEQ ID NO: 13918 - DNA, 1293 bp, Prosthecochloris aestuarii DSM 271
  CDS (1)..(1293): transl_table=11
atgtcgaaaagtacccctccataccgtttcgaaacacttcaggttcatgccggacaggaacccgatcccgtaacccgttcaagggccgtaccgatctatcagaccacctcgtatgtttttgacagcgctgagcacggggctgatctttttgcgctgaaggagttcggtaacatctatacgcgccttatgaatccgacaaccgatgttcttgagaagcgacttgctgcgcttgaagggggaaaggcggctctggcggtagcgagcggtcattccgcacagtttattgcgcttggcaatatctgcagctccggagactcgatcgtctcctctccttttctctatggtggctcttataatcagttcaaagtctcatttcagcgactcgggatcaatgtcagattcagtgcggatctcaatcctgacaacattcgtgcatgcattgatgagaccaccagggcgatctatcttgagtcaattggtaatccggctttccatgtgccggattttgaggctattgcagcaattgctcacgaattcgccatacccctcattgtcgacaatacgttcggatgtggcggctatctctgccgtcctctggaccatggtgccgatatcgttgttgcttcggctactaaatggatcggcggccatggcacatcgatgggcggcattattgttgatgcagggcgttttgactggggttccggaaaatttgctgaattcagcgaaccatcgccggggtatcacggtctgaaatttcatgaaacgtttggtgaactcgccttcataattcgttgcagagtcgaaggcctcagggattttgggcctgccataagcccgtttaattcgtttttgctcttgcagggtcttgaaaccctctcgctcagggtccagcgccatgccgacaatacgatggctcttgcacggtggctcgttgagcatcctgctgttgcgtgggtgaattatcctggtctcagcaatcatccgacctatgatgctgcatcgagatacctccgcaatggttatggttgcgttctggccttcgggttgaatgcaggctatgatggagcggttcgttttatcgatagcgtccgcctggcgagccatcttgccaatgtaggcgatgctaaaacgctggtcattcatccggcctctaccactcatcagcagttgtcggctgacgaacagctgtcagcaggggtgaagcgcgacatgatcagggtatcggtcggtattgagcatattgacgatattcgggaggattttgagcaggcattttcaaaactgcagtaa

SEQ ID NO: 13919 - protein, 430 aa, Prosthecochloris aestuarii DSM 271
MSKSTPPYRFETLQVHAGQEPDPVTRSRAVPIYQTTSYVFDSAEHGADLFALKEFGNIYTRLMNPTTDVLEKRLAALEGGKAALAVASGHSAQFIALGNICSSGDSIVSSPFLYGGSYNQFKVSFQRLGINVRFSADLNPDNIRACIDETTRAIYLESIGNPAFHVPDFEAIAAIAHEFAIPLIVDNTFGCGGYLCRPLDHGADIVVASATKWIGGHGTSMGGIIVDAGRFDWGSGKFAEFSEPSPGYHGLKFHETFGELAFIIRCRVEGLRDFGPAISPFNSFLLLQGLETLSLRVQRHADNTMALARWLVEHPAVAWVNYPGLSNHPTYDAASRYLRNGYGCVLAFGLNAGYDGAVRFIDSVRLASHLANVGDAKTLVIHPASTTHQQLSADEQLSAGVKRDMIRVSVGIEHIDDIREDFEQAFSKLQ

SEQ ID NO: 13920 - DNA, 1218 bp, Xylella fastidiosa Ann-1
  CDS (1)..(1218): transl_table=11
atgagcattcatgatgtgcacgaaggcacgtgtcacgtgaccacttccgcggtgcgtgctgggatcgattccgacactgctcatggggcagtgacgccaccgattgtgctttcatccaacttctcgtttgaacgtttcggtcataagcgtaagtacgattacacacgtagtgctaatccaacgcgggatctgctcggcgaggcgcttgcggagttggagggtggtgccggtggtgtggtcacggcgactgggatcgctgcgattacgttggtgttgcacgcattgctccggccgggggatcgtttggttgtgccacatgatgcttacggtggcagttggcgtttgttcaatgcgttggctcaaaagggacattttgaattgatcacggtcgatttgacggatgcacgatcactggttgaggcattggcactaccaccgaagttggtattgatcgaaactccttccaatccattgttacgtattactgatttgggtgcggtgattgaggcagcgcaccgtgtcggtgctttgactgtggtcgacaatacgtttatgtctccggtgttgcagcgtcctttagagttcggcgctgacttggtattgcattcgacaacgaagtacatcaatggccacagtgatgttgtcggtggcgttgttgtggcacgtgatgttgcgcactatcagcagttggtgtggtgggcgaatgcgctgggtctgaccggctcgccattcgatgcgttcttgacgttgcggggggtgcgcacgctggatgcgcgtttgcgtgtgcatcaggagaatgcgcagatgattgcagcgttactggaggggcatggtgtggtgaagcacgtgcattacccggggttggcttcgcatccggggcatgtgctggcggggcggcagcaaaaagggttcggtgccatgctcagtttcgagttgcagggtggggaagaggcggtgcgggcttttgtcagtggcttgcgttatttcacgctggctgagtcgctgggtggggttgagagtttgatcgctcatccggcttcgatgacgcatgctgccatgacgcccgaggcgcgtgctaaagcgggtatctctgatgggttgttgcgcttgtcggtggggattgaggccggtgaggatttgatcgttgatctggtggctggtttgcggcgtgctcaggcggtgtgtgatggagcggcgcgggaagagtgcaacgtgtga

SEQ ID NO: 13921 - protein, 405 aa, Xylella fastidiosa Ann-1
MSIHDVHEGTCHVTTSAVRAGIDSDTAHGAVTPPIVLSSNFSFERFGHKRKYDYTRSANPTRDLLGEALAELEGGAGGVVTATGIAAITLVLHALLRPGDRLVVPHDAYGGSWRLFNALAQKGHFELITVDLTDARSLVEALALPPKLVLIETPSNPLLRITDLGAVIEAAHRVGALTVVDNTFMSPVLQRPLEFGADLVLHSTTKYINGHSDVVGGVVVARDVAHYQQLVWWANALGLTGSPFDAFLTLRGVRTLDARLRVHQENAQMIAALLEGHGVVKHVHYPGLASHPGHVLAGRQQKGFGAMLSFELQGGEEAVRAFVSGLRYFTLAESLGGVESLIAHPASMTHAAMTPEARAKAGISDGLLRLSVGIEAGEDLIVDLVAGLRRAQAVCDGAAREECNV

SEQ ID NO: 13922 - DNA, 1092 bp, Streptococcus suis 89/1591
  CDS (1)..(1092): transl_table=11
atgacagattataagattgatacgattttagcgcatacgggcatcaatagcgatgagagaacaggtgccttgatttcccctatccacctttcgacgacctatcaacaccctgagtttggtcaatcgacaggttatgactacacgagaacaaaaaatccgacacgtgccagtctagagacgactttggcagctattgaaaaggccgactatgccctagcaacgagctcgggaatggctgctctggtcttactttttaatggttttcctgtagggagtcaagtggtagcggcgcgtgatttgtacggtggttccttccgctggttcaatgagcaagagagtatcggtagatttcaatttacctatgcaaacaccgaggaggagctgattgcagccatcaccgaagagacagactatgtttatctggagacaccgactaacccactcatggtggagtttgacatcgctaaggtttcggctatcgcccatgccaaaggtgctaaggtgattgtcgataacactttttacagccctatttatcaaaatccacttgttctaggagcggacgttgtcctacattcagcaaccaagtacctatctgggcataatgatgtactagctggcgctttgatgaccaatgatcaagacctatatgataagctcttttatgaccaaaatacatcgggtccaaccctatctccactggattcttacttactcatgcgtggactcaaaaccctctcgcttcgaatggagcggacgacacaaaatgctcagaaaattgttgcctatttggagaagagtccagcagtcaagcaagtttactacacaggaaaaggtgggatgatttcggttaaggtggtagatgaaagtcggattccccatattctcaacaccctgaaagtctttacctttgctgaaagtctgggtggagtagagagtctgattacctatccagccactcagacccacgcagacattcctgctgaaatccgccattcttatggattgacagatgatcttcttcgtttgtcaattggtattgaggatgcggaagacttgattgcagatttaaagacagccttggagggataa

SEQ ID NO: 13923 - protein, 363 aa, Streptococcus suis 89/1591
MTDYKIDTILAHTGINSDERTGALISPIHLSTTYQHPEFGQSTGYDYTRTKNPTRASLETTLAAIEKADYALATSSGMAALVLLFNGFPVGSQVVAARDLYGGSFRWFNEQESIGRFQFTYANTEEELIAAITEETDYVYLETPTNPLMVEFDIAKVSAIAHAKGAKVIVDNTFYSPIYQNPLVLGADVVLHSATKYLSGHNDVLAGALMTNDQDLYDKLFYDQNTSGPTLSPLDSYLLMRGLKTLSLRMERTTQNAQKIVAYLEKSPAVKQVYYTGKGGMISVKVVDESRIPHILNTLKVFTFAESLGGVESLITYPATQTHADIPAEIRHSYGLTDDLLRLSIGIEDAEDLIADLKTALEG

SEQ ID NO: 13924 - DNA, 1143 bp, Croceibacter atlanticus HTCC2559
  CDS (1)..(1143): transl_table=11
atgaaatttaatacaagagcaattcacggaggacaacacgatatagacccagcattcgggtctgtaatgacgcctatttaccagacttctacttataagcagactacacctggcggtcataaagggtatgagtattctagaagcgccaatccaacacgatcctctttagagcaaagtttagcaagtttagaaaacggaaagtatggattagctttcggctctggcttggctgcggtcgatgctgtattaaagttgcttgagcctggcgatgaggttgtaactacaaataatctttatggtggttcttaccgtttgtttacatcgatattccagaagtttggtataaagtttcattttgtagatatggaaaatgctcaagatattgtcgagcatattaatgaccacactaaaatgatttggatagaaacgccaacaaaccctatgatgaatattatagacataaaagcagtttctcaaatctcgtctaaacataaacttattctagctgtggacaatacgtttgcgacaccttaccttcaatcaccattagatttaggcgcagatatagtaatgcattctgttactaaatacattggtggtcatagtgatttggtaatgggagctctaattgtaaatgataaggcactagcagataaactttactttatacaaaactctagtggtgcaatatgtggtccgcaagatgcatttttagctttacgaggcgttaaaactttacacgtaagaatgcaaagacattgtgagaatggaaaagttgtagctcattttctaaaaagtcacccaaaggttgaaaaggtatattggccaggatttcaagagcaccctaaccatattattgcaaaagcacaaatgaaagattttggaggcatggtatctttttcaactaaagaaggatcttgggagtctgcaattcagattttagaaaacttaaaagtatttacattagcagaatctcttggcggtgtagaaagtcttgcgggacatccggcaagtatgacacacgcaagtgtccctaaagaagaccgtttaaatatgggaattgtagattctcttatacgattaagtgtaggtatagaagacgaatcagatttactagcagatcttaagcaagcattaggataa

SEQ ID NO: 13925 - protein, 380 aa, Croceibacter atlanticus HTCC2559
MKFNTRAIHGGQHDIDPAFGSVMTPIYQTSTYKQTTPGGHKGYEYSRSANPTRSSLEQSLASLENGKYGLAFGSGLAAVDAVLKLLEPGDEVVTTNNLYGGSYRLFTSIFQKFGIKFHFVDMENAQDIVEHINDHTKMIWIETPTNPMMNIIDIKAVSQISSKHKLILAVDNTFATPYLQSPLDLGADIVMHSVTKYIGGHSDLVMGALIVNDKALADKLYFIQNSSGAICGPQDAFLALRGVKTLHVRMQRHCENGKVVAHFLKSHPKVEKVYWPGFQEHPNHIIAKAQMKDFGGMVSFSTKEGSWESAIQILENLKVFTLAESLGGVESLAGHPASMTHASVPKEDRLNMGIVDSLIRLSVGIEDESDLLADLKQALG

SEQ ID NO: 13926 - DNA, 1149 bp, Sulfitobacter sp. EE-36
  CDS (1)..(1149): transl_table=11
atgtctgatacgtctcgcttaagccccgctacgattgctgcccaggcagcgggagcggttgatgcgcaaaccggcggggtggtcccggcgctgcctatgtccacgacctatctgcgggatgaaacataccaaccgctgcgtgcagacaacatttatctgcgcgatcagagcgatattgtacgcgttgcagaaaaagtgctctctcaactggagggggcgaaagaatcgctgctgttcccgtcaggcatggcagcgcttgccgccgtcttccgtaccgtcccaaatggcgggcgcgtgctggtgcaaagccagatttactggggcaccaccaagtggattcgggatttctgcacccggcgtgacattgagctgcgagaggtcgaagcctctgacatggcggcgtttgccgccgcctgcgagagctttagaccaaccttggcgctcatcgaaacaccatcaaacccgtggcttcgcgtggtcgatatccaagctgcggctgatgcggtgcatagcgcgggtgggttgcttgtggtggatagcacggccgcgacgccgattctgcaacagccgcttaaacacggtgccgacgttgtaatgcattctgccacaaagggcattaatggacattcggacgtattggcgggcgttctggcgaccaatgacgtcacgggccgcgtgtgggaagatatcaaagcggaccggcatgatgcaggcgcggttatcggcccgtttgaagcatggttgctggtccgcgggatgcgcaccctgcccctgcgcgccaagcaaatgtcgtgcaacgccatggaattggcagaatttttgcaaaatcacccgaagattgaaaaggttctctatccgggtcttgcgtcacatatgggccacgaattggcgacgcggcaaatgtcaggaggatttgggtcgcttttgtcgtgcattgtaaagggtggcggcgcagcggcgctggaggttgttggcaagctggaagttttccatcgcgcaacgtctttgggcggggtcgaaagccttgtcgaacaccgccacacgatcgaaccccacaccgggattcccgaagggttgctgcgtttatcggtggggattgaagatatcgaagatctaaaacgcgacttaagccaagcgcttgatgcataa

SEQ ID NO: 13927 - protein, 382 aa, Sulfitobacter sp. EE-36
MSDTSRLSPATIAAQAAGAVDAQTGGVVPALPMSTTYLRDETYQPLRADNIYLRDQSDIVRVAEKVLSQLEGAKESLLFPSGMAALAAVFRTVPNGGRVLVQSQIYWGTTKWIRDFCTRRDIELREVEASDMAAFAAACESFRPTLALIETPSNPWLRVVDIQAAADAVHSAGGLLVVDSTAATPILQQPLKHGADVVMHSATKGINGHSDVLAGVLATNDVTGRVWEDIKADRHDAGAVIGPFEAWLLVRGMRTLPLRAKQMSCNAMELAEFLQNHPKIEKVLYPGLASHMGHELATRQMSGGFGSLLSCIVKGGGAAALEVVGKLEVFHRATSLGGVESLVEHRHTIEPHTGIPEGLLRLSVGIEDIEDLKRDLSQALDA

SEQ ID NO: 13928 - DNA, 1161 bp, Roseovarius nubinhibens ISM
  CDS (1)..(1161): transl_table=11
atgtccgaccgtcgcaaccgtccgctctcgccctcgaccaagctcgcccaggccctgcgctatctcgaccgcgagaccggcgccatcgtgccgccgatccagcccagcgccacctatgcccgcgacgaagactatgctgtgcggcgcagctacatgtaccgccgcgatggcaatccgaccaccgaacaggccgaggcgatcatcgccgatctcgaaggggcggtggattgcatgctgttttcctccggcatgtcggcctgcatgtcggtgatcgacacgctcaaacccggcgatcacgtggtggtgcccgaggtcatgtatcacggcgtgctgcagcagtttcagcgctacgccaaactgcaccgcctcgaggtgagctattaccgtcccggcgatctcgacgcgctgcgcgatgcctgccgcaagggcaagacccggctggtctgggtcgaaagccccaacaaccccgattgggacgtgaccgacatcgccgccgcggccgaactggcgcatgccgccggggccaagcttctgaccgattgcaccggcacgccgccctgcgccacgcgggcgctcgaactcggcgcggatttctcgttccactcggccacgaaatatctcaacggccattccgacgtgaccgctggggcgctctcggtgcgcaacatggacgcctggtgggaagagatcgaaggccaccgcaagctgcaaggcacggtgctgcagagctttgacgccttcctgctcatccgcggcatgcgcacgctcaccctgcgctatgaacgcgcgacgctcaacgcgctgcgcatcgccacccatttcgaaggccacccgcaggtgcgcaaagtgctctaccccgggctcgaaagccacccggaccacgacatcgccaaacgtcagacccatggcatgtacggcggcatgatgtcgatcatcgtcaagggcgacgaacaggcggccattgatgtcgcccgattctgtcagctcttctaccccgccacctcgctcggcggggtcgagagcctgatcgaacatcgcaagaccgtctcgggcgagggattcaaggtgcatcccgcactcctgcggctgtcgatcgggatcgaggacgccgatgatctcatcgccgatctcgaacaggcgctcgaccgcgctctgggctga

SEQ ID NO: 13929 - protein, 386 aa, Roseovarius nubinhibens ISM
MSDRRNRPLSPSTKLAQALRYLDRETGAIVPPIQPSATYARDEDYAVRRSYMYRRDGNPTTEQAEAIIADLEGAVDCMLFSSGMSACMSVIDTLKPGDHVVVPEVMYHGVLQQFQRYAKLHRLEVSYYRPGDLDALRDACRKGKTRLVWVESPNNPDWDVTDIAAAAELAHAAGAKLLTDCTGTPPCATRALELGADFSFHSATKYLNGHSDVTAGALSVRNMDAWWEEIEGHRKLQGTVLQSFDAFLLIRGMRTLTLRYERATLNALRIATHFEGHPQVRKVLYPGLESHPDHDIAKRQTHGMYGGMMSIIVKGDEQAAIDVARFCQLFYPATSLGGVESLIEHRKTVSGEGFKVHPALLRLSIGIEDADDLIADLEQALDRALG

SEQ ID NO: 13930 - DNA, 1281 bp, Oceanicola batsensis HTCC2597
  CDS (1)..(1281): transl_table=11
ttgacctacggattcgacaccctgcagatccacgcgggcgcccgccccgatccggcgaccggcgcacgccagacgccgatctaccagagcacggcctacgtgttccgtgacgcggaccatgcggcggcgctcttcaacctgcaggaggtcggctacatctattcccgcctgaccaatcccacggtggcggttctgcaggaacgcatcgccacgctcgagggcggccagggcgcggtctgctgttcctcggggcatgcggcgcagatcatggcgctgtttcccctgatggggccgggcaagaacgtcgtcgtctcgacgcggctctacggcgggtcgattacccagttcagccagacgatcaagcgcttcggctggtccgcgaccttcgtggacttcgacgatctcgatgcgatcgaggcggcgatcgacgacgacacccgcgcgatcttttgcgaaagcatcgcgaatccgggcggttacatcaccgacctcgacgcggtggccaaggtggcagagggggcgggactgccgctcattgtcgacaacacctcggctacgccgtatctctgccgtcccatcgaacatggcgcgacgctggtcgtgcactcgatgaccaagtacctcaccggcaacggcaccgtcaccggcggggtggtggtggattccggcaacttcgactggtccgccagcggcaagtttccctcgcttagcgaacccgagcccgcctatcacggcctcaagttccacgagacgttcggccccctcgccttcaccttccacggcatcgcaatcgggctgcgcgacctcggcatgacgctgaacccgcaggccgcgcattacacgttgatggggatcgagacgctgtcgctgcggatggaacgtcactcggccaacgcccgcaaggtcgctgaatggctggaaaaggacccgcgggtggcgcatgtcacctatgccgggctggaaagctcgccctatcacgaccggcttgcgcgaatctgtcccaagggcgccggcggtctcttcaccttcgcgctcaaggacggctacgaggcctgcgtcaagctggtggattcggtcgagatcttcagccatgtcgccaatctcggcgatacgcggtcgctgatcatccattccgcctcgaccacgcaccggcagctgacgccggaacagcaggaagcggcgggggcggcgcccgatgtggtgcgcctctcgatcgggatcgaggatccggacgacctgatcgccgatctggaccaggcgctgagcaaggcgagcggctga

SEQ ID NO: 13931 - protein, 426 aa, Oceanicola batsensis HTCC2597
MTYGFDTLQIHAGARPDPATGARQTPIYQSTAYVFRDADHAAALFNLQEVGYIYSRLTNPTVAVLQERIATLEGGQGAVCCSSGHAAQIMALFPLMGPGKNVVVSTRLYGGSITQFSQTIKRFGWSATFVDFDDLDAIEAAIDDDTRAIFCESIANPGGYITDLDAVAKVAEGAGLPLIVDNTSATPYLCRPIEHGATLVVHSMTKYLTGNGTVTGGVVVDSGNFDWSASGKFPSLSEPEPAYHGLKFHETFGPLAFTFHGIAIGLRDLGMTLNPQAAHYTLMGIETLSLRMERHSANARKVAEWLEKDPRVAHVTYAGLESSPYHDRLARICPKGAGGLFTFALKDGYEACVKLVDSVEIFSHVANLGDTRSLIIHSASTTHRQLTPEQQEAAGAAPDVVRLSIGIEDPDDLIADLDQALSKASG

SEQ ID NO: 13932 - DNA, 1317 bp, Erythrobacter sp. NAP1
  CDS (1)..(1317): transl_table=11
atgactgacgcaattgacgccaccgacacgcccacccctcgccgcaagcccaagccagagcgcaccgagatcgcaggccgcccgctgaagccatccacgctgatgatgggccatggctatgaccctgagctgtcggaaggctcgctcaaggcgccgatcttcctcacctcgaccttcgcattccccagcgccgccgacggcaagcgccacttcgaaggcatcaccggcaagcgcccgggcggcgcggagggcctcgtctattcgcgtttcaatggaccgaaccaggaaatcctcgaggaccggctcgcgatctgggacggcgcggaagatgcgctgacattttccagcggcatgaccgcgatctgcatcctgatgatggcctatgtcagccagggcgacgtgatcgtccactcgggcccgctttacgccgcgtccgaaggcttcgttgcgaaagtgcttgcgaagttcggcgtcacctatgtcgacttccccgcaggcgcgtcgcctgaagaaatcgaggaagtgatagaaaaggcaaagtgccaggctggcgagaatggcggccaggttgcgatgatctacctcgaaagcccgggtaatccgaccaatgcactcgtcgatatcgaagcagtgaaggctgcgcgcgacaaggtgctgggcaagccctgcccgatcgcaatcgacaacacgttccttgggccattgtggcagcgtccgctcgaccacggcgcggatatcgttgcctattcgctgaccaaatatgtcggtggccattccgacctcgtcgcaggctcgattgcgggcgcgaaaaagtggatggacccggtgcgcgcgctgcgcaacacgatgggcggcatcgtcgatccaaacaccgcatggatgctcctgcgcagcctcgagacggtcgaacttcgcatgcagcgtgccggagagaacgcggccaaggtctgcgcattcctcaaagatcaccccaaggtcgaaggcctcggctatctcggcatgatcgaggatgagcgccagcaggacatctacgaccggcattgcctgggtgcaggctcgaccttcagcgttttcctgaaaggcggcgaggcggagtgcttccgcttcctcgacaacctcaccatcgccaagctcgcagtcagccttggcgggaccgagacgcttgcgagccacccggcttcgatgactcacctgtctgtgccgcatgcgcgccgccagatgctcggcatttccgatagcctggtgcgcatcagcatcgggatcgaggacgcagacgacctcatcgccgacttcgaacaggcgcttgagaaagtctga

SEQ ID NO: 13933 - protein, 438 aa, Erythrobacter sp. NAP1
MTDAIDATDTPTPRRKPKPERTEIAGRPLKPSTLMMGHGYDPELSEGSLKAPIFLTSTFAFPSAADGKRHFEGITGKRPGGAEGLVYSRFNGPNQEILEDRLAIWDGAEDALTFSSGMTAICILMMAYVSQGDVIVHSGPLYAASEGFVAKVLAKFGVTYVDFPAGASPEEIEEVIEKAKCQAGENGGQVAMIYLESPGNPTNALVDIEAVKAARDKVLGKPCPIAIDNTFLGPLWQRPLDHGADIVAYSLTKYVGGHSDLVAGSIAGAKKWMDPVRALRNTMGGIVDPNTAWMLLRSLETVELRMQRAGENAAKVCAFLKDHPKVEGLGYLGMIEDERQQDIYDRHCLGAGSTFSVFLKGGEAECFRFLDNLTIAKLAVSLGGTETLASHPASMTHLSVPHARRQMLGISDSLVRISIGIEDADDLIADFEQALEKV

SEQ ID NO: 13934 - DNA, 1146 bp, Synechococcus sp. RS9917
  CDS (1)..(1146): transl_table=11
gtgcagaagccggcgatcgccacccgggccatccatcacggcgacagctacgccgaaggcaccggcacggtgatgccgccgatctacgccacctccacctttgcccacggcaaccctggcggctttgattacacgcgctccggcaaccccaacttccgcatcctcgaggcggtgctggcttcagtggagcagtgtgcccacgccacggtgttcggctccggcgtgagtgcgatcactgcgatcgcctccaccctgcgccaaggcgatctggtgctctgcgaggagaacctctacggctgcaccgtgcgcctgtttgagcaggtgtttgccaagtttggtgtgcgcacggagtgggtggatttcaccgatctctcagctctgacggcgatcgcaacccgtcagcccgccatggtgtggctggagagtcccaccaaccccctgctcaaggtgatcgacctcgctgctgtgggtgccgcagcccaggaggcgggaatcccgctcgtggtcgacaacaccttcgccacggcactggtgcagcgccccctggcgttgggggccaccctctcgctcacgagcaccaccaaatacatcaacggccattccgatgccctcggtggagcggtctgcaccgacgatcccgcctggcatcagaagatggtgttcgcccagaaggccctgggcctgatgccctcgccgtttgattgctggctgattacccgcggcatcaaaaccctgccgctgcgcctgcgccagcaaatggccagcgcggccgccatcgccgaccacctggcggcccatcccgccgtgacctgggtgcgctatccccatcgcgccgaccatccgcagcacgcggtggcccagcgacagatgcagggcggtggcgcgatcgtgaccatcaacatcaacgccagccgcgagcaggcctacgcggtctgcaaggccctgcgctggttcaccatggccgagagcctggggggcgtggagagcctgatctgccaccccgccaccatgacccacgcagctgtgtcggcggacgtgaaggagaagctcggcatcagcgatgggctggtgcgcctgtcggtgggatgcgaagacacagcggatctgatcgacgatcttgatcaggccctcagcctgttgccatga

SEQ ID NO: 13935 - protein, 381 aa, Synechococcus sp. RS9917
MQKPAIATRAIHHGDSYAEGTGTVMPPIYATSTFAHGNPGGFDYTRSGNPNFRILEAVLASVEQCAHATVFGSGVSAITAIASTLRQGDLVLCEENLYGCTVRLFEQVFAKFGVRTEWVDFTDLSALTAIATRQPAMVWLESPTNPLLKVIDLAAVGAAAQEAGIPLVVDNTFATALVQRPLALGATLSLTSTTKYINGHSDALGGAVCTDDPAWHQKMVFAQKALGLMPSPFDCWLITRGIKTLPLRLRQQMASAAAIADHLAAHPAVTWVRYPHRADHPQHAVAQRQMQGGGAIVTININASREQAYAVCKALRWFTMAESLGGVESLICHPATMTHAAVSADVKEKLGISDGLVRLSVGCEDTADLIDDLDQALSLLP

SEQ ID NO: 13936 - DNA, 1158 bp, Synechococcus sp. WH 7805
  CDS (1)..(1158): transl_table=11
gtgcagcatcccgcgaccgcaccggctgatgccacccgtgcaatccatcacggtgaaagcttcgcggatgacaccggcacggtgatgccaccgatttacgccacctccacctttgcccacggcaatgttggtggatttgactacacccgttcaggcaaccccaacttctgcattcttgaaggcgtgttggcttctttggaacggtgtgaccacgccacggtgttcgcctcaggcgtgagtgcgattacggccatcgcctccactctccaacaggaagatctcgtgctgtgcgaggaaaacctttatggctgcaccgtgcgtctgttcgaacaggtgtttgccaaattcggtgtgcgcaccgaatggatcgatttcacaaatccctcggcgctatcagcgatcgcagaacgtcagcccgccatggtctggctggaaagtcccaccaacccgctgctgaaagtgattgatcttgaagcggtctgcagcgcagcccatggagcaaacgtgcctgttgtggtcgacaacaccttcgccaccgccctggtgcagcgccctttgcagctcggtgccacgctctcgctcaccagcaccaccaaatacatcaacggtcactccgacgccctcggcggtgccgtttgcacggattcccccgaatggcacgagcgcatggtgtttgctcagaaagccctgggactgatgccatcgcccttcgattgctggctgatcacccgcggcgtcaaaaccctgcctctgcggctgcgccagcagatcgcgaacgcagctgtgctggccgaccatcttgccgaccatccccaggtggaatggacgcgttatccccaccggtcggaccatccccaacaggctgtcgccctcaggcagatgcaaggcggtggagccatcgtgacgatcggcctggataccagccgagaacaggcctacgcggtatgcaaagcactgcgctggttcaccatggcagaaagtctggggggcgtggagagcctgatctgccatcccgccaccatgactcacgccgctgtgtctcctgaagtgaaacgcaagctgggcatcagcgatggcctgatccgcctgtcagtcggctgtgaagacgtcgccgatctgattgccgatctcgatcaggctctgacgacgttgtcatga

SEQ ID NO: 13937 - protein, 385 aa, Synechococcus sp. WH 7805
MQHPATAPADATRAIHHGESFADDTGTVMPPIYATSTFAHGNVGGFDYTRSGNPNFCILEGVLASLERCDHATVFASGVSAITAIASTLQQEDLVLCEENLYGCTVRLFEQVFAKFGVRTEWIDFTNPSALSAIAERQPAMVWLESPTNPLLKVIDLEAVCSAAHGANVPVVVDNTFATALVQRPLQLGATLSLTSTTKYINGHSDALGGAVCTDSPEWHERMVFAQKALGLMPSPFDCWLITRGVKTLPLRLRQQIANAAVLADHLADHPQVEWTRYPHRSDHPQQAVALRQMQGGGAIVTIGLDTSREQAYAVCKALRWFTMAESLGGVESLICHPATMTHAAVSPEVKRKLGISDGLIRLSVGCEDVADLIADLDQALTTLS

SEQ ID NO: 13938 - DNA, 1191 bp, Pseudoalteromonas tunicata D2
  CDS (1)..(1191): transl_table=11
atgaaaaccactatgcatgaaaatactcattgtattcatggcggaaaatcaagccatgccaatggaccactgagcaccccaatttatcaatcttcgacctttgtttttgaaagtgcagagcaaggagctgcccgatttgccggtgagcaagagggatatatttattctcgcttaggaaatcctactacgcgcgaattagagcagaaaatggccctgttagagcaaatggatgatgcagcggcctgcgccacaggtatgggggctgtttctgctgctgtactaagctttttgcagcaaggtgatcatttaattgcttcaaaagcgatttatggttgtacctttgctttttttgctcacatgttaccaaagtggggaattgaagtgagttttgttgatatgacagatccacaagcccttgaagccgcttataaagcaaatacaaaaatggtgtttgctgaaacgccaatcaatccaaacctcacggtattagatttaaaatacattggtgactttgcgaaaaaacatcagattttatctgtaattgataatacttttctaacacctttgctgcaaaaaccgaagcagtttggcattgatattgtgatccacagtgcaactaaataccttaatggtcatggcgatgttgtggcggggattgtttgcgcaaaccaagagcatattaatttaatcaaactaacagtacttaaagatattggtgcaacgatgagcccacacgatgcatggcttattatccgaggtatgaaaacactggccgttcgcatggagaaacactgtcaaaatgcacaaaaagtcgctgagtttttagaaggtcatccagaagtagagtgcgtttattacccaggattaccttctcaccctggacataaatatatcggcgagcagatgaaggcggctggtggggtgattggttttgaactcaaaggcggtattaaagatggtgttaactttatcaatgccactgagctttgtagtattgctgtaagtctaggtgacgctgaaacgctcattcagcatcccgcttcgatgacacattctccttatacgccagaggagcgtcaagcggcagggatctctgatggtttaattcgtatctcggttggacttgagtttgttgatgatattatcgccgatttgagtcaggcatttaatgtaatgattaaaaagcgttag

SEQ ID NO: 13939 - protein, 396 aa, Pseudoalteromonas tunicata D2
MKTTMHENTHCIHGGKSSHANGPLSTPIYQSSTFVFESAEQGAARFAGEQEGYIYSRLGNPTTRELEQKMALLEQMDDAAACATGMGAVSAAVLSFLQQGDHLIASKAIYGCTFAFFAHMLPKWGIEVSFVDMTDPQALEAAYKANTKMVFAETPINPNLTVLDLKYIGDFAKKHQILSVIDNTFLTPLLQKPKQFGIDIVIHSATKYLNGHGDVVAGIVCANQEHINLIKLTVLKDIGATMSPHDAWLIIRGMKTLAVRMEKHCQNAQKVAEFLEGHPEVECVYYPGLPSHPGHKYIGEQMKAAGGVIGFELKGGIKDGVNFINATELCSIAVSLGDAETLIQHPASMTHSPYTPEERQAAGISDGLIRISVGLEFVDDIIADLSQAFNVMIKKR

SEQ ID NO: 13940 - DNA, 1266 bp, Pseudoalteromonas tunicata D2
  CDS (1)..(1266): transl_table=11
atgaacgataccaaaaaagcgactatcgcagtccgtaaaggaatagaagctgataaacatcacggcgcagtcgtgccacctctatatttatcaacaacttattcttttgccgattttaataccaagcgcgcatatgattatggccgcagtggtaatccaactcgagatatcttagctgaaacattagctgagcttgaaggtggcgcaaaaggtatagttaccgcaacaggcatggctgcggttcatttagtgactcagctgttatcaagccaagacactttagtgatccctcatgattgttatggtggtagttatcgtcttttcactagtttagaaaagcgtggcttattaaaattaaaagttgttaattttactctagataagagttttgatgatattgaacaaattaaacctaagttaatttggattgagacgccaagtaatccgcttttacgtttaactgatattgctaaagttgttgctacagcaaaaaaatgtggtgctttagttgctgcggataacacgtttttatcgccagcattgcaaaatcctattgaatttggtgttgatgttgttgtgcattcaacaactaaatatattaatggacactcggatgttgttggtggtgcggtgattgctcgtactcaagagcttggtgatgagcttgcttggtgggctaataatattggcattaccggcgcaccatttgatagttatttaactttgcgcggtattcgcactttgaatgtccggatcaagcaacatgagcaaaatgcctttttaatcgccgaatatttagagcgtagcccttttgttaaaagtgtttattaccctgggcttgaatctcacccgcaacatcaattagctaaacagcaacagcgtggttttggcggtatggttagttttgatattaaaggtgatatcaacgatgcagctcgttttttaactaattgcaagcacttcaccttggctgagtctttaggtggcgttgaaagcttaatttgccatccagcgactatgactcatgcaggaatggatcctcaggctcgtttagaggctggggtaggtgatactttaattcgtatttcagtgggtattgaggatattgaagatttactcgcagatttagagcgaaacttttctgaaactcgccctggtgaagataagggccagccagtagctgagccaaagccagttaaagcagatgagcaaaataactcttcagccgcattttgttttagccctgctcacgttgcattatggtaa

SEQ ID NO: 13941 - protein, 421 aa, Pseudoalteromonas tunicata D2
MNDTKKATIAVRKGIEADKHHGAVVPPLYLSTTYSFADFNTKRAYDYGRSGNPTRDILAETLAELEGGAKGIVTATGMAAVHLVTQLLSSQDTLVIPHDCYGGSYRLFTSLEKRGLLKLKVVNFTLDKSFDDIEQIKPKLIWIETPSNPLLRLTDIAKVVATAKKCGALVAADNTFLSPALQNPIEFGVDVVVHSTTKYINGHSDVVGGAVIARTQELGDELAWWANNIGITGAPFDSYLTLRGIRTLNVRIKQHEQNAFLIAEYLERSPFVKSVYYPGLESHPQHQLAKQQQRGFGGMVSFDIKGDINDAARFLTNCKHFTLAESLGGVESLICHPATMTHAGMDPQARLEAGVGDTLIRISVGIEDIEDLLADLERNFSETRPGEDKGQPVAEPKPVKADEQNNSSAAFCFSPAHVALW

SEQ ID NO: 13942 - DNA, 1167 bp, Photobacterium sp. SKA34
  CDS (1)..(1167): transl_table=11
atgagtgataagcgactggcgacaattgcagtaagaaccggtattgatgttgactctcaatataatgctgttgttcctcctatttatttaacgtcgacctatagctttccagcttttggcgaagtaccgcaatatgattattctcgttcgggcaacccaacaagaaatacgttagctgacgcgcttagtgagatggaaggcggtgctggtggtgtggtaaccagttgtggtacggctgcgatgaatttattagttacggcattattaggccctgatgatttaattgttgcgccgcatgattgttatggtggtacttatcgattatttaatactcgcgccaataaaggtgactttaaggttgagtttgttgaccaatctgatcaagaagcactggctgccgctttagaaaaaaaaccaaaattaatctgggttgaaacgccgtctaacccattagtgcgtgtgattgatattgcgtctctgtgtcagcaagcaaaagccgtgggttgtctcgttgctgtagataacactttcctatcgccactgttacaacaacctattgtattaggggctgactttgttgttcactcaacaactaagtacctcaatggacactcggatgtggttggtggggtactgatttcaaaagatgccgaaatggcagaaactattgcttggtgggcgaactgtattggtgctactggcgcaccatttgatgcttacctaactctgcgaggtttacgtacattatcaccacgtatgagaatgcatgaagagaatggcgtagcggtactcgattaccttcagcaacaagcgatggtgggtactatttatcatccaagccttccatcacatcccggtcacgagattgccaaacgtcagcaaaaaggctttggctctatgatgagttttgagtttgcgggtgatcaagcccaacttgaagtgtttgtgaaagagttaaaactgttttcactggctgaatcgttaggtggcactgaaagcttaattgctcatccatcaagtatgactcaccgtgctatgtcagatgaagcacaggcagaagcagggatcacaacctcattattacgtctttcagttggtcttgaagaccctcgtgatttaattgaagatattgatcaagcctttaagctcgcagcggaggcccactaa

SEQ ID NO: 13943 - protein, 388 aa, Photobacterium sp. SKA34
MSDKRLATIAVRTGIDVDSQYNAVVPPIYLTSTYSFPAFGEVPQYDYSRSGNPTRNTLADALSEMEGGAGGVVTSCGTAAMNLLVTALLGPDDLIVAPHDCYGGTYRLFNTRANKGDFKVEFVDQSDQEALAAALEKKPKLIWVETPSNPLVRVIDIASLCQQAKAVGCLVAVDNTFLSPLLQQPIVLGADFVVHSTTKYLNGHSDVVGGVLISKDAEMAETIAWWANCIGATGAPFDAYLTLRGLRTLSPRMRMHEENGVAVLDYLQQQAMVGTIYHPSLPSHPGHEIAKRQQKGFGSMMSFEFAGDQAQLEVFVKELKLFSLAESLGGTESLIAHPSSMTHRAMSDEAQAEAGITTSLLRLSVGLEDPRDLIEDIDQAFKLAAEAH

SEQ ID NO: 13944 - DNA, 1221 bp, Oceanospirillum sp. MED92
  CDS (1)..(1221): transl_table=11
atgtccatatccgattacgaacgcgaagcgcgtatccagttcgacccagaagagggttacgggctgtccacgctggctttgcgttctggtcaacaccgttcgcttgaaggcgagcacagtgacccgatctacccaacgtccagttttgtattctccagtgcgcgagaagcagcggcacgtttcggtggagaggaagaggggaatatctattcccgttttaccaaccctaccgtacagttcttcgaagagcgtattgcggcaatggaaggtggtgaacgtgcggttgctaccgcctctggaatggcagcgattctgagtacttgcctgtcactgatgcagaacggcgaccatgtggtatgttcacgcagtgtatttggctctaccgtttctctgtttgataagtacctgacccgtacaggtatcagtgtgacctatgttgacccaacggatctgtctagttgggaagaagccattgttccagaaaccaaaatgctgttcctggagacgccttctaatccattagcggaactgaccgatgttgcggctgtggcagagattgcacataagcacgatgcactgttggtggttgataactgtttctgtacaccggtgctccagcagccgctgaagcagggcgcagatattatcatccattcagcgacaaagtaccttgatggacagggccgttgtgtcggtggtgttgtcgtaggccgtgataaagagctggaagaagtattcggcttcatccgtaccggcggggcctgcatgagcccgtttaatgcctgggtattcctgaaaggtttggaaacacttaagctgcgtatggatgctcactgtaaaaatgcgatggagatggctacctggctggaaaagcaggaaggtatcgatcgtgtctactactctggtctggaaagtcattcccagcatgaactggctaaacagcagcagaatggctttggtggtgtactctcctttgaagtgaagggaggacaggaagctgcatggcgctttattgatgcgacgcagatggtctctatcaccggtaacctgggcgacgtgaaaaccacaatcactcatccagcgactacgactcatggtcgtatgaccccggaagctcgcgctgaagcgggcattaaagacaatctgatccgtttgtcggtaggtatcgaagaactagaagatattaagaaagatatgcagcgcggactggctgcggtctga

SEQ ID NO: 13945 - protein, 406 aa, Oceanospirillum sp. MED92
MSISDYEREARIQFDPEEGYGLSTLALRSGQHRSLEGEHSDPIYPTSSFVFSSAREAAARFGGEEEGNIYSRFTNPTVQFFEERIAAMEGGERAVATASGMAAILSTCLSLMQNGDHVVCSRSVFGSTVSLFDKYLTRTGISVTYVDPTDLSSWEEAIVPETKMLFLETPSNPLAELTDVAAVAEIAHKHDALLVVDNCFCTPVLQQPLKQGADIIIHSATKYLDGQGRCVGGVVVGRDKELEEVFGFIRTGGACMSPFNAWVFLKGLETLKLRMDAHCKNAMEMATWLEKQEGIDRVYYSGLESHSQHELAKQQQNGFGGVLSFEVKGGQEAAWRFIDATQMVSITGNLGDVKTTITHPATTTHGRMTPEARAEAGIKDNLIRLSVGIEELEDIKKDMQRGLAAV

SEQ ID NO: 13946 - DNA, 1161 bp, Flavobacteria bacterium BBFL7
  CDS (1)..(1161): transl_table=11
atggaaaaaaagcaaatgaaatttaatactaaggctattcatggcggtcaggaaaatatagatcccgcatataactctgtaatgccacctatttatcaaactaccacttttaaacaaagtacaccacatggtcataaagggtttgagtactcacgtagtggtaatccaacacgcgatgctttagaaaaatcaatggctagtctagagaacggcgcttatggcattgcatttggttctggtctcgctgctatcgatgctgtacttaaattattgaagtctggtgatgaggtgatatctaccagtgatttatacggcggttcttatcgattatttacacagatttttcaagattttggaattaagtttcattttataggaatggaaaatgctgataatattgaaaagcatattaataaaaatacaaaactcctttgggtagaaacgcctactaatcctatgatgaacattatagatatagaggcaatctcaaaaatctctaataaacatcaactaattctagcagtagataacacatttgccactccttatttacaacagcctttagatttaggtgcagatattgtaatgcatagtgcaactaaatacttaggaggtcatagcgacgttgttatgggttctctagtcctaaataatgaagcgctagcaaagagattatactttatacaaaatgcaagtggtgctgttcctggaccgcaagattgctttttagtattgcgaggcattaaaacgttacatgtaagaatgcagcgtcattgtgaaaatggtaaagctgttgcgcatgcgttacgatcaaatccttatgtggatcaggtttactggccaggttttgaaagtcatcctaatcatgtaattgctaaaaagcaaatgaaggattatggtggtatggtttcctttagtacaaaagctggtactctagaaagtgcagtaaaagtggtcgagagtttaaaggtgtttactttaggagaatcattaggtggtgtggagtctcttgcaggtcatcccgcaagtatgacacatgctagtatacctaaagaagatcgtgaaaaaacaggtgttgtagactcattaatcaggttgagtgttggaattgaagatgttgatgatttaataacagatctagaacaagcattatcagtctaa

SEQ ID NO: 13947 - protein, 386 aa, Flavobacteria bacterium BBFL7
MEKKQMKFNTKAIHGGQENIDPAYNSVMPPIYQTTTFKQSTPHGHKGFEYSRSGNPTRDALEKSMASLENGAYGIAFGSGLAAIDAVLKLLKSGDEVISTSDLYGGSYRLFTQIFQDFGIKFHFIGMENADNIEKHINKNTKLLWVETPTNPMMNIIDIEAISKISNKHQLILAVDNTFATPYLQQPLDLGADIVMHSATKYLGGHSDVVMGSLVLNNEALAKRLYFIQNASGAVPGPQDCFLVLRGIKTLHVRMQRHCENGKAVAHALRSNPYVDQVYWPGFESHPNHVIAKKQMKDYGGMVSFSTKAGTLESAVKVVESLKVFTLGESLGGVESLAGHPASMTHASIPKEDREKTGVVDSLIRLSVGIEDVDDLITDLEQALSV

SEQ ID NO: 13948 - DNA, 1155 bp, Rickettsiella grylli
  CDS (1)..(1155): transl_table=11
atgaaaaaacttgatttttcgacccgctgcatacatgctggacagctccctgatccaagtacaggcgctttaataacgccgatttatgccacttcaacttacgcgcaaaaaagtccgggtgtacatcagggtttcgaatattcgagaacccaaaatcctactcgttttgcctatgaacgggccattgcccatttagaaaatggctgcgcaggatttgcattctcttctggtatggctgcaatcaatacgttactagagctcttaaatcctggtgaccacattatagggacagatgatttatatggtggaacggttcgtttatttaatcaaattaaacaacgatcctccagtttaagtttttcatatattgatatgacggatttaaatcacttaaaccaacacatcaaacctgaaactaaactcatttggatggaatcaccaacaaatcctttattaaaattggttgatattgaacatgtcgtaaaaattgctcgtcagcatcaattaatttccgtacttgacaatacctttgcgacaccttggattcaacaacctttatcgttaggctgtgatctggttgtccattctgccacgaaatatttaaatgggcattccgacatgatagggggcataatcgtcgtcggtgacaatgctgaattaaatgaaaaaataagctatttacaaaatgcgatgggggctatacaaagcccatttgatagtttccttgctctccgaggcttacatactttagcgttgcggatgcaaaagcattgtgaaaatgccctaaaaatcgctgaatttctagaacaacatcaccagatcgaaaaagtcttttaccctggattaattcatcatcctcaacatgcattagctaaaaaacaaatgcataatggcttcggaggaatggtcagttttacgctcaaaggtacgtttaaggaaatacaacgttttcttgaacgttgtcgtctattcacgttagcagaaagtttaggttgcgtagaaagtctcgttagccatcctgctacaatgacacacgccgctttgccattaaaaattcgcgatcgtctgggcattaaagaaaatttgctccgtttgtcggtaggaatagaagggatacatgatcttattaacgatcttgaacgcgcattaagttga

SEQ ID NO: 13949 - protein, 384 aa, Rickettsiella grylli
MKKLDFSTRCIHAGQLPDPSTGALITPIYATSTYAQKSPGVHQGFEYSRTQNPTRFAYERAIAHLENGCAGFAFSSGMAAINTLLELLNPGDHIIGTDDLYGGTVRLFNQIKQRSSSLSFSYIDMTDLNHLNQHIKPETKLIWMESPTNPLLKLVDIEHVVKIARQHQLISVLDNTFATPWIQQPLSLGCDLVVHSATKYLNGHSDMIGGIIVVGDNAELNEKISYLQNAMGAIQSPFDSFLALRGLHTLALRMQKHCENALKIAEFLEQHHQIEKVFYPGLIHHPQHALAKKQMHNGFGGMVSFTLKGTFKEIQRFLERCRLFTLAESLGCVESLVSHPATMTHAALPLKIRDRLGIKENLLRLSVGIEGIHDLINDLERALS

SEQ ID NO: 13950 - DNA, 1203 bp, Oceanobacter sp. RED65
  CDS (1)..(1203): transl_table=11
gtggccgataacaaacgctatgattcacaattagatgaagcgaactttgataccttggctgtacgtgcgggatatcaacgttcgccagagcatgagcatagcgaagccttgtttttaacctcaagctatgtatttggtaacgcgcaagaagcagcggctttttttgcgggtgacgaagacggcaatgtttattcccgctataccaacccaacagtaaagacgtttgagcagcgtttggcagcacttgaaaatgctgaacaatgtgtagccactgctagcggtatgtctgcgattttttcgactatcttggctctgttaaatccaggtgatcatattgtttcgagccgtagtatttttggttcaaccaatgttcagtttgaaaagttcgtcagcaagcttaatgtcacagtaagttttgtcgagcttacggatgttgatgcttgggaagcagccattcaagacaataccaaaatgttttatcttgaatctccgtcaaatccaatgaacgaagtaggtgatctggaagcgttggcgaagcttgctaaagccaataatattatttccgtggtggataattgcttttgtacgcctgcattgcaaaagccattgtctttcggtatcgatgtggtgattcatagcgcgactaagtatatcgacggtcaaggtcgttgcttaggtggagcggtgttgggttctagcgagcttatggagcaagtggttggggttctgcgctccgtagggccaaccatgagcccattcaatgcttgggttatgatcaaaggcttggaaacactatctctacgtatgaaagcccacagtgaaaatgccatggcgctggctacttggttaaaagatcaaccgcaagttaaagcagttcattatgcaggattacccgaacacccatgccatgacttagcgaaaaagcagcaaagcaattttggtggtgtgcttgcctttgaagtagaaggtggtcaagaggctgcttggacggtgatcgatagcacgcgtatgctttcaattacagcgaatttaggtgacgcgaaaaccactattactcatccggcaacaacaacgcattgtcgtgtatctgcagacgcgcgtaatgcggcaggtatcacagatggtctgattcgtattgcatgtggaatcgaagacatagaagatattcaaagagatctggcttttggcttgagtcgtatttag

SEQ ID NO: 13951 - protein, 400 aa, Oceanobacter sp. RED65
MADNKRYDSQLDEANFDTLAVRAGYQRSPEHEHSEALFLTSSYVFGNAQEAAAFFAGDEDGNVYSRYTNPTVKTFEQRLAALENAEQCVATASGMSAIFSTILALLNPGDHIVSSRSIFGSTNVQFEKFVSKLNVTVSFVELTDVDAWEAAIQDNTKMFYLESPSNPMNEVGDLEALAKLAKANNIISVVDNCFCTPALQKPLSFGIDVVIHSATKYIDGQGRCLGGAVLGSSELMEQVVGVLRSVGPTMSPFNAWVMIKGLETLSLRMKAHSENAMALATWLKDQPQVKAVHYAGLPEHPCHDLAKKQQSNFGGVLAFEVEGGQEAAWTVIDSTRMLSITANLGDAKTTITHPATTTHCRVSADARNAAGITDGLIRIACGIEDIEDIQRDLAFGLSRI

SEQ ID NO: 13952 - DNA, 1131 bp, Desulfitobacterium hafniense DCB-2
  CDS (1)..(1131): transl_table=11
atgaatattttaaccgaactggctcagatcggcaatcgccgggatccttacggggcgatcagctttcctgtttaccattcatctacctttgctcaccccggcttcggccaaagcacaggctttgattactcacgaaccggcaatcccacccgccaagctttagaagatgctatggcaagcctggaagagggtaccaaagggtttgctttttcctcaggcatgggtgccatcactaccatcctctccttattctctcagggcgagcatcttctcgtcaccgaagatctctatggaggaacctaccgtatccttgaggaggtcttcagccgctttggcctccaagtcacttttgttgattccagtgatctcgacaccatcgcaaaagagatccgcccccacacaaaagccatcttcaccgaaacacctaccaaccctctaatgaagattgccgacctaaaggggatcgcttccttgtgccagaagcacggtctcttaaatatagtggacaatacttttcttacaccctatttgcaaaaaccactgaacttgggagcagacattgttattcatagtggcaccaaatatcttggcggccataatgatgtcgtggcgggcctcgtcgtggttcaaggagaagagcttgcagctcgctttggacgtttgcagaactctctcggcgctacattgggcccccaagattcctggctaattatccggggattgaaaaccttggccctgcgcatgagagcacaagaagaaaatgccctccagattgcacaatggctggagacgcatccccttgtcaccgcggtctgttatcccggacttaagcatcatcccggctatgcaactcagcttgaacaagcccggggcttcggtgctatgctatctttccgggtaaaaagtcccagcttaatccccgagatattaaaatccctcaaaattatctcctatgcggaaagccttggtggtgtagaatctctaatcacttatcccgctacccaaacccatgccgatatccctcacgaagtaaggacaaggcttggggtggacgattgtcttctccggttatcactgggtattgaagccgccgaggatctcattggcgatttagaacaagctttaaaatag

SEQ ID NO: 13953 - protein, 376 aa, Desulfitobacterium hafniense DCB-2
MNILTELAQIGNRRDPYGAISFPVYHSSTFAHPGFGQSTGFDYSRTGNPTRQALEDAMASLEEGTKGFAFSSGMGAITTILSLFSQGEHLLVTEDLYGGTYRILEEVFSRFGLQVTFVDSSDLDTIAKEIRPHTKAIFTETPTNPLMKIADLKGIASLCQKHGLLNIVDNTFLTPYLQKPLNLGADIVIHSGTKYLGGHNDVVAGLVVVQGEELAARFGRLQNSLGATLGPQDSWLIIRGLKTLALRMRAQEENALQIAQWLETHPLVTAVCYPGLKHHPGYATQLEQARGFGAMLSFRVKSPSLIPEILKSLKIISYAESLGGVESLITYPATQTHADIPHEVRTRLGVDDCLLRLSLGIEAAEDLIGDLEQALK

SEQ ID NO: 13954 - DNA, 1140 bp, Synechococcus sp. RS9916
  CDS (1)..(1140): transl_table=11
atgccaggggatgccacccgggccattcatcacggcgacagctttgcgaccgaaaccggcacggtgatgccgccgatctacgccacctccacctttgcccacggcaaccccggtgggttcgattacacccgctccggcaacccgaacttccgcatcctcgaaggggtgctggcctcggtggagacgtgcgagcacgccacggtgtttggttcaggggtgagtgccatcaccgccatcgcctccaccctcagccaaggcgatctggtgctgtgcgaagaaaacctgtatggctgcaccgtgcgcctgttcgagcaggtgttcgccaagttcggggtgcgaaccgaatgggtcgatttcaccgatcccgcagccctgacggccatcgaaagccgtcaaccggcgatggtctggctggagagccccaccaaccccttgctgaaggtgattgacctggcagccgtgtgcagcgcagccaagagcgccggagtgccggtggtggtcgacaacaccttcgccactgcactggtgcagcgccccctccaactgggagccaccctgtcgctcaccagcaccacgaaatacatcaacggacactccgatgccctcggtggtgccgtctgctgcgacgaccctgcctggcaccagaaaatggtgtttgcccagaaggcgttgggcctgatgccttccccctttgattgctggctaatcacccggggcattaagacccttccgctacgcctgcggcagcagatggccaacgccgcagccgtggctgaccacctggcatcccaccctgcggtggcctgggtgcgctaccccctaagggccgaccatccccagcaagctgtggcgctgcagcagatgaatgggggtggagcgatcgtgaccattggcctgcaggccagccgcgatcaggcctatgccgtctgcaaggcgctgcgctggttcacgatggccgaaagcctcggaggggtggaaagcctgatctgccatcccgccaccatgacccacgccgctgtcgccgcggaggtgaaagaaaagctggggatcagcgatggactggtgcgtctgtcgttgggttgtgaagacagcgcagatttgatcgccgatctcgatcaagccctcaccctgctgccgtga

SEQ ID NO: 13955 - protein, 379 aa, Synechococcus sp. RS9916
MPGDATRAIHHGDSFATETGTVMPPIYATSTFAHGNPGGFDYTRSGNPNFRILEGVLASVETCEHATVFGSGVSAITAIASTLSQGDLVLCEENLYGCTVRLFEQVFAKFGVRTEWVDFTDPAALTAIESRQPAMVWLESPTNPLLKVIDLAAVCSAAKSAGVPVVVDNTFATALVQRPLQLGATLSLTSTTKYINGHSDALGGAVCCDDPAWHQKMVFAQKALGLMPSPFDCWLITRGIKTLPLRLRQQMANAAAVADHLASHPAVAWVRYPLRADHPQQAVALQQMNGGGAIVTIGLQASRDQAYAVCKALRWFTMAESLGGVESLICHPATMTHAAVAAEVKEKLGISDGLVRLSLGCEDSADLIADLDQALTLLP

SEQ ID NO: 13956 - DNA, 1230 bp, Alteromonadales bacterium TW-7
  CDS (1)..(1230): transl_table=11
atgagcgaaaaaaataaagcaaccattgcagtgagaagtggtgttgaagcagacaaacatcatggcgcagttgtcgcacctatttacttatcaaccacctattcgtttgccgactttgatacaaagcgtcaatacgattacgggcgaagtggtaaccccaatcgtgatattttagccgaaaccttggctgagcttgaaggtggcgcacgcggtattattactgccacgggtatgtctgccgttcatttggctacgcaaatcctgaatcatgacgatacgttagtgatcccacatgattgttacggcggaagctatcgtttatttacttcactgcaaaagcgcggtttgctcaagctagaagttttagatttaacacaagcacaaagtttagataaaattttagcaattaagcctaaactaatttggatagaaacaccaagtaacccattactacgcttaactgatattaaagcaataaccgatgttgctaaacagtgcggtgctttagtcgccgccgataacacatttttatcaccagcattacaaaaccctattaaatttggtgttgatatagttgtacattccaccaccaagtacatcaatggtcattcagatgtagtgggcggtgcggtgattgctgcttcacaagagctgggcgatgaactggcatggtgggcaaataatataggtattacaggtgcgccatttgatagttatttaacattgcgtgggttgcgaacactaaatgtgcgtttaaagcagcatcaagaaaacgcattagcgattgctaaatatttagaaaaatcggaatttgttcgccaagtttattaccctggtcttgaatcacacccgcagcatgaattagccaaagcgcagcaactaggctttggtggcatggtgagttttgatattaaaggtgacataaacgatgctgcggcgtttttaaccagcttacgtgactttagcttggcagagtctttgggaggagtagagagcctaatatgccatcctgcaaccatgacccatgctggcatggagcctaaagctcgtcttgaagcgggagtgggcgatacacttattcgagtttcagtaggtatagaagatataaacgacttattagctgatttagagcgcgtgtttcagcttgtaaagccaggcagtaaagcaaatttaaacaaaggagctggcggtgacattaaattaagtgccgctcatccagcgctttggtga

SEQ ID NO: 13957 - protein, 409 aa, Alteromonadales bacterium TW-7
MSEKNKATIAVRSGVEADKHHGAVVAPIYLSTTYSFADFDTKRQYDYGRSGNPNRDILAETLAELEGGARGIITATGMSAVHLATQILNHDDTLVIPHDCYGGSYRLFTSLQKRGLLKLEVLDLTQAQSLDKILAIKPKLIWIETPSNPLLRLTDIKAITDVAKQCGALVAADNTFLSPALQNPIKFGVDIVVHSTTKYINGHSDVVGGAVIAASQELGDELAWWANNIGITGAPFDSYLTLRGLRTLNVRLKQHQENALAIAKYLEKSEFVRQVYYPGLESHPQHELAKAQQLGFGGMVSFDIKGDINDAAAFLTSLRDFSLAESLGGVESLICHPATMTHAGMEPKARLEAGVGDTLIRVSVGIEDINDLLADLERVFQLVKPGSKANLNKGAGGDIKLSAAHPALW

SEQ ID NO: 13958 - DNA, 1182 bp, Alteromonadales bacterium TW-7
  CDS (1)..(1182): transl_table=11
atgaccaagcatcatcttcatacccaatgtattcatggcccacaaaaagcaaacgatcctcatggcgcattaacctctccgctataccaaacatcaacctttcattttgaaaacgccgcacaaggcgccgcacgttttgcaggggacgaaccaggctacatttacacccgcctaggtaatccaaccaccaccgagcttgaacaaaaaatagcacagttagaaggctgtgaagccgctgcggcaacggctacaggtatgggtgctgtatcagcatcggtattgagctttttatcacagggcgaccaccttgtagcctcaagtgcattgtatggatgtactttcgcattttttgcacacatgttgccgcgctggggaatcgaagtgacgtttgttgatatgaccaacgaggacgagctacggactgccattaaacctaattcaaaaatggtatttgtagaaacacctataaacccaacaatggctgtaattgatttagcactcattggcgctattgctaaacagcacagcttaattagcgtggtcgacaacacctttttaacgccattgctgcaatcaccaaaacaatatggcattgatatcattatgcacagtgcaaccaaatacataaatggtcatggcgatgtggtggcaggactcgtgtgcggatcgcttgagcatattaccttgataaaaatgaccgtactaaaagacattggtgcaaccataagcccacacgacgcatggcttataaatcgcggattaaaaactttagccatccgcatggagcgtcactgtcaaagcgcccaaacagtagccgaatacttagaggcgcacccacaggttaatattgtttattatccagggcttaaatctcatccagggtataaatttattggtaatcaaatgaaagctgcaggtggcgtgattgcgtttgaaataaaaggcactttacaacaaggtgcacaatttattgatagcatgaagctttgtacacttgctgtaagcttaggcgatgccgaaacgctcattcagcatcctgcatctatgacccactcgccttatacacccgaggagcgagccgccgctggaataagtgatgggctgatcagactctcggttgggcttgaagatgttaacgacattattagtgatttagaccgagcgtttactaaaattggctag

SEQ ID NO: 13959 - protein, 393 aa, Alteromonadales bacterium TW-7
MTKHHLHTQCIHGPQKANDPHGALTSPLYQTSTFHFENAAQGAARFAGDEPGYIYTRLGNPTTTELEQKIAQLEGCEAAAATATGMGAVSASVLSFLSQGDHLVASSALYGCTFAFFAHMLPRWGIEVTFVDMTNEDELRTAIKPNSKMVFVETPINPTMAVIDLALIGAIAKQHSLISVVDNTFLTPLLQSPKQYGIDIIMHSATKYINGHGDVVAGLVCGSLEHITLIKMTVLKDIGATISPHDAWLINRGLKTLAIRMERHCQSAQTVAEYLEAHPQVNIVYYPGLKSHPGYKFIGNQMKAAGGVIAFEIKGTLQQGAQFIDSMKLCTLAVSLGDAETLIQHPASMTHSPYTPEERAAAGISDGLIRLSVGLEDVNDIISDLDRAFTKIG

SEQ ID NO: 13960 - DNA, 1206 bp, marine gamma proteobacterium HTCC2143
  CDS (1)..(1206): transl_table=11
atgactgataaagaggcgctgagacagcgcatattagcagatgcgcagatggacacgttggcaattcgagcgggtcatagtccttcagaagaaggcgagcattctgagcctattttcatgacatcaagttacgtctttgaatctgcggctcaagctgctgcgcgcttctccggggatgaagagggcaatgtttattctcgttataccaatccaactgtgcggatttttgagcagcgtattgcggcaatggaaggcggtgaggcagccgttgcgacgtcgtctggaatggccgcgattcttagcacctgtatgtctttgttaaaagccggtgatcacgttgtctgttcacggaacgtatttggcacaactaccaatctttttttgaagtatctctgcaaatttggattagaagttactttcgtagatctcaccgatatggcgaattgggagcaggcgattcaaccaaatacacggctgctgttttgtgaaacaccgtccaatcctatttgcgaagtcgcggatttatcagcgctgtctgctttagcaaaaaagaacgactgtatatttgtggtcgacaactgtttttgtactcccgccttacaaaagccattagagttcggtgcggaccttattattcattccgccacaaagtatctcgacggtcaggggcggtgtgttggtggctgtgtagtcggagctaatcattacattgatcagattgttggctttctgcgaacctgcggtccgacgatgagcccgtttaacgcatgggtttttctgaaaggcctggaaactctgcgtttgaggatggacgcgcacagcagtaatacaatggcgctcgctgagtggttggagcagcagccagctattgaaaaagtctactactgtggtctggattctcacccgggaaaagctttagctagcaagcaacagcgtggctatggtggtgtcatgtcttttcaggtgaggggcgatcgcgccgccgcttggcgctttattgatgcaacgtgcctatgctctctgacagccaacctaggggatgtaaaaacaacaatcatccatcctgctacgacaacgcacagtcgcctaacgcagcagcagcgaatagaggcaagtatcaccgataatttgatccgcgttgctgttgggctcgaggacatcaacgatctgaaagctgatatgcagagagggctaggcgccatctaa

SEQ ID NO: 13961 - protein, 401 aa, marine gamma proteobacterium HTCC2143
MTDKEALRQRILADAQMDTLAIRAGHSPSEEGEHSEPIFMTSSYVFESAAQAAARFSGDEEGNVYSRYTNPTVRIFEQRIAAMEGGEAAVATSSGMAAILSTCMSLLKAGDHVVCSRNVFGTTTNLFLKYLCKFGLEVTFVDLTDMANWEQAIQPNTRLLFCETPSNPICEVADLSALSALAKKNDCIFVVDNCFCTPALQKPLEFGADLIIHSATKYLDGQGRCVGGCVVGANHYIDQIVGFLRTCGPTMSPFNAWVFLKGLETLRLRMDAHSSNTMALAEWLEQQPAIEKVYYCGLDSHPGKALASKQQRGYGGVMSFQVRGDRAAAWRFIDATCLCSLTANLGDVKTTIIHPATTTHSRLTQQQRIEASITDNLIRVAVGLEDINDLKADMQRGLGAI

SEQ ID NO: 13962 - DNA, 1215 bp, marine gamma proteobacterium HTCC2080
  CDS (1)..(1215): transl_table=11
gtgaccccagacgacgaaaatgccttgcccgattttctgcgggatgctcatgcggagacactgggtattcgagcgggcatcgcgcgcagcggcgagggcgaacatggcgagcccatattcaccacatcaagctatgtttttgatagcgcagcggatgctgcagcccgattcagtggtgcgtccagcggcaacgtttattcccgctacaccaacccaacggttcgtgtatttgaagagcggctagcggctctggaaaatgcggaatctgcagtgggaactgcatcaggcatgtctgctattttagcaacctgtatggcatttcttaggcacggtgatcatgttgtctgttcgcgagatgttttcggcagcacggtggggctgtttgataagtacctaccgcgtatgggggtctcggtatcttttgtgcctctaggagacctagcagcatggcgtgccgcagcaactgccaagactcggctgttttactgtgaaacaccttctaatcctatttgcgaggttgccgatattgctgctctggcggagatcgctaaagcttccggggctcgtctggtcgttgacaattgtttttgcacaccggcattgcaaaagccccttgagctcggtgcagatattgttatccattctgcgacgaagtacctcgatggtcaggggcgcatgttgggtggtgcggctgtagggtcagctgaggatatggcagaggtcactaattttattcgcacctgtggcccttcgatgagtccgtttaatgcctgggtttttttaaagggccttgagaccctgagtcttcgtatgcgcgcgcactgcgagaacgctaataagctcgcacactggttgcagcaacgatcagacgtatctcgggttcactatgctggactaccggaacatccggggcacgaattagcgagtcgtcagcaaagtgggtttggtggcgtgctgtcttttgaggtgcctggtgggcaggaagcggcttggcgttttatcgacgcaacaaagctgatgtcactcactgcaaacctaggtgacgttaagaccaccatcgtacatccggctacgacgactcacgggcggctcgcagcagagcaacgcgatgccgcgggtattgtgccggggctgatacggattgctgttgggcttgagcatatcgaagacctgcaagtcgattgccagcgggggtttgacgcgcttcgcgtctag

SEQ ID NO: 13963 - protein, 404 aa, marine gamma proteobacterium HTCC2080
MTPDDENALPDFLRDAHAETLGIRAGIARSGEGEHGEPIFTTSSYVFDSAADAAARFSGASSGNVYSRYTNPTVRVFEERLAALENAESAVGTASGMSAILATCMAFLRHGDHVVCSRDVFGSTVGLFDKYLPRMGVSVSFVPLGDLAAWRAAATAKTRLFYCETPSNPICEVADIAALAEIAKASGARLVVDNCFCTPALQKPLELGADIVIHSATKYLDGQGRMLGGAAVGSAEDMAEVTNFIRTCGPSMSPFNAWVFLKGLETLSLRMRAHCENANKLAHWLQQRSDVSRVHYAGLPEHPGHELASRQQSGFGGVLSFEVPGGQEAAWRFIDATKLMSLTANLGDVKTTIVHPATTTHGRLAAEQRDAAGIVPGLIRIAVGLEHIEDLQVDCQRGFDALRV

SEQ ID NO: 13964 - DNA, 1179 bp, Candidatus Desulfococcus oleovorans Hxd3
  CDS (1)..(1179): transl_table=11
atgaaaggggacaaagactggggaatctcaaccaaggcggtgcatgccggtgagatccggtataacgaatacgggtcggtgaccacgcccattgtgcagacatccacgtttatcttcaagaatatcgacgagataaagaagctggccgtgggagcggtggaacggtttgaatacggccggtacggccatcccacccagatcgccgcggaacacaagctggcctttctggaaggggcagaggacgcggtgctgttttcttcgggcatgagcgccatcaccaccaccctgttcggcctgctcaagtccggggaccacatcatcatcaccgacgacgcctaccgccgcaccctggagttctgcaaggcctgcctggtcaagttcgacatcgagtgcacggtggtgaaaatgtgcgattacgaggccatggaaaaggcgatcaaacccaacacccggctctttttctccgagtcacccaccaacccctacctcaatatcatggacctggaacggttgatcggtatttttaaagacaagggcattctggtggtgtcggacagcacctttgccacgccgtataaccagaaacccctggagtacggggtggatatcgtgattcacagcgccaccaagtacctggccggtcacaacgacctgctcagcggcgtggtgctgggcagcaagaagctggtggagccggttcgggaattcctcaaaatcaccggcggggtgattgatcccaattcggcctacctgctgatccggggcctgaagacctttggcctgcgcatggagcggctcaatgaaaacggccaaatcgttgccgaaggactggaacggcatcccaagatcagccgggtttactatcccggcctgcccagccatccccaccatgacgtggcaaaggcccagatgaaggggtttggggctgtggtgacctttgaggtggaaggcgactgcgagtatgtgctcaattttttgagccggctcaagatcatcaacatcggccccagcctgggcggagtggagtcgctgatcacccacccggccaccatcagttactacgataaaacccggaaggaacgtctggccctgggcatcaaggacggcctgatccgcctggccgtgggcgtggaaaacgccgaggatattattgccgatatcgagcaggcactggcgtaa

SEQ ID NO: 13965 - protein, 392 aa, Candidatus Desulfococcus oleovorans Hxd3
MKGDKDWGISTKAVHAGEIRYNEYGSVTTPIVQTSTFIFKNIDEIKKLAVGAVERFEYGRYGHPTQIAAEHKLAFLEGAEDAVLFSSGMSAITTTLFGLLKSGDHIIITDDAYRRTLEFCKACLVKFDIECTVVKMCDYEAMEKAIKPNTRLFFSESPTNPYLNIMDLERLIGIFKDKGILVVSDSTFATPYNQKPLEYGVDIVIHSATKYLAGHNDLLSGVVLGSKKLVEPVREFLKITGGVIDPNSAYLLIRGLKTFGLRMERLNENGQIVAEGLERHPKISRVYYPGLPSHPHHDVAKAQMKGFGAVVTFEVEGDCEYVLNFLSRLKIINIGPSLGGVESLITHPATISYYDKTRKERLALGIKDGLIRLAVGVENAEDIIADIEQALA

SEQ ID NO: 13966 - DNA, 1212 bp, Pseudomonas putida GB-1
  CDS (1)..(1212): transl_table=11
atgacggatcaatgggatgccgggcgactggacagtgacctcgagggtgtcggtttcgacaccctggcggtgcgcgccggtcaaaaccgtacaccggaaggcgaacacagcgaagcgctgttcctgacctccagctatgtgttccgcacagcggctgatgctgctgcgcgctttgccggcgaaacgccgggcaacgtctactcgcgctacaccaacccctcagtgcgtgccttcgaggagcgcctggctgcaatggaaggcgcggagcaggccgtgggtacgtccaccggtatggcggcaatcctggcagtggtcatgtcgctgtgcagcgccggtgaccatgtactggtgtcgcagagcgtgtttggctccaccatcagcctgttcgagaagtacttcaagcgctttggcgtacaagtggactacgtgccactggtcgacctcaatggctgggagaaggccatcaaggccaacaccaagctgctgatcgtcgaatcgccgtccaacccgctggccgagctggtcgatatcaccgcgctcagtgaaatcgctcatgcccatggcgccatgctggtagtggacaactgcttcagcaccccggcgctgcagcagccgctgaaactgggtgccgatatcgtgttccactcggccaccaagttcatcgacggccagggccgctgcatgggcggtgtggtcgctggccgtgccgagcagatgaaagaagtggtcggtttcctgcgtaccgcaggcccgacgctcagcccgttcaacgcctggatcttcaccaagggcctggaaacgttgcgcctgcgcatgcgtgcgcactgcgaaagcgcccaggccctggccgaatggctggagcagcaggaaggcgtggaaaaggtgcattacgcaggcctgccgagccacccgcagcacgaactggccaagcgccagatgagcggttttggtgcggtggtcagctttgaagtcaaaggcggtaaagagggtgcctggcgcttcatcgatgccacccgggtgatttccatcaccaccaacctgggtgacagcaaaactaccatcgcgcacccggccaccacctcccatggtcgcctgtcgccgcaggagcgtgaagctgcgggtatccgcgacagcctgatccgtgttgccgtaggcctggaagacgtggccgacctgcaagccgacctggcgcgcgggctggctgcactgtga

SEQ ID NO: 13967 - protein, 403 aa, Pseudomonas putida GB-1
MTDQWDAGRLDSDLEGVGFDTLAVRAGQNRTPEGEHSEALFLTSSYVFRTAADAAARFAGETPGNVYSRYTNPSVRAFEERLAAMEGAEQAVGTSTGMAAILAVVMSLCSAGDHVLVSQSVFGSTISLFEKYFKRFGVQVDYVPLVDLNGWEKAIKANTKLLIVESPSNPLAELVDITALSEIAHAHGAMLVVDNCFSTPALQQPLKLGADIVFHSATKFIDGQGRCMGGVVAGRAEQMKEVVGFLRTAGPTLSPFNAWIFTKGLETLRLRMRAHCESAQALAEWLEQQEGVEKVHYAGLPSHPQHELAKRQMSGFGAVVSFEVKGGKEGAWRFIDATRVISITTNLGDSKTTIAHPATTSHGRLSPQEREAAGIRDSLIRVAVGLEDVADLQADLARGLAAL

SEQ ID NO: 13968 - DNA, 1203 bp, Pseudomonas putida GB-1
  CDS (1)..(1203): transl_table=11
gtggcgactttcactctgccaatgggcctgaccatgtccgaaaagccgcgcaatttcgccacccgcaccattcacgccggcgagcagttcagcgtcgccgataacgccattttcccggccatcgtcaccgccagctcgttcaccaagcgcagcctggacgacaagccggaatattcctacagccgcgtcggcaacccgacccggcatgcctacgaaacctgcgttgccgccctggaagaaggtgtgggcgcagtggcctgcgcctcaggggtgaatgccaccgcgaccgtgctggagctgctgcccaaagatgctcatgtggtggtgatgaacggtgtgtacggtggcaccttccgcatcatggaagactaccgcagccgcacttcgggcctgaccaccacctacgtcgacctcaacgacctcgaggccgtggcggctgcgatcaagccgcaaacccaactgatctggatcgaatcgccgaccaacccgttgctgcacctggtcgacatcaaggcggtatgcgacctggccaaggcgcggggtattctgacctgtatcgacaacaccttctgctcaccgtggaaccagcgcccgatcaccctgggcgtggacctggtgatgcactcggccagcaaatacatcggcggccactccgacctaacgggtggtgtggtggtggcagccaatgatgcgctgctggcgcgcctgcgccgtatcagcatggcgattggtgcggtgcaggggccgttcgactgctacctggccctgcgcggtctgaagaccctggatgtacgcatggaacgccaatgcgccaatgccttgcaagtggcccgcttcctcgaaagccacgcgcaggtcgagcaggtgtattacccagggttggaaagccacccacagcatgcgctgtgcaagcgtcaaatgcgcagtggcggtgcggtggtggcgatgaaggtgaagggcgaccgcgctgcgctcaaccgcctggtggaggcgctgcagatctttgtgctggccgactcgctgggtggggtggagagcatgatcaaccactcctggagcatgtcgcactgctcgttgagccctgagcagaaaggggtgatggggatcagcgagaacctgctgcggctgtcggtggggatcgaggactaccgcgacctggtcgaggacctggatggggcgctgaaagcgctggttgctgtgtaa

SEQ ID NO: 13969 - protein, 400 aa, Pseudomonas putida GB-1
MATFTLPMGLTMSEKPRNFATRTIHAGEQFSVADNAIFPAIVTASSFTKRSLDDKPEYSYSRVGNPTRHAYETCVAALEEGVGAVACASGVNATATVLELLPKDAHVVVMNGVYGGTFRIMEDYRSRTSGLTTTYVDLNDLEAVAAAIKPQTQLIWIESPTNPLLHLVDIKAVCDLAKARGILTCIDNTFCSPWNQRPITLGVDLVMHSASKYIGGHSDLTGGVVVAANDALLARLRRISMAIGAVQGPFDCYLALRGLKTLDVRMERQCANALQVARFLESHAQVEQVYYPGLESHPQHALCKRQMRSGGAVVAMKVKGDRAALNRLVEALQIFVLADSLGGVESMINHSWSMSHCSLSPEQKGVMGISENLLRLSVGIEDYRDLVEDLDGALKALVAV

SEQ ID NO: 13970 - DNA, 1278 bp, Pseudomonas putida GB-1
  CDS (1)..(1278): transl_table=11
atgaagctggaaacgcttgccatccatgcgggcttcagccccgacccgaccacccgggcggtggccgtaccgatctaccagaccacctccttcgccttcgacgacacccagcacggcgccgacctgttcgacctgaaggtggccggcaatatctactcgcgcatcatgaaccctaccaacgatgtgctggagcagcgcatggctgccctcgaaggcggggtgggcgcgctggcggtggcgtcgggtatggcggccatcacctacgccatccagaccgtcgccgaagccggtgacaatatcgtctcggtggccaagctgtacggcggtacctacaacctgctggcccacaccctgccacgcatgggcatccacacccgtttcgccgcccatgacgatatcgccgccctcgaagcgttgatcgacgcacgcaccaaggcggtgttctgcgagtccattggcaaccccgctggcaacattgtcgatattgccgcgctggccgaggccgcccaccgtcacggtgtgccgctgatcgtcgacaacaccgtggccaccccggtcctgtgccgaccgttcgagcacggcgcggacatcgtcgtgcactcgctgaccaagtacattggcggccacggcaccagtatcggcggcatcgtcatcgacgctggcaagttcccctgggccgacaacaaagaacggttcgccttgctcaacacccccgatccgtcctaccacggcgtcacctacaccgaagccttcggccctgccgctttcatcggccgctgccgcgtggtgccgttgcgcaacacgggcgccgcgctgtcaccgttcaacgccttcctgatcctgcaaggcctggaaaccctggccctgcgcatggaacgccacaccgaaaatgcgctgaaggtcgcccagtaccttcaggcccacgaacaggtggcctgggtgaaatacgccgggctacccgaccaccccgagcatgaactggcccggcgctataccggcggcaaaccggcatcaatcctgtcgttcggcatcaagggcgggcaggcggccggcgcacgcttcatcgatgcgctgcagttggtggtgcgcctggtgaacatcggcgacgccaagtctctggcctgccaccccgcctccaccacccaccgccagctcaacgacgaggagctggagaaggccggcgtgccacgggacatggtgcgcctgtcgatcggcatcgagcacagcgacgacatcatcgccgacctggcccaggccctggaggccagccgcgcctga

SEQ ID NO: 13971 - protein, 425 aa, Pseudomonas putida GB-1
MKLETLAIHAGFSPDPTTRAVAVPIYQTTSFAFDDTQHGADLFDLKVAGNIYSRIMNPTNDVLEQRMAALEGGVGALAVASGMAAITYAIQTVAEAGDNIVSVAKLYGGTYNLLAHTLPRMGIHTRFAAHDDIAALEALIDARTKAVFCESIGNPAGNIVDIAALAEAAHRHGVPLIVDNTVATPVLCRPFEHGADIVVHSLTKYIGGHGTSIGGIVIDAGKFPWADNKERFALLNTPDPSYHGVTYTEAFGPAAFIGRCRVVPLRNTGAALSPFNAFLILQGLETLALRMERHTENALKVAQYLQAHEQVAWVKYAGLPDHPEHELARRYTGGKPASILSFGIKGGQAAGARFIDALQLVVRLVNIGDAKSLACHPASTTHRQLNDEELEKAGVPRDMVRLSIGIEHSDDIIADLAQALEASRA

SEQ ID NO: 13972 - DNA, 1197 bp, Pseudomonas putida GB-1
  CDS (1)..(1197): transl_table=11
atgcgcgactcccataacaacaccggtttttccacacgggccattcaccatggctacgacccgctttcccacggtggtgccctggtgccaccggtgtaccagaccgctacctatgcctttcccaccgttgagtacggcgcagcctgcttcgccggggaggaggcgggccacttttacagccgcatctccaaccccaccctggccttgctcgagcaacgcatggcttcgttggagggcggtgaggcggggctggcgctggcgtcggggatgggcgcgatcacttcgaccatctggaccttgctgcggcctggcgatgaactgattgtcgggcgtactttgtatggctgcacgttcgctttcctgcatcacggcattggcgagttcggggtaaagatccaccatgtcgacctcaatgatgccaaggccctgaaagcggcgatcaacagcaaaacacggatgatctacttcgaaacgccggccaaccccaacatgcaactggtggatatagcggcggtcgtcgaggcagtacgagggcgtgatgtacttgtggtggtcgacaacacctattgcacgccgtacctgcagcggccgctggagcttggggcggacctggtggtgcattcggcgaccaagtacctcagtggccatggtgatatcacggcgggcctggtggtggggcgtaaggcgctggtcgaccgcattcgcctggaggggctgaaggacatgaccggggcggtgctgtcgccgcatgacgcgtcgctgctgatgcgcggtatcaagaccttggccctgcgcatggaccgccattgcgccaacgccttgcaggtggcgcagttcctcgcgcggcagccgcaggtggaacttattcactacccaggtttgccgtcgttcgcccaatacgaactggcgcagcggcagatgcgcttgccgggtgggatgattgccttcgagctcaagggggggatcgacgccgggcggcgcttcatgaatgcgctgcagctgtttgcacgggcggtgagcttgggtgatgccgaatcgctggcgcagcatccggcgagcatgacgcattccagttacacgccgcaggagcgggcgcatcacggcatatcggaaggattggtgcggttgtcggtggggctggaggatgtggaagacctgctggcggatgtcgagcaggcattgcaggcttgcaaatag

SEQ ID NO: 13973 - protein, 398 aa, Pseudomonas putida GB-1
MRDSHNNTGFSTRAIHHGYDPLSHGGALVPPVYQTATYAFPTVEYGAACFAGEEAGHFYSRISNPTLALLEQRMASLEGGEAGLALASGMGAITSTIWTLLRPGDELIVGRTLYGCTFAFLHHGIGEFGVKIHHVDLNDAKALKAAINSKTRMIYFETPANPNMQLVDIAAVVEAVRGRDVLVVVDNTYCTPYLQRPLELGADLVVHSATKYLSGHGDITAGLVVGRKALVDRIRLEGLKDMTGAVLSPHDASLLMRGIKTLALRMDRHCANALQVAQFLARQPQVELIHYPGLPSFAQYELAQRQMRLPGGMIAFELKGGIDAGRRFMNALQLFARAVSLGDAESLAQHPASMTHSSYTPQERAHHGISEGLVRLSVGLEDVEDLLADVEQALQACK

SEQ ID NO: 13974 - DNA, 1242 bp, Marinobacter sp. ELB17
  CDS (1)..(1242): transl_table=11
atgacattttgccgcgaagaatcggttttgataccagaatcagacctggacggcgtgtctggcgataccctggcggtgcgcgcggggcaggttcgtaccggtcagctggaacacagcgacgctatattccctacgtccagcttcgtttacgccagcgcggcgcaagcggccgcgcgttttgccggtgaagagcccggtaatatttattcgcgttttaccaaccccacggtgaccgcctttgaaaaccgcattgcggcgatggaaggcggcgagcgggcagtggcaatggcttcgggtatggccgctattaccagcacctgtatggcgctgctgaaggctggtgaccatgtggtgtgttcacgggacgtatttggcacggtgaattcgctgtttcagaaatacctgagcaaatttggtgttgaaaccacctttgtaaaactgacagaccaagccggctgggaagcggctattcggcccaatacccggatgttgtttctggaaacgccgtctaacccgctgtgcgaagtggcagacattcgcaagatggccgatttggcccacgcccacgatgcgctgttagtcgtcgacaactgtttttgcaccccggtgctgcagcagccgctggcgttgggcgcagacctggtaacccactccgccaccaaatatctggacggccagggccgttgtgtaggcggcgtcgttgtaggcccccacgcgctgctggaagaaatattcgtgtttttgcgggcaacaggcccaaccatgagcccgttcaacgcatgggtgttcatgaagggcctggaaaccttaccaattcgtatgcgagcccactgtgacaatgcgttagagttggcccaatggctgcagcagcagagcgcggtggaaacggttttttacaccggcctgccgcagcatccgcattatgaactggccaaacgccagcaaaaggccttcggcggcgtattgtcatttcgggtaaaagggggcagggaagaggcctggtgctttattgacgccactcgcatggtgtctattaccgccaatctgggcgatgtgaagaccaccatcacccaccctgcaacaacgacccacgggcggttgtcgcctgaagataaagagcaggccggtatcagtgaaaacctgattcgcctgtcggtaggcattgaagccattgacgacctgaaagccgatcttgaccggggttttcaggcccttcagaatcccggtcatggcaacatctga

SEQ ID NO: 13975 - protein, 413 aa, Marinobacter sp. ELB17
MTFCREESVLIPESDLDGVSGDTLAVRAGQVRTGQLEHSDAIFPTSSFVYASAAQAAARFAGEEPGNIYSRFTNPTVTAFENRIAAMEGGERAVAMASGMAAITSTCMALLKAGDHVVCSRDVFGTVNSLFQKYLSKFGVETTFVKLTDQAGWEAAIRPNTRMLFLETPSNPLCEVADIRKMADLAHAHDALLVVDNCFCTPVLQQPLALGADLVTHSATKYLDGQGRCVGGVVVGPHALLEEIFVFLRATGPTMSPFNAWVFMKGLETLPIRMRAHCDNALELAQWLQQQSAVETVFYTGLPQHPHYELAKRQQKAFGGVLSFRVKGGREEAWCFIDATRMVSITANLGDVKTTITHPATTTHGRLSPEDKEQAGISENLIRLSVGIEAIDDLKADLDRGFQALQNPGHGNI

SEQ ID NO: 13976 - DNA, 1194 bp, Marinobacter sp. ELB17
  CDS (1)..(1194): transl_table=11
atgcccgagcacagcccatcacccaatcaccaccccgccacccgcatcatccacaaccggcgccatcgggaccagcaaggcagcccttactcgccggtgtacaacaccaccacctaccgtttcgacaccaccgccgaacagctggccgtggtaaaaggtgaacacgacggcaacctgtacacccgttggggcaccaatcccaccattaaagagctggaacaaggcctggcgcagctggaatcagcacaggccggattggcgtttgcctccggcatggcggccatctccgccaccctatttgcccatggccgcaacggcatcgtatgcgtgggcgatctgtacggcggcacccaggaactgctgatgaatcatttcgagcccctgggcattccctttatcttccttctgaaccaacagctggatgagctggaacagcatctaaccaagcccggcatgctggtgtactgcgaaaccccggccaacccaaccatggccatattagacatcgccgacctggcccgccgtgctcacgccaagggcgccttaatggccgtcgacaacaccttcgccagccccatcaaccagcgcccgctggaactgggcgccgacctggtcatgcacagcgctacaaaatacctggccggccacagcgacttaaccgccggcgccttcatgtccagcgcagaactcgccaaacccgtggccgcctggcgcaaaagcctgggccagatactggcaccggaaatggccgcgcttctatcgcgcagcctgcgaaccctgcacgtacgagtccgccagcacaacgaaaacgccatggccgtcgccattgccatggaaaaacacccgaaagtcagccgcgtactctaccccggcctgccagattttcccggccaccaactcgccaaacaacaaatgcacggcttcggcggcatgctcagcattgatgtcgtaggcggcggcaaagccgcagaatgcgtcgaagaccacctgcaagtcttcctgctagccaccagcctgggcggcgtagaaagcctggtcagccagccaatcgccaccagccactaccgcctgacacccgaagaccgggcacaaaggggaatcagcgatggcttactgcgattgtcagtggggcttgaagatgcgggggatttaattgcggacctggagcaggcgctggacagcttggcggagtga

SEQ ID NO: 13977 - protein, 397 aa, Marinobacter sp. ELB17
MPEHSPSPNHHPATRIIHNRRHRDQQGSPYSPVYNTTTYRFDTTAEQLAVVKGEHDGNLYTRWGTNPTIKELEQGLAQLESAQAGLAFASGMAAISATLFAHGRNGIVCVGDLYGGTQELLMNHFEPLGIPFIFLLNQQLDELEQHLTKPGMLVYCETPANPTMAILDIADLARRAHAKGALMAVDNTFASPINQRPLELGADLVMHSATKYLAGHSDLTAGAFMSSAELAKPVAAWRKSLGQILAPEMAALLSRSLRTLHVRVRQHNENAMAVAIAMEKHPKVSRVLYPGLPDFPGHQLAKQQMHGFGGMLSIDVVGGGKAAECVEDHLQVFLLATSLGGVESLVSQPIATSHYRLTPEDRAQRGISDGLLRLSVGLEDAGDLIADLEQALDSLAE

SEQ ID NO: 13978 - DNA, 1137 bp, Bacillus sp. SG-1
  CDS (1)..(1137): transl_table=11
atgagaagaaaaacgagattaattcatggtggaattacaggggatgaacaaacaggtgcggtttcagttccaatttatcaagtcagcacctataagcaggatggtgttgggcagcatagaggttttgagtattcccgtacaggaaatccaacacggcatgcacttgaaagcttgattgcagatattgagggaggtcacgcagggtttgctttcggctcggggatgggggcgattacttcacttttgatgctctttaaatcgggcgatcacatcattttcactgatgatgtttatggcggtacataccgtctgatttcaaaagtgatgaatcgtttcgatctatccgtttcattcgtggacacttcagatacagacaaaataaaacaggcaattcagccgaacacgaaggcaatttatattgaaacaccgacgaatcctctcttgaaaattacagatttggaagctgtgtccgttatcgcgaaagaaaatgacttactgtttatcgtagataatacgttcagtacaccatactggcaaaacccgattgaacagggagcgaatatagtacttcatagtgctacaaaataccttggcggccacagcgatgtagtagctggtttggttgtggtggattcagcgcagcttgcagaagatgtacactttgtccaaaattctgcaggtgccatccttggaccgcaggattcctggctgttaatgaggggaataaaaacgctcggaatcagaatggaagaaatagaatccaacacaaaacgttttgtggatttccttcagcataatccgaaggtcagctccatttactatccaggccttgaatcacatactggcagtgaggtgcacaggaagcaggcgcgcggagcaggcgggatgatttcctttgacgtcggaagcgaagagaatgcagaaaagttactgacgaatgttcgctatttcacgttagcagaaagtcttggggctgttgaaagcttaatctcagttcctgctaaaatgacacatgcatccattccggcagaaagaagagcggagttagggataactgatggattagtgcgtgtgtccatcggattggaagatatagaagaccttatagaagacgttgagcgtgcattggagaaataa

SEQ ID NO: 13979 - protein, 378 aa, Bacillus sp. SG-1
MRRKTRLIHGGITGDEQTGAVSVPIYQVSTYKQDGVGQHRGFEYSRTGNPTRHALESLIADIEGGHAGFAFGSGMGAITSLLMLFKSGDHIIFTDDVYGGTYRLISKVMNRFDLSVSFVDTSDTDKIKQAIQPNTKAIYIETPTNPLLKITDLEAVSVIAKENDLLFIVDNTFSTPYWQNPIEQGANIVLHSATKYLGGHSDVVAGLVVVDSAQLAEDVHFVQNSAGAILGPQDSWLLMRGIKTLGIRMEEIESNTKRFVDFLQHNPKVSSIYYPGLESHTGSEVHRKQARGAGGMISFDVGSEENAEKLLTNVRYFTLAESLGAVESLISVPAKMTHASIPAERRAELGITDGLVRVSIGLEDIEDLIEDVERALEK

SEQ ID NO: 13980 - DNA, 1314 bp, Erythrobacter sp. SD-21
  CDS (1)..(1314): transl_table=11
atgagcgataccgacgtcgaccccaccagcccgcgcatggcccccaagcgcgaagtgaccaagatcaacggccgtccgctgaaacccagcacgctgatgatgggtcacggcttcgaccccaccctttcggaaggcagcctcaaggccccgatcttcctcacctcgaccttcgctttccccagcgccgccgacggcaagcgccacttcgaaggcatcaccggcaagcgtccgggcggcgcggacggcctcgtctattcgcgcttcaacgcgccaaaccaggagatcctcgaagatcgcctcgccgtgtgggacggcgcggaagaagcgctctccttctccagcggcatgaccgcgattgccgtgctgctgctggcggcctgcaaggcgggtgacgtgatcgtccattccggtccgctctacgccgcttcggaaggcttcatcgccaagaccatggcgaaatacggtgtgagctttatcgacttccccgccggcgcaacgcgcgaacagctggacgaggtcatggtgaaggccaaggccctggccgaggagaagggcggcgaagtgccgatgatctacctcgaaagcccgggcaacccgaccaacgcgctggtcgatatcgaagcggtcaaggccgcgcgcgacgcccacttcgatcccgacaagtgctcgatcgcgatcgacaacaccttcctcggccccctgtggcagcgcccgctcgaccatggcgcggacctcgtggtctactcgctgaccaagtatgtcggcggccactcggacctcgtggcgggcagcgtctcgggcaagaagcgcttcatcgacgccatccgcatgctgcgcaacaccatgggcggtatctgcgatccgaacacggcgtggatgctctgccgcagcctcgaaaccgtcgaactgcgcatgcagcgcgcgggcgagaacgcgaccaaggtctgcgacttccttgccaagcacccgaaggtcgaaggcctcggctatctcggcatgatcaaggacgcacgccagcaggacatctacgaccgtcactgcctcggcgccggctccaccttctcgctgctgctgaagggcggcgaggcggagtgcttccgcttcctcgacgcgctgaagatcgccaagctggccgtcagcctcggcgggaccgagacgcttgccagccaccccgcctcgatgacccacctctcggtcgccgaaggtcgccgcgcggaactgggcatttcggacaatctcgtgcgcatctcgatcggcattgaagacgcggacgacctcatcgccgacttcgagcaggcgctggaggcggtctga

SEQ ID NO: 13981 - protein, 437 aa, Erythrobacter sp. SD-21
MSDTDVDPTSPRMAPKREVTKINGRPLKPSTLMMGHGFDPTLSEGSLKAPIFLTSTFAFPSAADGKRHFEGITGKRPGGADGLVYSRFNAPNQEILEDRLAVWDGAEEALSFSSGMTAIAVLLLAACKAGDVIVHSGPLYAASEGFIAKTMAKYGVSFIDFPAGATREQLDEVMVKAKALAEEKGGEVPMIYLESPGNPTNALVDIEAVKAARDAHFDPDKCSIAIDNTFLGPLWQRPLDHGADLVVYSLTKYVGGHSDLVAGSVSGKKRFIDAIRMLRNTMGGICDPNTAWMLCRSLETVELRMQRAGENATKVCDFLAKHPKVEGLGYLGMIKDARQQDIYDRHCLGAGSTFSLLLKGGEAECFRFLDALKIAKLAVSLGGTETLASHPASMTHLSVAEGRRAELGISDNLVRISIGIEDADDLIADFEQALEAV

SEQ ID NO: 13982 - DNA, 1206 bp, Erythrobacter sp. SD-21
  CDS (1)..(1206): transl_table=11
atgaagaagactaccggaaccgaccgctcgataacctcgcaatggcgccccgcaacgcaggcggtgcgcggcggcacgtggcgcagcgagcatggcgagacgagcgaggcgctattcctgacctcgggctacacctacgacgacgcgcagacggtggccgatcgcttcgcgggcgaggcgcagggcatgacctactcgcgccttcagaaccccaccgtcgccatgctggaagagcgcattgcgttgattgagggcgcggaggcctgccgcgcgcaggccagcggaatggcggcgatgaccaccgcgctcctgtgtcaggtctcggccggcgatcatgtgatcggggcgagggcggccttcgggtcgtgtcgctggctgctcgaccatctcctcccgcgcttcgggatcaagacgaccgtcgtcgacagcgccgacaacgacgcgtgggaggcggcgatccgtcccaacaccaaggtcttctttttcgagaccccggccaaccccacgctcgacgtggtcgatctcaagcatgtgtgcgaggtggccagggcgcacggcatcaccaccgtggtcgacaacgcctttgccaccagcgcgctgcagcgtccgatggatttcggcgccgatgtcgtggcctattcggcgaccaagctgatggacgggcagggcagggtgctggccggcgccgtctgcgcttcgcaggaatggatggacgaggtcctgctgcccttccagcgcaacaccggccccaatatcgcacccttcaacgcttgggtggtcctgaaaggcctcgaaaccctgagcctgcgggcgatgaagcagagcgagaatgcggtcgaactgggcaaattcatcgaaccgcgcgtgccccgcatcctccatcccggcctgccgagccacccgcgccacgcgctggcgctggagcagatgactgccaccggcccgatcttcgcgctcgacgtcgagagccgcgagcgcgccttcgccattctcgacgcgctacagctggtcgatatttcgaacaatatcggcgatgcgcgcagcctcatgtgccatccggcgagcaccacgcatgccggcatgaccggcgaggaccgcgaggcgatgggcgtgaccgagggcttgctgcgcatcaacgtcgggcttgaggatgtcgaggatgtgaaggaagacctcgaccgcgccctgaaggcggcggggctttag

SEQ ID NO: 13983 - protein, 401 aa, Erythrobacter sp. SD-21
MKKTTGTDRSITSQWRPATQAVRGGTWRSEHGETSEALFLTSGYTYDDAQTVADRFAGEAQGMTYSRLQNPTVAMLEERIALIEGAEACRAQASGMAAMTTALLCQVSAGDHVIGARAAFGSCRWLLDHLLPRFGIKTTVVDSADNDAWEAAIRPNTKVFFFETPANPTLDVVDLKHVCEVARAHGITTVVDNAFATSALQRPMDFGADVVAYSATKLMDGQGRVLAGAVCASQEWMDEVLLPFQRNTGPNIAPFNAWVVLKGLETLSLRAMKQSENAVELGKFIEPRVPRILHPGLPSHPRHALALEQMTATGPIFALDVESRERAFAILDALQLVDISNNIGDARSLMCHPASTTHAGMTGEDREAMGVTEGLLRINVGLEDVEDVKEDLDRALKAAGL

SEQ ID NO: 13984 - DNA, 1137 bp, Sporosarcina halophila
  CDS (1)..(1137): transl_table=11
atgagaaagaaaacacaattaattcatggtggtattacaggagatgaaaaaaccggtgcagtttctgtacccatttatcaggttagtacttatgcacaggacggggtaggaaagcatcggggatatgagtattccagaaccggcaacccaactcgttttgctcttgaagaattaattaaagaaattgaaggcggttatgccggttttgcttttgggtctggaatggctgcgattaccgctgtcctcatgacctttaaacagggagatcatattatttttacggatgatgtgtacggcggaacataccgcctcgtttcccaggtgatcacccgctttggtctcaaagcaagctttgtagatactagtgattccaaaaacattgaagcagcgatgaccgagcgcacgaaagcgttatatgttgagacgccgacgaatcctttgttaaaaataacggatcttaagaaaacttctgagcttgctaaaactcataatttaaccttcatcgtggataatacattcagcacgccttactggcagaacccaattgatttcggagcagacatcgttcttcacagtgcaacgaaatacctgggcggacatagtgacgtagtcgccggactggttgttgtgaactctgaacaattagctgaagaggttcatttcgtactaaactcctctggtggtattctcggaccgcaggatgcctggctacttatgcgcggtattaaaacattaggtgtccgtatggaagaaattgaagaaaacacgcggggcttcgttgagtttttacaaggacttccagaggtgacgaacatttactatccaggtcttacagagcacgtgggtcatgatgttcatcagaatcaggcacgcggaaacggcggaatgatctcttttgacgtaggaagcggggaaaaagcagataaagtgctgcagaatgtccgctacttcacccttgctgaaagtcttggagcagtggaaagcttaatttctgtcccggctaaaatgacacatgcttctattccggaagtgcgccggggtgagcttggtataaccgacgggcttgtccgtgtatccatcggacttgaagatattgaagatttgaaagaagattttcttgaggctttacgtaaataa

SEQ ID NO: 13985 - protein, 378 aa, Sporosarcina halophila
MRKKTQLIHGGITGDEKTGAVSVPIYQVSTYAQDGVGKHRGYEYSRTGNPTRFALEELIKEIEGGYAGFAFGSGMAAITAVLMTFKQGDHIIFTDDVYGGTYRLVSQVITRFGLKASFVDTSDSKNIEAAMTERTKALYVETPTNPLLKITDLKKTSELAKTHNLTFIVDNTFSTPYWQNPIDFGADIVLHSATKYLGGHSDVVAGLVVVNSEQLAEEVHFVLNSSGGILGPQDAWLLMRGIKTLGVRMEEIEENTRGFVEFLQGLPEVTNIYYPGLTEHVGHDVHQNQARGNGGMISFDVGSGEKADKVLQNVRYFTLAESLGAVESLISVPAKMTHASIPEVRRGELGITDGLVRVSIGLEDIEDLKEDFLEALRK

SEQ ID NO: 13986 - DNA, 1143 bp, Lactobacillus reuteri
  CDS (1)..(1143): transl_table=11
atgaaattcaatacacaattaattcatggcggtaatagtgaagatccaaccactggtgcggtttcaacaccgatttaccgttcatcaacattccatcaacatgttcttggcggtgaacctaaatgggaatattctcgaacaggaaatccaacacgtgcatctcttgaaaaattaatcgcagagcttgaacatgggacagccggctttgcatttgcttctggatctgctgctattcatgctactttttctttattctctcaaggcgatcattttgtagttggtagtgatgtatacgggggaacattccggttaatcaacaaggtattaaaacgctttggccttgaatttactgttgttgacatgcaagaccttgaagcagtcgaaaatgcaattcaagataataccgttgcagtttattttgaaacgccaactaatccgctcttgcaaatcgctgatattaaagcaattgctgatatcgcaaaaaagcatggaataaagacaattgttgataatacctttgctaccccttataaccaacaaccgttaactcttggggcagatattgttgttcactccgcaaccaaatatttaggcggtcatagtgatgttgttgccggattagcagttactaacgatgatgagattgctgaacaattagcattcctgcaaaactcaatcggtagtacacttggccctgatgatagttggctattacaacggggaatgaaaactctcggtgcgcggatgcgagctcaccaagaaaatgcgaatgaagttattaatttcctccaaaacgatgaccatattggaaaaatttattatccaggcttaaaagattttcctggtcatgagattgcggctaagcaaatgcggaactttggagcaatgatctcctttgaacttaaggatagtttagatgcgaagaagtttgttgaaagtctacaattaattgatcttgcggaaagtttgggaggaattgaaagcttgattgaagttccagctgtcatgacccatggatctattccccgggaaataagattagaaaacggaattaaagatgagttgattcgtctttcagtgggaattgaggaccctgaagatattattgctgacttgcaacaagcacttaaaaaattagattaa

SEQ ID NO: 13987 - protein, 380 aa, Lactobacillus reuteri
MKFNTQLIHGGNSEDPTTGAVSTPIYRSSTFHQHVLGGEPKWEYSRTGNPTRASLEKLIAELEHGTAGFAFASGSAAIHATFSLFSQGDHFVVGSDVYGGTFRLINKVLKRFGLEFTVVDMQDLEAVENAIQDNTVAVYFETPTNPLLQIADIKAIADIAKKHGIKTIVDNTFATPYNQQPLTLGADIVVHSATKYLGGHSDVVAGLAVTNDDEIAEQLAFLQNSIGSTLGPDDSWLLQRGMKTLGARMRAHQENANEVINFLQNDDHIGKIYYPGLKDFPGHEIAAKQMRNFGAMISFELKDSLDAKKFVESLQLIDLAESLGGIESLIEVPAVMTHGSIPREIRLENGIKDELIRLSVGIEDPEDIIADLQQALKKLD

SEQ ID NO: 13988 - DNA, 1257 bp, Magnetospirillum gryphiswaldense
  CDS (1)..(1257): transl_table=11
atggacgcggaagtatccttccgtgcccgccctggtcgggtacttcgtgccgaaggggccatcatgaccaagaccaccacccgcaccttgcgcccgcgcaccctgtccgtccgcgccggcaccgcgcgcaccggattctccgagaccagcgaagccatcttcatgaattccggtttcgtctacgccaccgccgaggaagccgagcaaagtttcgacggcaccttggaccgcatggtctattcccgtttcaagaatcccaccgtcgccatgttcgaggaccgtctggccgctatcgaaggggccgaggcctgccgcgccaccgcttcgggcatggccgccgtccacgccgccatcctctgtcaactgaaggccggcgaccgggtggtggcgccgcgcgccctgttcggctcgtgcacctggatcatcaacgatctgctgccgcgcttcggcgtgctgccggtattcgtcgacggcaccgacctggatcagtggcgggcggccctggcgcagccgacagcggtcgtgttcctggagacgccgtccaaccccaccttggaaatcatcgacctgtcggcggtggcggaactggcccaccgggccggagcgaaagtggtggtcgacaacgtcttcgccacccctattttgcaaagcccgctgcacttaggcgccgacgtggtggtctattcggccaccaagcacatcgacggccagggccgctgcctgggcggcgccatcctgggcagcgccgaattctgcaacgacgtgctggggccgtatctccgccataccggcccggcgctgtcgccgttcaacgcctggaccttgctgaaaggtctggaaaccctggatttgcgcatcgagcgccattgcgccaatgcccttaaggtcgcaaccttcctggaatcgcggcccgaaatcgcccgcgtgctctatcccggcctgaccagtcacccgcagcacgatctggccaagcggcagatgacgggcttcggcggcatcgttgcctttgccctgaagggcggcaaggacgcggcctacaccctgctcaacggtttggacgtcatcgacatttccaacaatctgggcgatgccaaatcgctggcctgtcacccctggaccaccacccaccagcgcctgagccccgaggccaagcaggcccagggcatcaccgaaggcctgatccggctgtcggtgggcctggaagatgccgatgacctgatcgacgatctggccttggccttggaaaaggtcctatga

SEQ ID NO: 13989 - protein, 418 aa, Magnetospirillum gryphiswaldense
MDAEVSFRARPGRVLRAEGAIMTKTTTRTLRPRTLSVRAGTARTGFSETSEAIFMNSGFVYATAEEAEQSFDGTLDRMVYSRFKNPTVAMFEDRLAAIEGAEACRATASGMAAVHAAILCQLKAGDRVVAPRALFGSCTWIINDLLPRFGVLPVFVDGTDLDQWRAALAQPTAVVFLETPSNPTLEIIDLSAVAELAHRAGAKVVVDNVFATPILQSPLHLGADVVVYSATKHIDGQGRCLGGAILGSAEFCNDVLGPYLRHTGPALSPFNAWTLLKGLETLDLRIERHCANALKVATFLESRPEIARVLYPGLTSHPQHDLAKRQMTGFGGIVAFALKGGKDAAYTLLNGLDVIDISNNLGDAKSLACHPWTTTHQRLSPEAKQAQGITEGLIRLSVGLEDADDLIDDLALALEKVL

SEQ ID NO: 13990 - DNA, 1800 bp, Magnetospirillum gryphiswaldense
  CDS (1)..(1800): transl_table=11
gtgtccgccgccagcctcgactataccgacgacttcctgcgccagatcttgcgttcggtgcgcaccatcgccgtggtcggcgccagttccaactggaaccggcccagctatttcgtcaccaagtatctgcaagaaaagggctatcgggtcattccggtcaatcctggcctggccggccagcaattgctgggggaaaccgtctatgccgatctggcctcgatccccgagccggtggacatggtggatatcttccgcaattccgccgccgccgggccgatcgccgatcaggccgtcgccatcggcgccaaggtggtgtggatgcagctttccgtccgcaacgacgaggccgccgcccgcgcccaggccgccggcctcaaggtggtgatggatcgctgccccaagatcgaattcggtcgcctgggcggcgagttgggctggtacggcgtcaattccggcatcatcaccaacaaggccaaggaagcgccacgccccaagcgcgacaaggggaccggcgaggagaaccaggaaaagcaggaattcggcttcgccaccaaggcggtgcacgcgggcgccgcccccgacgcggcgacgggcgcgcgcaccacccccatctatcagaccgcgtcctacgtgttcgaggacaccgaccacgccgccagcctgttcaacctgcacagcttcggctacatctattcgcgcctgaccaaccccacggtcagcgtcttggaagaacgcgtcgccagcctggaaggcgggcgcgcggcggtcgccgccgcctccggccatgccgcccagttcctcaccttcttcaccctgctggagccgggcgaccacttcgtcgcctcgcgcaatctctatggcggttcgctgacccagttcggcctgtcgttcaagaaactgggctggcactgcaccttcgtcgatccgcacgacgcggacaatttcaaggcggccatcggcgacaacaccaaggccatcttcatcgaaagcctggccaatcccggcggcatcgtcgtcgacatcgaggcggtggccaaggtcgcccacgatgccggcatcccgctcatcgtcgacaacaccctggcgacgcccttcttgtgccgtccgttcgagtggggggcggacatcatcgtccattccaccaccaaattcctggccgggcacggcaattccctgggcggctgcgtcatcgaatcgggcaagttcgactggtcggccaacggcaagttccccagcctgtcggcgccggaaccggcctatcacggcctgaccttccacgaaaccttcggcgatttcgccttcaccaccaaggcccgcgccgtggcgttgcgcgatttcggcccggccatggcgcccatgaacgcctttttcaccatcaccggcatcgagaccctgcatgtgcgcatggagcgccactgcgccaatgccatgaaagtggccgagttcctggccgcccatccggcggtggaatgggtgtcctatgccggattgccgggcagcaaatatgcggccttgcgcgataaatacctgcccttgggcgccggcgcggtgttcaccttcggcctcaagggcggcttcgaggccggcaagaagctggtggagaaggtccgcctgttcagccatctggccaatatcggcgacacccgctcgctgatcctgcatccggccagcaccacccaccggcaattgaccgaggaacagcagatcaccgccggcgccggccccgaggtcatccgcctgtcggtgggcctcgaggacgcagccgacctgatccgcgatctcgaccgggccttgtcctga

SEQ ID NO: 13991 - protein, 599 aa, Magnetospirillum gryphiswaldense
MSAASLDYTDDFLRQILRSVRTIAVVGASSNWNRPSYFVTKYLQEKGYRVIPVNPGLAGQQLLGETVYADLASIPEPVDMVDIFRNSAAAGPIADQAVAIGAKVVWMQLSVRNDEAAARAQAAGLKVVMDRCPKIEFGRLGGELGWYGVNSGIITNKAKEAPRPKRDKGTGEENQEKQEFGFATKAVHAGAAPDAATGARTTPIYQTASYVFEDTDHAASLFNLHSFGYIYSRLTNPTVSVLEERVASLEGGRAAVAAASGHAAQFLTFFTLLEPGDHFVASRNLYGGSLTQFGLSFKKLGWHCTFVDPHDADNFKAAIGDNTKAIFIESLANPGGIVVDIEAVAKVAHDAGIPLIVDNTLATPFLCRPFEWGADIIVHSTTKFLAGHGNSLGGCVIESGKFDWSANGKFPSLSAPEPAYHGLTFHETFGDFAFTTKARAVALRDFGPAMAPMNAFFTITGIETLHVRMERHCANAMKVAEFLAAHPAVEWVSYAGLPGSKYAALRDKYLPLGAGAVFTFGLKGGFEAGKKLVEKVRLFSHLANIGDTRSLILHPASTTHRQLTEEQQITAGAGPEVIRLSVGLEDAADLIRDLDRALS

SEQ ID NO: 13992 - DNA, 1149 bp, Magnetospirillum gryphiswaldense
  CDS (1)..(1149): transl_table=11
atggctgaggtcaaacacgggcggccggaaaccctggccgcccaagccttgggcgtggtggatgcggcgacgggggcgttgatcccgccgctccatccctccaccacctatgaacgcgaggccgacggcggctatccccgtggccgcgtctatgcccgcgccgacaaccccacctacgacagcgccgcccacaccctgaacgcgctggaaggcggtgccgccaccttgctgttcgcctccggcatggccgccgccaccgctgctttcctggccttgcagcctggtgatcacgtgctggcgcccaaggtgatgtactgggcgctgcggtcgtggttgttgggcttcgccagcgattgggggctggtggtggaactggtcgacaccaccgatctgggggccgtcgccaccgccctgcgccccggcaagaccaaattggtgtgggtggaaagtccggccaacccgctgtggtcggtgaccgacatcgccgccatggctgaactggcccatgccgccggcgcccggctggcggtggattccaccatcgccaccccggtgctgacccgtccgctggaattgggggccgatctggtcatgcattcggcgaccaaatacctgaacggccattccgacgtggtcgccggaaccctgaccacggcccaggtcgatgaatactggacccgcgtcaagacggtgctggggcagaatggcggcatccttggcaccttcgaggcgtggttgctgcaacgcggcctgcgcaccttgttcccccgtgtccgctggcaatgcgccagcgcccaaagtctggccgagcggctgcaagccttgccccaaatcaccgatgtgctgtatcccggcctgcccactttccccggccacgatctggcgcggcggcagatgcgcggcggcttcggcggtatgctgtcgatccgcatcgctggtggtcgcgatgccgccctggccgtgactgggcggctgaaggtgtggaagcgggccacgtcgctgggcggggtggaaagcttggtcgagcaccgcgccagcatcgaaggcccatcctcgccggttcccgacgacctgctgcggttgtcggtgggggtcgaggcggtcgacgacctgttcgacgatctcacgcaggccgttgatggtgagtag

SEQ ID NO: 13993 - protein, 382 aa, Magnetospirillum gryphiswaldense
MAEVKHGRPETLAAQALGVVDAATGALIPPLHPSTTYEREADGGYPRGRVYARADNPTYDSAAHTLNALEGGAATLLFASGMAAATAAFLALQPGDHVLAPKVMYWALRSWLLGFASDWGLVVELVDTTDLGAVATALRPGKTKLVWVESPANPLWSVTDIAAMAELAHAAGARLAVDSTIATPVLTRPLELGADLVMHSATKYLNGHSDVVAGTLTTAQVDEYWTRVKTVLGQNGGILGTFEAWLLQRGLRTLFPRVRWQCASAQSLAERLQALPQITDVLYPGLPTFPGHDLARRQMRGGFGGMLSIRIAGGRDAALAVTGRLKVWKRATSLGGVESLVEHRASIEGPSSPVPDDLLRLSVGVEAVDDLFDDLTQAVDGE

SEQ ID NO: 13994 - DNA, 1203 bp, Vitis vinifera
  CDS (1)..(1203)
  misc_feature (138)..(138): s is g or c
  misc_feature (696)..(696): y is t or c
  misc_feature (921)..(921): y is t or c
  misc_feature (972)..(972): r is g or a
  misc_feature (1108)..(1108): k is g or t
  misc_feature (1125)..(1125): r is g or a
atggctacgagcgttgttcacgcgggaaagaagagaaagggggcggacgatgaagatcatttagtggccaagaaatcagcatcgttgccagcggtggcgaagggggaagatccgatggcagcattggcgatggcgcgscacgagttcggcgaacacgggggcgtgaatatgtcgatcgaagcgtcggcgacgttcacggtgatggaaccggacaccatgcggcggatgttctccggtgagctgggtccggaccgcgatttcttcatctacagccgtcacttcaaccccaccgtgctaaacctcagccgccagatggcggcgctggagggcaccgaggcggcgtactgcacttccagcgggatgtcggcgatctcggcggcgctgttgcagctctgcagcagcggcgaccacatcgtggcgtcgcggactctgaagaacaaggttttgtacttcgaggccattgccaatcccgttctttccgtcgctaacgtgcctgaactctgccgtgtggcacacgataagggcctaacagtggtcgtcgacaacaccttcgctccgatggttatgtcgccggcgaaactcggagccgatgttgtcgttcatagtatttccaaatttatcagcggcggagccgacatcatcgcaggtgctgtgtgtgggcctgcaaagctggtgaactccatgatggacctccaycaaggtgccctaatgctgttgggcccaactatgaaccccaaggtggcattcgaactatcagagagaatcccccacctgggcctccgcatgaaagagcactgccgcagggccctggagtacgccacgaggatgaagaaactaggcctcaaagtcatctacccaggcctggaaggccacccagaccacaccgtcctcaaatctattgccaacctcgactacggcttyggtgggctcctctgcttggacatgggcacggaagagaaggcgaaccgcttratgaacctcttgcagaactccacccagttcgggttcatggctgtgagcttgggctactacgagaccctcatgtcttgctccgggagtagcaccagcagtgagatgaacgctgaggagaaggctctggctgggattkcacctgggttggtgagratgtcagttgggtatagcgggactttggagcagagatggagccagttcgagaaggcactgtcgagaatgcagggatga

SEQ ID NO: 13995 - protein, 400 aa, Vitis vinifera
  misc_feature (370)..(370): The Xaa at location 370 stands for Ala, or Ser.
MATSVVHAGKKRKGADDEDHLVAKKSASLPAVAKGEDPMAALAMARHEFGEHGGVNMSIEASATFTVMEPDTMRRMFSGELGPDRDFFIYSRHFNPTVLNLSRQMAALEGTEAAYCTSSGMSAISAALLQLCSSGDHIVASRTLKNKVLYFEAIANPVLSVANVPELCRVAHDKGLTVVVDNTFAPMVMSPAKLGADVVVHSISKFISGGADIIAGAVCGPAKLVNSMMDLHQGALMLLGPTMNPKVAFELSERIPHLGLRMKEHCRRALEYATRMKKLGLKVIYPGLEGHPDHTVLKSIANLDYGFGGLLCLDMGTEEKANRLMNLLQNSTQFGFMAVSLGYYETLMSCSGSSTSSEMNAEEKALAGIXPGLVRMSVGYSGTLEQRWSQFEKALSRMQG

SEQ ID NO: 13996 - DNA, 1530 bp, Zea mays
  CDS (1)..(1530)
atggccactgtctcgctcaccccgcaggctgtcttctccacggagtccggtggcgccctggcctctgctaccatcctccgctttccgccaaactttgtccgccagcttagcaccaaggcacgccgcaactgcagcaacatcggcgtcgcgcagatcgtcgccgccgcgtggtccgactgccccgccgctcgcccccacttaggcggcggcggccgccgcgcccgcggcgtggcctcctcccacgccgcggctgcatcggccgccgccgccgcctccgcggcggcggatgtcagcgcaattcctaacgctaaggttgcgcagccgtccgccgtcgtattggccgagcgtaacctgctcggctccgacgccagcctcgccgtccacgcgggggagaggctgggaagaaggatagccacggatgctatcaccacgccggtagtgaacacgtcggcctactggttcaacaactcgcaagagctaatcgactttaaggaggggaggcatgctagcttcgagtatgggaggtatgggaacccgaccacggaggcattagagaagaagatgagcgcactggagaaagcagagtccaccgtgtttgtggcgtcagggatgtatgcagctgtggctatgctcagcgcacttgtccctgctggtgggcacattgtgaccaccacggattgctaccgcaagacaaggatttacatggaaaatgagctccctaagaggggaatttcgatgactgtcattaggcctgctgacatggatgctctccaaaatgccttggacaacaataatgtatctcttttcttcacggagactcctacaaatccatttctcagatgcattgatattgaacatgtatcaaatatgtgccatagcaagggagcgttgctttgtattgacagtactttcgcgtcacctatcaatcagaaggcattaactttaggtgctgacctagttattcattctgcaacgaagtacattgctggacacaatgatgttattggaggatgcgtcagtggcagagatgagttagtttccaaagttcgtatttaccaccatgtagttggtggtgttctaaacccgaatgctgcgtaccttatccttcgaggtatgaagacactgcatctccgtgtgcaatgtcagaacgacactgctcttcggatggcccagtttttagaggagcatccaaagattgctcgtgtctactatcctggcttgccaagtcaccctgaacatcacattgccaagagtcaaatgactggctttggcggtgttgttagttttgaggttgctggagactttgatgctacgaggaaattcattgattctgttaaaataccctatcatgcgccttcttttggaggctgtgagagcataattgatcagcctgccatcatgtcctactgggattcaaaggagcagcgggacatctacgggatcaaggacaacctgatcaggttcagcattggtgtggaggatttcgaggatcttaagaacgatctcgtgcaggccctcgagaagatctaa

SEQ ID NO: 13997 - protein, 509 aa, Zea mays
MATVSLTPQAVFSTESGGALASATILRFPPNFVRQLSTKARRNCSNIGVAQIVAAAWSDCPAARPHLGGGGRRARGVASSHAAAASAAAAASAAADVSAIPNAKVAQPSAVVLAERNLLGSDASLAVHAGERLGRRIATDAITTPVVNTSAYWFNNSQELIDFKEGRHASFEYGRYGNPTTEALEKKMSALEKAESTVFVASGMYAAVAMLSALVPAGGHIVTTTDCYRKTRIYMENELPKRGISMTVIRPADMDALQNALDNNNVSLFFTETPTNPFLRCIDIEHVSNMCHSKGALLCIDSTFASPINQKALTLGADLVIHSATKYIAGHNDVIGGCVSGRDELVSKVRIYHHVVGGVLNPNAAYLILRGMKTLHLRVQCQNDTALRMAQFLEEHPKIARVYYPGLPSHPEHHIAKSQMTGFGGVVSFEVAGDFDATRKFIDSVKIPYHAPSFGGCESIIDQPAIMSYWDSKEQRDIYGIKDNLIRFSIGVEDFEDLKNDLVQALEKI

SEQ ID NO: 13998 - DNA, 1530 bp, Zea mays
  CDS (1)..(1530)
atggccactgtctcgctcaccccgcaggctgtcttctccacggagtccggtggcgccctggcctctgctaccatcctccgctttccgccaaactttgtccgccagcttagcaccaaggcacgccgcaactgcagcaacatcggcgtcgcgcagatcgtcgccgccgcgtggtccgactgccccgccgctcgcccccacttaggcggcggcggccgccgcgcccgcggcgtggcctcctcccacgccgcggctgcatcggccgccgccgccgcctccgcggcggcggaggtcagcgcaattcccaacgctaaggttgcgcaaccgtccgccgtcgtcttggccgagcgtaacctgctcggctccgacgccagcctcgccgtccacgcgggggagaggctgggaagaaggatcgccacggatgcgatcaccacaccggtagtgaacacgtcggcctactggttcaacaactcgcaagagctaatcgactttaaggaggggaggcatgctagcttcgagtatgggaggtatgggaacccgaccacggaggcattagagaagaagatgagcgcactggagaaagcagagtccacagtgttcgtggcatcggggatgtatgcagctgcggctatgctcagtgcacttgttccggctggtgggcacattgtgaccaccacggattgctaccggaaaacaaggatttacatggaaactgagctccccaagaggggaatttcgatgactgtcattaggcctgctgacatggatgctctacaaaatgcgttggacaacaataatgtatctcttttcttcacggagactcccacaaatccatttctcagatgcattgatattgaacatgtatcaaatatgtgccatagcaagggagcgttgctttgtatcgacagtacttttgcctcccctatcaatcagaaggcactgactttaggcgctgacctagttattcattctgcaacaaagtacattgctggacacaacgatgttattggaggatgcgtcagtggcagagatgagttggtttccaaagtccgtatttatcaccatgtggttggtggtgttctaaacccgaatgctgcgtaccttatccttcgaggcatgaaaacacttcatctccgtgtgcaatgtcagaataacactgctcttcggatggcccagtttttagaggaacatctaaagattgcccgtgtctactatcctggcttgcctagccaccctgaacatcacattgccaagagtcaaatgactggctttggtggtgtggttagttttgaggttgctggagactttgatgccacaaggaaattcatcgattctgttaagataccctatcatgccccttctttcggaggctgtgagagcataattgatcagcctgctatcatgtcctactgggattcaaaggagcagagggacatctatgggatcaaggacaacctgatcaggttcagcattggagtggaggattttgaggaccttaagaatgatcttgttcaggccctcgagaagatataa

SEQ ID NO: 13999 - protein, 509 aa, Zea mays
MATVSLTPQAVFSTESGGALASATILRFPPNFVRQLSTKARRNCSNIGVAQIVAAAWSDCPAARPHLGGGGRRARGVASSHAAAASAAAAASAAAEVSAIPNAKVAQPSAVVLAERNLLGSDASLAVHAGERLGRRIATDAITTPVVNTSAYWFNNSQELIDFKEGRHASFEYGRYGNPTTEALEKKMSALEKAESTVFVASGMYAAAAMLSALVPAGGHIVTTTDCYRKTRIYMETELPKRGISMTVIRPADMDALQNALDNNNVSLFFTETPTNPFLRCIDIEHVSNMCHSKGALLCIDSTFASPINQKALTLGADLVIHSATKYIAGHNDVIGGCVSGRDELVSKVRIYHHVVGGVLNPNAAYLILRGMKTLHLRVQCQNNTALRMAQFLEEHLKIARVYYPGLPSHPEHHIAKSQMTGFGGVVSFEVAGDFDATRKFIDSVKIPYHAPSFGGCESIIDQPAIMSYWDSKEQRDIYGIKDNLIRFSIGVEDFEDLKNDLVQALEKI

SEQ ID NO: 14000 - DNA, 1638 bp, Fragaria vesca
  CDS (1)..(1638)
atgggcgtgtacacgtgtcctagggttttcacctcctcctcctcctcctccacctactgctgccgccaccaccccgacctcgccacccgcgccgccgtcaatccccgccccggcttcgccgcaggccgcgtcgactctccggcgccgtttcacggcctatcgtcactcatcctccgcttccctcccaacttcgtccgccagctcagcaccaaggcccgccgcaactgcagcaacatcggcgtcgcgcagatcgtcgcggcttcgtggtccaacaaagactccgacctttcggcggtgccggcggctagtgccgtcgatgccgccgccaccgccgccgatctggtcgtcccggcccagatcgggaccgaggatgacctggcggccgtggatgcggagtacgccgtgtttgggaacggtgtacagttaggaggcttgcctgatttgaaggacgcctcgtttttaagctccgatgggagcatcgcaattcatgccggtgaaagattgggtcgcggtatagtgactgatgcaattacaaccccggtggttaatacttctgcttactttttcaagaaaactgctgacctccttgatttcaaggagaagcgcgcgacgagttttgaatacgggcgctatggaaacccaactaccgtggttcttgaggaaaagattagtgctcttgaaggagcggaatctacactgttgctagcttccggaatgtgtgctagcacggtcttgttgatggctttggttccagctggtgggcatattgtgacaacaacagactgctacaggaagactcggatatttattgagaccatccttcccaaaatggggatcacggcaacaattattgaccctgctgatgttggagcactagaaactgcactgaatgagaataaagtttctcttttcttcacagaatctcctacaaaccctttcctaaggtgtgtggacattaatttggtttcagatctttgccatagcaaaggggcagtagtctgtataaatggcacttttgccacacctataaatcaaaaggcccttgctcttggggctgatcttgttgtgcactctgcaacaaaatatcttgctggccacaatgatgtccttgctggttgcattagcggttcaatgaaattggtttccgaaattcgtatattgcatcatattttgggtggtgctcttaacccgaatgctgcatacctgatcattcgaggcatgaagactttgcatattcgtatacagcaacagaattctactgcattgaggatggccaaaattttagaggcgcatcctaaggtggcgcacgtctattatcctggtttgccaagtcatcctgaacatgagcttgccaagaggcagatgactggtttcggtggtgttgtcagttttgagattgatggagacttgaagagaacaattaagttcattgatgccctgaaaataccatatattgccccctcctttggtggttgtgagagcatcgtggatcagccagccataatgtcttattgggatctcagccagtcagataggctcaagtacggaatcaaggataacctggtccgtttcagcttcggtatcgaagacttcaatgatcttaaggctgacattctgcaggccctggagaaaatatag

SEQ ID NO: 14001 - protein, 545 aa, Fragaria vesca
MGVYTCPRVFTSSSSSSTYCCRHHPDLATRAAVNPRPGFAAGRVDSPAPFHGLSSLILRFPPNFVRQLSTKARRNCSNIGVAQIVAASWSNKDSDLSAVPAASAVDAAATAADLVVPAQIGTEDDLAAVDAEYAVFGNGVQLGGLPDLKDASFLSSDGSIAIHAGERLGRGIVTDAITTPVVNTSAYFFKKTADLLDFKEKRATSFEYGRYGNPTTVVLEEKISALEGAESTLLLASGMCASTVLLMALVPAGGHIVTTTDCYRKTRIFIETILPKMGITATIIDPADVGALETALNENKVSLFFTESPTNPFLRCVDINLVSDLCHSKGAVVCINGTFATPINQKALALGADLVVHSATKYLAGHNDVLAGCISGSMKLVSEIRILHHILGGALNPNAAYLIIRGMKTLHIRIQQQNSTALRMAKILEAHPKVAHVYYPGLPSHPEHELAKRQMTGFGGVVSFEIDGDLKRTIKFIDALKIPYIAPSFGGCESIVDQPAIMSYWDLSQSDRLKYGIKDNLVRFSFGIEDFNDLKADILQALEKI

SEQ ID NO: 14002 - DNA, 1176 bp, Xanthomonas maltophilia
  CDS (1)..(1176): transl_table=11
  misc_feature (105)..(105): y is t or c
  misc_feature (387)..(387): y is t or c
  misc_feature (447)..(447): y is t or c
  misc_feature (540)..(540): y is t or c
atgtccaacgctacttcccaggatcgcgccctggccctggctactctggccatccacggtggccagtcgccggaccccagcactggcgcggtaatgccgccgatytacgccacctcgacctatgcgcagtccagcccgggcgagcatcagggcttcgagtactcgcgtacccacaacccgacccgcttcgcctatgagcgttgcgtggcatcgctggaaggtggcacccgcggcttcgctttcgcctcgggcatggcggcgagctcgaccgtgatcgaactgctggacgccggcagtcacgtggtggcaatggacgatatttacggcggcagcttccgcctgttcgagcgggtgcgtcgccgcaccgccgggctggacttcagcttygtcgacctgaccgatctggccgcgttcgaagccgccatcacgtcgaagacgaagatggtytggattgagaccccgaccaacccgatgctgaagattgttgacatcgccgcggtcaccgccatcgccaagcgccatggcctgattgtggtggtygacagcaccttcgcctcgccgatgctgcagcgtccgctggagctgggtgcggacctggtcctgcattcggccaccaagtacctcaacggtcactcggacatggtcggcggcatggtcgtggtcggcgacaacgccgaactggccgagcagatggccttcctgcagaactcggtgggtggcgtgcagggcccgttcgacagcttcttggccctgcgtggcctgaagaccctgccgctgcgcatgaaggcgcactgcgccaacgcgctggcgctggcccagtggctggaaaagcacccggcggtggagaaggtgatctacccgggtctggcctcgcatccgcagcatgaactggccggcaagcagatggccggttacggcggcatcgtctcgatcgtgctcaagggcggtttcgaagcggccaagcgcttctgcgagaagaccgaactgttcaccctggccgagtcgctgggcggcgtggaaagcctggtcaaccacccggcggtgatgacgcacgcctcgatttcggtcgcgcggcgggaacagctgggtatcagcgatgcgctggtaaggctgagcgtgggcgtggaggagctgggggatctgcaggtggatctggagcgggcgctgggcggctga

SEQ ID NO: 14003 - protein, 391 aa, Xanthomonas maltophilia
MSNATSQDRALALATLAIHGGQSPDPSTGAVMPPIYATSTYAQSSPGEHQGFEYSRTHNPTRFAYERCVASLEGGTRGFAFASGMAASSTVIELLDAGSHVVAMDDIYGGSFRLFERVRRRTAGLDFSFVDLTDLAAFEAAITSKTKMVWIETPTNPMLKIVDIAAVTAIAKRHGLIVVVDSTFASPMLQRPLELGADLVLHSATKYLNGHSDMVGGMVVVGDNAELAEQMAFLQNSVGGVQGPFDSFLALRGLKTLPLRMKAHCANALALAQWLEKHPAVEKVIYPGLASHPQHELAGKQMAGYGGIVSIVLKGGFEAAKRFCEKTELFTLAESLGGVESLVNHPAVMTHASISVARREQLGISDALVRLSVGVEELGDLQVDLERALGG

SEQ ID NO: 14004 - DNA, 1647 bp, Mesembryanthemum crystallinum
  CDS (1)..(1647)
atggccgccatcacgagcagctgctgtgctagggttttgcccccatttgaatgccgccctgagccagcagacttctccactgccgccgccaagcaagagaagaacatccccaaatccttcttcggcggcgccaatggccgcctcttctcctcctcttcttcctctcttatccttcgctttcctcccaactttgtccgtcagctcagcaccaaggctcgccgcaactgcagcaacattggtgtcgcacaggtcgtcgctgcctcctggtccaacaactccgatgccggcgccacctcttgcggtggcgttccggctgctactgccgtcgacgctgccgctatcgccgccgtcgatcatgtggagatcgatggtggtgctgtagttgaggattctaatgatggtggtgtaaaggagttgtcttctaataatagtaatactttggggttgggtgatttcaggcccccatttttaagctccgatgggagcgttgcaattcatgccggtgagagattaggtcgtggcatagtcactgatgcaataactaccccggtagtaaatacttctgcatacttcttcaagaaaactgctgacctcattgattttaaggaggggcgccaaactagctttgagtatggtcgatatggaaatcctacctcagtggttttggaagataagattagtgcgcttgaaggagctgaatcaacaatattgttggcatccggaatgtgtgcaagtattgttctcatgttggctttggttccagctggtggtcatattgtgactactactgactgttatcggaagaccagaatatttattgagactttccttcccaaaatggggatcacggctacagtcattgaccctgctgatgtcgaaggccttaagtctgctcttgatgaaaataatgttactctattcttcactgagtctccgaccaatccatttcttaggtgtgttgacatcaagctggtctcagaactttgccacaagaaaggagcattggtctgcattgatggaacatttgccacacctctgaaccagaaggcccttgctctaggcgctgactttgttgtgcattctatgacaaaattcattggtggacacaatgatgttcttggtggttgcatcagtggttcgaaaaatttgatttcaactattcgaacttttcatcatgtccttggcgggactcttaacccgaatgctgcatatttaatgattcgaggcatgaagaccctccatcttcgtgtacagcaacagaacactacagcactgaggatggccgaaattttagaggcacatcccaaggtgaagcacgtttattatccaggtcttccaagtcatcctgagcacaagctggcaaagcggcaaatgactggctttggcggagtggttagttttgaggttgatggagatttattgaccaccgcgaagtttgttgattcattgaagattgcttatattgctccatcatttggaggctgtgaaagcattgtggatcagcctgcgatcatgtcttactgggatcttagtccatctgacaggctgaaatatggtatcaaggataacttggttcggttcagttttggagttgaggactttgaagatttgaaggctgatgttcttcaggctctggaggccatatga

SEQ ID NO: 14005 - protein, 548 aa, Mesembryanthemum crystallinum
MAAITSSCCARVLPPFECRPEPADFSTAAAKQEKNIPKSFFGGANGRLFSSSSSSLILRFPPNFVRQLSTKARRNCSNIGVAQVVAASWSNNSDAGATSCGGVPAATAVDAAAIAAVDHVEIDGGAVVEDSNDGGVKELSSNNSNTLGLGDFRPPFLSSDGSVAIHAGERLGRGIVTDAITTPVVNTSAYFFKKTADLIDFKEGRQTSFEYGRYGNPTSVVLEDKISALEGAESTILLASGMCASIVLMLALVPAGGHIVTTTDCYRKTRIFIETFLPKMGITATVIDPADVEGLKSALDENNVTLFFTESPTNPFLRCVDIKLVSELCHKKGALVCIDGTFATPLNQKALALGADFVVHSMTKFIGGHNDVLGGCISGSKNLISTIRTFHHVLGGTLNPNAAYLMIRGMKTLHLRVQQQNTTALRMAEILEAHPKVKHVYYPGLPSHPEHKLAKRQMTGFGGVVSFEVDGDLLTTAKFVDSLKIAYIAPSFGGCESIVDQPAIMSYWDLSPSDRLKYGIKDNLVRFSFGVEDFEDLKADVLQALEAI

SEQ ID NO: 14006 - DNA, 1182 bp, Drosophila melanogaster
  CDS (1)..(1182)
atgagctacagagtccagccgagcggcttcgccaccaagtccatccactcgggccaaagccccgaccagtggaagagtgctgccgtgattccgccgatatcgctgagcaccaccttcaagcaagatgcaccgggcgagcacaggggctatgagtactcccgcagtggaaatcccactaggaacgtgctggagacatgcttcgccgccttggataatgccaaatacggcctcacgttctcatcgggattgggagccaccaccgctgtgctaactatgctgagcagcggcgatcacatcatcatgggcgacgatgtttacggaggcaccaaccgtttgatccgacaggttgccacccgtctgggaatctcagccacctttgtggatcccacgaagttggatctaattaaaagttccatcaagccggagaccaaattggtgtggatcgagtcaccaactaatccattggtaaaggtagccgacatcgaggctattgcgcagctggtccatggagtacgcgaggatatcgtcctggccgtcgacaacaccttcctgacctcctacttccagcgacccttggagctgggcgctgatctggtctgctactccctgaccaagtacatgaacggtcatacggatgtggtcatgggtggcatcaccatgaactcggagaagctctacaaaagcttgaagttcctgcagaacgcagtggacattgtgccgtctccattcgactgctatcaggtgaacagaagtcttaagacgctctcgctgcgcatggaacagcaccagaagaatgctctgaaggttgccaaatacctggagacgaatccgttcgtggagaaggtgttgcatccctctttgccatcccatccgcagcacaagatcgctctgaagcaggcctacggatacagcggcgtgttctccttctacattaagggcgagctgaagcactcctcggctttcctcaaggccctcaaggtgttcaccctggcggagagtctgggtggctacgagagtctggccgagctgccatccataatgacccatgcctcggttccggcggaggataggaaaactttgggcatcactgacggtctagttcgcttgtccgtcggactggaggatgccgatgatttgatcaaggatctggagcaggcccttgaaattgcatcgaaggcctaa

SEQ ID NO: 14007 - protein, 393 aa, Drosophila melanogaster
MSYRVQPSGFATKSIHSGQSPDQWKSAAVIPPISLSTTFKQDAPGEHRGYEYSRSGNPTRNVLETCFAALDNAKYGLTFSSGLGATTAVLTMLSSGDHIIMGDDVYGGTNRLIRQVATRLGISATFVDPTKLDLIKSSIKPETKLVWIESPTNPLVKVADIEAIAQLVHGVREDIVLAVDNTFLTSYFQRPLELGADLVCYSLTKYMNGHTDVVMGGITMNSEKLYKSLKFLQNAVDIVPSPFDCYQVNRSLKTLSLRMEQHQKNALKVAKYLETNPFVEKVLHPSLPSHPQHKIALKQAYGYSGVFSFYIKGELKHSSAFLKALKVFTLAESLGGYESLAELPSIMTHASVPAEDRKTLGITDGLVRLSVGLEDADDLIKDLEQALEIASKA

SEQ ID NO: 14008 - DNA, 1401 bp, Ostreococcus tauri
  CDS (1)..(1401)
atgtgcgatcgatcgcgacgcgattcccatcgatcgcgctcgcgacacacgccgacgccgtcgatcgacccgcgttcgcccgcacagacgccaaacatgcccgcccccgagctgaagtttgaaaccttacaggtccacgcgggccaagcccccgatcccgcgacgaattcgcgcgcggtcccgatctacgccacgtcgagttacaccttcaattcgagcaagcacggcgccgatctgttcggcctgcgcgcgttcgggaacatttactcgcgaatcatgaacccgacgaacgatgtgttcgaaaagcgcgtcgcggcgctggagggtggcgtcggcgcgctcgcggtgtcgagcgggcagagcgcgcaattcttggccatctcgaccatctgtcagtgcggcgataacatcgtcgccacgccgtcgttgtacggtggaacgtacaatcaatttaaagtgacgctgccgaggttggggatcaacgtgaagttcgcgaaggatgacgatccggcgagcttcgaggcgttgattgacgcgaacacgaaggcgctgtacgtggaaaccatcgggaacccgaggtttgcggtgccgaactttgccaagctcaaggcgatcgcgagtaaggctgggattccgttgatctgcgataacacgttcgggggctgcggatacgtgtgccagccgctcaagcacggcgcggatattgtcgtggagagcgcgacgaagtggatcggcggtcacggcacaaccgttggcggcgtcatcgtcgacggtggcaccatgaactggaacaacggtaaacacccgatcatgaccgagccctctccggggtatcacggcctgaagttctgggacacgttcggtccggacggcatcttgggcgcgaacgccacgttcatcatgcgctgccgagtcgagggccttcgagatctcggcatgtgccagaacccgttcggttctttcaactttatcattggcttagagacgctctctcttcgcatggagcgtcactgctcgaacaccctggcgctcgcaaagttcttggactcgcatccgcaagtcagctgggtttcgtacccgggcctcaagtctcacccgttccaccagctcgcgttggagtacttccgcgagggtaacttcggcgctgtgctcacgttcggcatcaagggcggtctcgacgctggcatgaagttcatcgatagcgtcaagcttgcctcgcatttggcgaacgtaggcgacgccaagacgctcgtcatccacccggcatccacgacgcacgaacaactcagtgcagaagagcaaaaggcctccggtgtgtctccggatatgattcgcgtctccgtcggcatcgagcacatcgacgatatctgcgccgatttcgcccaagcgctcactgcgtaa

SEQ ID NO: 14009 - protein, 466 aa, Ostreococcus tauri
MCDRSRRDSHRSRSRHTPTPSIDPRSPAQTPNMPAPELKFETLQVHAGQAPDPATNSRAVPIYATSSYTFNSSKHGADLFGLRAFGNIYSRIMNPTNDVFEKRVAALEGGVGALAVSSGQSAQFLAISTICQCGDNIVATPSLYGGTYNQFKVTLPRLGINVKFAKDDDPASFEALIDANTKALYVETIGNPRFAVPNFAKLKAIASKAGIPLICDNTFGGCGYVCQPLKHGADIVVESATKWIGGHGTTVGGVIVDGGTMNWNNGKHPIMTEPSPGYHGLKFWDTFGPDGILGANATFIMRCRVEGLRDLGMCQNPFGSFNFIIGLETLSLRMERHCSNTLALAKFLDSHPQVSWVSYPGLKSHPFHQLALEYFREGNFGAVLTFGIKGGLDAGMKFIDSVKLASHLANVGDAKTLVIHPASTTHEQLSAEEQKASGVSPDMIRVSVGIEHIDDICADFAQALTA

SEQ ID NO: 14010 - DNA, 1302 bp, Ostreococcus tauri
  CDS (1)..(1302)
atggggcgacacccgacgcgcggacgaagggatggacgaccgacgggcgcgcgtcgagcgacgacgggacgacgcgacggcgcgcgcgggcgaacgacgcgggcgacgacggagccgagcgagccgaacccgcgggagtataagatggcgaccaagttggcgcacgcgaagacgagcgtgcgggacccgtacgcggcgtcgtcgccgccgttgtatcagacggcgacgtttgcgcagccgaacgcgacggagaacggaccgtacgattacacgaggagtgggaacccgacgcggacgcagttggaggagcagatggcgtacctggaggacgcggaccgggcgttcgcgttttcgtccggaatgtcggcgctcacgtgcgtgacgcgattggtgaacgcgggtgagcggatcgtgaccggagacgatatttacggtgggacgtcgcgattgctcgcgcaggtcgtgcccaaggttgggatcgaggtcgtgaacgtggacatgaaggatcttgacgcggtgcgcgcggccattgctggagggaagaccaccatggtcatgatggagtccccgacgaaccctcgattgcaggtgatcgacatcaaggcgatctgcgacatggcgcacgacaaaggtgcgctcgtgtgcgtcgataactcgatcatgtgcccgacgttccagtcgccgctcgcgctcggcgccgacatctcgatgacgtcggcgaccaagttcatcgccgggcactccgatgtcaccggtggtttactcgcggtgaagggcgaggaggttggaaagaggatttacttccaccaaaacgccgagggtctgcacctcgccccgttcgattgctggctggcgcttcgcgggctgaagacgatgcagttgcgcatggagcgccaacaggcaaacgcgatgaagctcgcgaagtggttggaatcgcatccgcgcgtgcaaaatgtcaactatccgggattgaagaacaatgtcggtcacgatttgcacttccgtcaagcgtccggagctgggtctatcttttcgttcaccaccggagacgtggagttctcgaagatcgtcgtggaggagaccaagcttcataaaatcaccgtctctttcggtggcacgacctctttgatctccctcccgtgcttcatgtctcacgcgagcattcccgccgaggttcgcgccgctcgcggcttgccagacgatctcgttcgcattagctgcggcatcgaggatggcgatgacttattggccgacttgcagtacgccttcgccgtggcagaggttcgcgtgggcaagaagtga

SEQ ID NO: 14011 - protein, 433 aa, Ostreococcus tauri
MGRHPTRGRRDGRPTGARRATTGRRDGARGRTTRATTEPSEPNPREYKMATKLAHAKTSVRDPYAASSPPLYQTATFAQPNATENGPYDYTRSGNPTRTQLEEQMAYLEDADRAFAFSSGMSALTCVTRLVNAGERIVTGDDIYGGTSRLLAQVVPKVGIEVVNVDMKDLDAVRAAIAGGKTTMVMMESPTNPRLQVIDIKAICDMAHDKGALVCVDNSIMCPTFQSPLALGADISMTSATKFIAGHSDVTGGLLAVKGEEVGKRIYFHQNAEGLHLAPFDCWLALRGLKTMQLRMERQQANAMKLAKWLESHPRVQNVNYPGLKNNVGHDLHFRQASGAGSIFSFTTGDVEFSKIVVEETKLHKITVSFGGTTSLISLPCFMSHASIPAEVRAARGLPDDLVRISCGIEDGDDLLADLQYAFAVAEVRVGKK

SEQ ID NO: 14012 - DNA, 1611 bp, Medicago sativa
  CDS (1)..(1611)
  misc_feature (327)..(327): n is a, g, c or t
atggccgtttcaagtttccaccgcgttttcaccttcgaatgccgttccgatcccgatttcacatcccttccatccactgacaaccaccaccacaaccgccgtcgtcatttcccaacaacctccctttcctccgccgccgccatctcctccccaatcctccgttttcctcccaatttccaacgtcaactcagcaccaaagcgcgtcgtaactgcagcaacatcggtgttgcacaaatcgtcgctgcttcgtggtctaatgaaggaactgggaaccccagcggaatcgctggttcggactccggtgccggctgttgcatctgctgttgntgcaacgacttcgccggtgccgttagacctcgacgccgatgtcgccgatgggatgtcgtcgaaaatggggctgtacagactaaccgtagttcttattcttcgtttttgaaatccgatgcaagcaaaacgattcatgccgctgagagacttggtagggctattgtgactgatggaattaccactcctgtggtgaacacttctgcctacttttttaagaaaactgctgatcttattgattttaaggagaaacgtcaaactagttatgaatatgggcgctatggcaacccaaccagtactgttttggaggagaagataagtgaactggaaggggctgagtcaactatcttgatggcatctgggatgtgtgctagcgtagtcttgttcatggcgctggttccagccggtggacatcttgtgactactactgattgttacaggaagactaggatatttatagagacttttcttccaaagatggggatcacgacaaccgtgattgatcctgctgatgttggagccttggaatctgctttggagcagcacaacgtgtctctattcttcactgagtctcctaccaatccattcctgagatgtgttgacattaagctggtttcagaactttgccacaagaaagggactttgctctgcattgatggtacatttgctacgcctttgaaccagaaggcccttgcccttggggctgatttaattttgcactctttgacgaagtacatgggtggacatcatgatgtacttggtggttgcatcagtggctctatcaaggtggtctcacaaattcgaactttgcatcatgttttgggcggtactcttaacccgaatgctgcatacctattcatcagaggcatgaaaacgctgcatcttcgtgtacagcaacagaattcaaccggaatgaggatggccaaacttttagaggcacatcccaaggtgaagcgtgtctactatccaggcttgccaagtcatcctgaacatgagcttgccatgaggcagatgactggttttgggggtgtggtcagttttgagattgatggagatataacaaccacaattaaatttattgattcactaaaaatcccatacattgctgcctcatttggtggctgtgagagcattgtggatcaaccagccattttgtcttactgggaccttcctgcatcagaaagggccaagtggaagatttatgacaatttggttcgattcagctttggaattgaagattttgaggatttgaaggctgatgtcttgcaggcactggaagccatatag

SEQ ID NO: 14013 - protein, 536 aa, Medicago sativa
  misc_feature (109)..(109): The Xaa at location 109 stands for Stop, Cys, or Trp.
MAVSSFHRVFTFECRSDPDFTSLPSTDNHHHNRRRHFPTTSLSSAAAISSPILRFPPNFQRQLSTKARRNCSNIGVAQIVAASWSNEGTGNPSGIAGSDSGAGCCICCXCNDFAGAVRPRRRCRRWDVVENGAVQTNRSSYSSFLKSDASKTIHAAERLGRAIVTDGITTPVVNTSAYFFKKTADLIDFKEKRQTSYEYGRYGNPTSTVLEEKISELEGAESTILMASGMCASVVLFMALVPAGGHLVTTTDCYRKTRIFIETFLPKMGITTTVIDPADVGALESALEQHNVSLFFTESPTNPFLRCVDIKLVSELCHKKGTLLCIDGTFATPLNQKALALGADLILHSLTKYMGGHHDVLGGCISGSIKVVSQIRTLHHVLGGTLNPNAAYLFIRGMKTLHLRVQQQNSTGMRMAKLLEAHPKVKRVYYPGLPSHPEHELAMRQMTGFGGVVSFEIDGDITTTIKFIDSLKIPYIAASFGGCESIVDQPAILSYWDLPASERAKWKIYDNLVRFSFGIEDFEDLKADVLQALEAI

SEQ ID NO: 14014 - DNA, 1161 bp, Klebsiella pneumoniae
  CDS (1)..(1161): transl_table=11
atgacgcgtaaacaggccaccatcgcagtgcgtagcggtttaaatgacgacgagcagtacggttgcgttgtcccgccgattcacctctccagtacctataacttcaccggctttaatgaaccgcgcgcccacgactactcccgtcgtggcaatccgacgcgcgatgtggtgcagcgcgccttagcggagctggagggcggcgccggcgcggtgctgaccaataccggaatgtcggcgatcctgctggtgacgacggtgttccttaaaccgggcgatctgctggtggcgccgcacgactgctacggcggcagctaccgtctgttcgacagcctggcgaagcgcggctgctatcgcgtccagtttgtcgatcaaagcgatgagcaggcgctgcgggcggcgctggcggaaaaaccgaagctggtgttggtggaaagcccaagtaatccattgctgcgggtggtggatattgcgaaaatctgtggtctggcgcgtgaggccggggcaattagcgtggtggacaacaccttcctgagcccggcgttgcaaaacccgctggcgctgggcgccgatctggtgctgcattcctgtaccaaatacctcaatggtcactccgatgtggtggccggggtggtgattgccaaagatccaacaactgtcaccgaactggcatggtgggcgaataatattggcgtcaccggcagcgccttcgacagctatctgctgttgcgcgggctgcggacgctgtctccacggatggaagtggcgcagcgaaatgccctggcgatcgttgagtatctgaaaacccagccgctggtgaaaaagctgtatcatccatcgctgccggaaaaccaggggcatgaaattgcggcgcgtcagcaaaaaggttttggcgcaatgttaagcttcgagcttgacggtgacgagcagacgctgcgccgttttctgagcgggctgtcgctgtttacactggcggaatcgctggggggcgttgaaagcctgatttcccatgcggcaacgatgacgcatgccggcatggcgcctgaagcgcgtgccgccgccggaatttcagaaacgctcctgcgtatatcgaccggtattgaagatggtgaagatttaattgccgacctggaaaatggcttccgggcagcaaacgaggaataa

SEQ ID NO: 14015 - protein, 386 aa, Klebsiella pneumoniae
MTRKQATIAVRSGLNDDEQYGCVVPPIHLSSTYNFTGFNEPRAHDYSRRGNPTRDVVQRALAELEGGAGAVLTNTGMSAILLVTTVFLKPGDLLVAPHDCYGGSYRLFDSLAKRGCYRVQFVDQSDEQALRAALAEKPKLVLVESPSNPLLRVVDIAKICGLAREAGAISVVDNTFLSPALQNPLALGADLVLHSCTKYLNGHSDVVAGVVIAKDPTTVTELAWWANNIGVTGSAFDSYLLLRGLRTLSPRMEVAQRNALAIVEYLKTQPLVKKLYHPSLPENQGHEIAARQQKGFGAMLSFELDGDEQTLRRFLSGLSLFTLAESLGGVESLISHAATMTHAGMAPEARAAAGISETLLRISTGIEDGEDLIADLENGFRAANEE

SEQ ID NO: 14016 - DNA, 1149 bp, Klebsiella pneumoniae
  CDS (1)..(1149): transl_table=11
atgtcatctatccacaccctgagtgtacatagcggaaccttcaccgacagccatggcgcagtgatgccgccgatttatgccacctccacttttgctcagccagcgccggggcagcataccggttatgaatattcccgcagcgggaatcccacccgtcacgcgctggagacggcgatcgccgacctggaaaacggcacgcgcggctacgcgttcgcctccgggctggccgccatctccaccgtgctggagctgctggataaggacagtcatctggtggcggtcgatgatgtgtatggcggcacttaccgcctgctggaaaacgttcgccgccgtagcgctggtctgcaggtgagctgggtgaaacccgacgacctggcgggaattgaagcggcgatccgccccgatacgcgcatgatctgggtggaaacgcccaccaacccgctgctgaagctcgcggatctcagcgccatcgccgccatcgcgcgccgccataacctgatcagcgtcgccgataacacctttgcttcgccggcgatccatcgcccgctggagcatgggtttgatattgtggtgcactccgcgaccaagtacctcaacggccattccgatgtcgtcgccggcctggcggtggttggcgataactccgggctcgcggaaaagcttggctatctgcagaatgcggtaggcggcgtgcttgacccgttcagcagcttcctgacgctgcgcggcatccgtaccctggcgctgcggatggagcgccacagcgcgaacgcgctgcagctcgccgaatggctggaacagcagccggaagtggagcgagtctggtttccctggctggcctcgcacccgcatcatcagctggcgcgccagcaaatggccctgcccggcggcatgatttcggtggtggtgaagggcgatgaaggttacgccgagcgcatcatcagcaagctgcgctggtttacgcttgcggagagcctgggcggcgtggagagtctggtgagccagcccttcagcatgacccatgcctcgatcccgctggagaaacgcctggcgaacggtatcacaccgcagctgatccgcctgtcggtggggatcgaagatcccaacgatctgattgccgactggcagcaggcgctgcgggcggagtga

SEQ ID NO: 14017 - protein, 382 aa, Klebsiella pneumoniae
MSSIHTLSVHSGTFTDSHGAVMPPIYATSTFAQPAPGQHTGYEYSRSGNPTRHALETAIADLENGTRGYAFASGLAAISTVLELLDKDSHLVAVDDVYGGTYRLLENVRRRSAGLQVSWVKPDDLAGIEAAIRPDTRMIWVETPTNPLLKLADLSAIAAIARRHNLISVADNTFASPAIHRPLEHGFDIVVHSATKYLNGHSDVVAGLAVVGDNSGLAEKLGYLQNAVGGVLDPFSSFLTLRGIRTLALRMERHSANALQLAEWLEQQPEVERVWFPWLASHPHHQLARQQMALPGGMISVVVKGDEGYAERIISKLRWFTLAESLGGVESLVSQPFSMTHASIPLEKRLANGITPQLIRLSVGIEDPNDLIADWQQALRAE

SEQ ID NO: 14018 - DNA, 1320 bp, Emericella nidulans
  CDS (1)..(1320)
atgtcggcttccagtacgctgaaaaaagcattccctcaggtcgacgctgagggccataatctgcccccttcacctgccccgtcgagtcctcatggcagcaggcgctacaacatcgcaactgagcttgtctacaccgagagcaatgaccagtacaatgccagcagtgtcccaatttaccagagcgcaacattcaagcagtcatcccacgagggaggaggcgagtatgactatacccggtccggcaacccgactcgaacgcatctcgagcgacacctggccaagatcatgtccacgcagcgcgctctcgtcgtgtcttccggaatggcggccctggatgtgatcacccgtcttctccgacctggcgacgaggtggtcactggtgatgacctgtacggtggaaccaaccgtctactcaaatacctctcaaccaacggcggcattatcgtgcaccacgtcgacaccaccaaccccgacaaggtgaaggaagtcctgaccgacaagacagccatggtgctcctggaaaccccaaccaatccgcttatcaagattgtcgatatccctacaattgccgcggcgtcgcacgaagcgaaccctaactgtctagtcatcgtggacaacaccatgatgtctccgctcctgctcagcccgctcgaactcggcgcggacgttgtctacgagagcggtacgaaatacctgtccggccaccacgatgtcatggccggagttattgcagtcaacgacccggccctcggcgagaggctctacttcccgatcaacgcgtccgggtgcggactgtcgcccttcgactcttggctgctcatgcgcggagtcaaaactctcaaggtccgcatggatcagcagcaggcaaacgcacagcggatcgcagaattcctggagtcgcacggtttcaaggttcggtatccgggtctgcgctcgcacccccagtacgaactgcaccactccatggcccgaggagcgggcgccgtgctttcattcgagacgggcgatgtctctgtcagtgagcgcattgtcgcgaacgcaagtgtgggctatcagcgttactttggctgtgtcaacacgttgatcagtcttccctgccggatgagccatgccagtatcgatgcagagacgcgaaaggagcgtgccatgccggaggatctgattagactttgtgtgggcattgaagacgtagacgaccttattgacgacttaagcgagcgctggtacaagctggcgctgtcaacgtcactctggacggcattgaagcgaacacgccgcagtcagcgtagtcaagtaatgaaggaatatggttatggatga

SEQ ID NO: 14019 - protein, 439 aa, Emericella nidulans
MSASSTLKKAFPQVDAEGHNLPPSPAPSSPHGSRRYNIATELVYTESNDQYNASSVPIYQSATFKQSSHEGGGEYDYTRSGNPTRTHLERHLAKIMSTQRALVVSSGMAALDVITRLLRPGDEVVTGDDLYGGTNRLLKYLSTNGGIIVHHVDTTNPDKVKEVLTDKTAMVLLETPTNPLIKIVDIPTIAAASHEANPNCLVIVDNTMMSPLLLSPLELGADVVYESGTKYLSGHHDVMAGVIAVNDPALGERLYFPINASGCGLSPFDSWLLMRGVKTLKVRMDQQQANAQRIAEFLESHGFKVRYPGLRSHPQYELHHSMARGAGAVLSFETGDVSVSERIVANASVGYQRYFGCVNTLISLPCRMSHASIDAETRKERAMPEDLIRLCVGIEDVDDLIDDLSERWYKLALSTSLWTALKRTRRSQRSQVMKEYGYG

SEQ ID NO: 14020 - DNA, 1143 bp, Helicobacter pylori
  CDS (1)..(1143): transl_table=11
atgcacatgcaaaccaaattaatccatgggggcattagcgaggacgcgacaacgggggcagtgagcgtgcctatttatcaaacttccacctaccgccaagacgccataggccaccataagggctatgaatactctcgctcaggaaaccccacgcgctttgctttagaagaactcatcgccgatttagaagggggggttaaggggtttgcttttgcctctggcttagctggaatccacgccgttttttctctcttgcaatcaggcgatcatgtgttattgggcgatgatgtttatggggggactttccgcttgtttaacaaagtgcttgtcaaaaacgggctttcttgcaccattatagacactagcgatctatcccaaatcaaaaaggctatcaagcccaacaccaaagccctttatttagaaacccctagtaaccccttgcttaaaatcacggatttagcacaatgcgctagtgtcgctaaagatcatggtttgctcactatcgtggataacacctttgccaccccctattatcaaaacccgcttcttttgggagcggacattgtggtgcatagcggcacaaaatacttaggcgggcatagcgatgtggtcgctgggcttgtaaccaccaataatgaagcgctagcccaagagatcgcttttttccaaaacgctatcggtggggttttaggccctcaagacagctggctgttgcaaagagggattaaaacgctgggattacgcatgcaagcccatcaaaaaaacgccctttgcgtggctgagtttttagaaaaacaccctaaagtggaaagggtttattacccgggccttcccactcaccctaattacgagctggccaaaaaacagatgcgtggctttagcgggatgctctctttcactctcaaaaacgacagcgaggcaactccctttgtagaaagccttaaactattcattttaggcgagagtttgggcggggtggaaagtttggtgggggttccagcgtttatgacccatgcgtgtatccctaaaacacaacgagaagccgctgggattagagatggcttggtgcgattgtctgtggggattgagcatgaacaggatttgttagaagatttagagcaagcgttcgctaaaataagctaa

SEQ ID NO: 14021 - protein, 380 aa, Helicobacter pylori
MHMQTKLIHGGISEDATTGAVSVPIYQTSTYRQDAIGHHKGYEYSRSGNPTRFALEELIADLEGGVKGFAFASGLAGIHAVFSLLQSGDHVLLGDDVYGGTFRLFNKVLVKNGLSCTIIDTSDLSQIKKAIKPNTKALYLETPSNPLLKITDLAQCASVAKDHGLLTIVDNTFATPYYQNPLLLGADIVVHSGTKYLGGHSDVVAGLVTTNNEALAQEIAFFQNAIGGVLGPQDSWLLQRGIKTLGLRMQAHQKNALCVAEFLEKHPKVERVYYPGLPTHPNYELAKKQMRGFSGMLSFTLKNDSEATPFVESLKLFILGESLGGVESLVGVPAFMTHACIPKTQREAAGIRDGLVRLSVGIEHEQDLLEDLEQAFAKIS

SEQ ID NO: 14022 - DNA, 1608 bp, Medicago truncatula
  CDS (1)..(1608)
atggccgtttcaagtttccaccgcgttttcaccttcgaatgccgttccgatcccgatttcacctcccttccatccaccgacaaccaccaccacaaccgccgtcgtcatttcccaacaacctccctttcctctgcagctgccatctcctcccccatcctccgttttcctccaaatttccagcgtcaactcagcaccaaagcgcgtcgtaactgcagcaacatcggtgttgcacaaatcgtcgctgcttcgtggtctaatgaaggaactgggaaccccaacgctggggttccaactccggtgccggctgttgcatctgctgttgatgcaacaactgcgccggtgcctttagacctcgacgccgatgtcaccgatggcgatgtcgtcgaaaatggggctgtacagactaaccgtagttcttattcttcgtttttgaaatccgatgctagcaaaacgattcatgccgctgagagacttggtagggctattgtaactgatggaattaccactcctgttgtgaacacttctgcctacttttttaagaaaactgctgatcttattgattttaaggagaaacgtcaaactagttatgaatatgggcgctacggcaacccaaccagtactgttttagaagagaagataagtgaactggaaggggctgagtcaactatcttaatggcatctgggatgtgtgctagcatagtcttgctgatggcgctggttccagctggtggacatcttgtgactactactgattgttacaggaagactaggatatttatagagactgttcttccaaagatggggatcacgacatccgtggttgatcctgctgatgttggagccttgcaatctgctttggagcagaacaaggtgtctctattcttcaccgagtctcctaccaatccattcctgagatgtgttgacattaagctggtttcagaactttgccacaagaatggggctttgcttgtcattgatggtacatttgctacgcctttgaaccagaaggcccttgcccttggtgctgatttggttatgcactcttgtacgaagtacatcggtggacatcatgatgtacttggtggttgcataagtggctctttgaagttgatctcagaaattcgaattttgcatcatattttgggcggtgctcttaacccgaatgctgcatacctattcatcagaggcatgaaaacgctgcatcttcgtgtacagcaacagaattcaaccggaatgaggatggccaaacttttagaggcacatcccaaggtgaagcgtgtctactatccaggcttgccaagtcatcctgaacacgagcttgccatgaggcagatgactggttttggaggtgtggtcagttttgagattgatggagatataacaaccacaattaaatttattgattcactaaaaatcccatatattgctgcctcttttggtggctgtgagagcattgtggatcaaccggccattttgtcttactgggaccttcctgcatcagaaagggccaagtggaagatttatgacaatttggttcgattcagctttggaattgaagattttgaggatttgaaggctgatgtcttgcaggcactggaagccatatag

SEQ ID NO: 14023 - protein, 535 aa, Medicago truncatula
MAVSSFHRVFTFECRSDPDFTSLPSTDNHHHNRRRHFPTTSLSSAAAISSPILRFPPNFQRQLSTKARRNCSNIGVAQIVAASWSNEGTGNPNAGVPTPVPAVASAVDATTAPVPLDLDADVTDGDVVENGAVQTNRSSYSSFLKSDASKTIHAAERLGRAIVTDGITTPVVNTSAYFFKKTADLIDFKEKRQTSYEYGRYGNPTSTVLEEKISELEGAESTILMASGMCASIVLLMALVPAGGHLVTTTDCYRKTRIFIETVLPKMGITTSVVDPADVGALQSALEQNKVSLFFTESPTNPFLRCVDIKLVSELCHKNGALLVIDGTFATPLNQKALALGADLVMHSCTKYIGGHHDVLGGCISGSLKLISEIRILHHILGGALNPNAAYLFIRGMKTLHLRVQQQNSTGMRMAKLLEAHPKVKRVYYPGLPSHPEHELAMRQMTGFGGVVSFEIDGDITTTIKFIDSLKIPYIAASFGGCESIVDQPAILSYWDLPASERAKWKIYDNLVRFSFGIEDFEDLKADVLQALEAI

SEQ ID NO: 14024 - DNA, 1434 bp, Medicago truncatula
  CDS (1)..(1434)
atgaatgcttttgatatttcagctagaagcagctgccacaacattgcattggccacgacgccgtttcgccacctttcttcgtcttatcatttaatgacgttgaagttacaacaccatgtcagcattggagagagacggagcattcgagtggttagaattacggcatcattgtggccaaataccgactcaactgtttctcagccatcgccggcggaatcaaatggtgctttggagattgatagtccttactcgtttttgaaatgtgatggatcaaaaaccgttcacgctgctgaaagattaggtcgaggcatagtcacagatgcaatcaccacccctgtggtcaacacttcagtctacttttttaagaaaactgctgatctcattgattggaaggagaaaagacaatttagttatgaatatgggcgatatggaaatccaacaacagcagttttagaagagaagatgagtgcattggagggtgctgaatcaactctattccttgcatctgggatgtgtactagctctgtcatgttcttggcactagttccagctgggggacatattgttaccactactgattgctatagaaggactagaatattcattgccaatatgcttccaaaaatgggaatcacggccaccataattgatcctgctgatgttgatgcattggaagctgcattggaaaataacaaagtttcactcttctttactgaaactccaaccaatccattccaaagatgtgttgatattaagctagtttcagagctttgtcatagaaaaggagctttggtttgcattgatggtacattttctacacctattaaccaaaaagcactttcccttggagctgatcttgtagtgaactctgcaacaaaatacattgctggacatcatgatgtccttgctggttgcataagtggttcagagaagttgatttcacaagttcgtagtttccatttcattttgggtggcactcttagcccgaattctgcatacctagtcattagaggtatgaaaaccttgcatcttcgtgtacaacatcaaaattcaacagcaatgaagatggcccaacttttagagacacatcctaaggtgacacgagtctactatcccggcttgccaagtcatcccgaatatgccctcgccaagaggcaaatgactggttttggaggtgttgtctgttttgatattgatggagatataatgaggacgataaagtttgttgattcattgaaaatcccatacattgctccatcctttggtggtgttgagagtgttgtgaatcagccagcaatcatgtcttattgggatcttccaaggaaagaaagggaaaaatatagaatttatgataacaccgtccgtttctgctttggagttgaaggctatgaagatttaaaggatgatgtcctacaagccctagatgccatataa

SEQ ID NO: 14025 - protein, 477 aa, Medicago truncatula
MNAFDISARSSCHNIALATTPFRHLSSSYHLMTLKLQHHVSIGERRSIRVVRITASLWPNTDSTVSQPSPAESNGALEIDSPYSFLKCDGSKTVHAAERLGRGIVTDAITTPVVNTSVYFFKKTADLIDWKEKRQFSYEYGRYGNPTTAVLEEKMSALEGAESTLFLASGMCTSSVMFLALVPAGGHIVTTTDCYRRTRIFIANMLPKMGITATIIDPADVDALEAALENNKVSLFFTETPTNPFQRCVDIKLVSELCHRKGALVCIDGTFSTPINQKALSLGADLVVNSATKYIAGHHDVLAGCISGSEKLISQVRSFHFILGGTLSPNSAYLVIRGMKTLHLRVQHQNSTAMKMAQLLETHPKVTRVYYPGLPSHPEYALAKRQMTGFGGVVCFDIDGDIMRTIKFVDSLKIPYIAPSFGGVESVVNQPAIMSYWDLPRKEREKYRIYDNTVRFCFGVEGYEDLKDDVLQALDAI

SEQ ID NO: 14026 - DNA, 1215 bp, Aspergillus oryzae
  CDS (1)..(1215)
atgaccaactcgaccaacggagcccctgctcaggacaagcgcttcggcactttggctgtccattccggcgctcaccatgatccaacgactggcgctgttattgctcccatctccctctccaccactttcgctcagaccagtgtcggtagccctgtaggtctctacgaatacacacgtagctccaaccccaaccgcgataacttcgaagaagccattgcagctcttgagcacgctaaatatgccctcgcattctcctctggttccgcaaccactgcggtgatccttcagtccctcgcggccggctcgcatgtcgtctcgatttccgatgtctatggtggaactcacaggtacttcacaaaggtcgccaacgcccatggtgtggatgtgacgttcacacccaccatcgagtcggacgtggagaagttgatccgtccggagaccaagctcgtgtggatcgaaaccccctcaaacccgactttaggattggtcgatattgagaaggttgctgccattgcgcatcgccatggaatccttgtggtggttgacaacacattcatgagcccctatgtccagaaccctctggaccacggtgccgacatcgtcgtgcactccgttactaagtacattaacggccattcggatgttctgatgggcgtcgccgcgttcagctccgatagcttgaaagagcgccttggattcctccagaacgccattggtgccgttccttctcccttcgactgctggctcgctcaccgtggccttaagactctccacttgcgtgcccgcgaggccaccactaacgccacggctatcgccaaggcccttgaggcttccccccatgttatctccgtcaactaccccggcatcgattctcaccctcagcgtgcgattgctgtcaagcagcaccgccagggcatgggcggtggtatgctcagtttccgcatccagggtggcgagaaggctgctcaccttttctgcaagtataccaaggtcttcaccttggccgagagtttgggtggtgtggagagtctttgcgaggttcccgctagcatgactcacgccggtattcccaaggaccagcgtgaggctgctggtgtcttcgacgacctcgtccgcatgagctgtggtattgaggatgtagaggatctcctggccgacgttctccaggctcttaagaaggctgtcgcctccagcgaacaaaacggctccgcttaa

SEQ ID NO: 14027 - protein, 404 aa, Aspergillus oryzae
MTNSTNGAPAQDKRFGTLAVHSGAHHDPTTGAVIAPISLSTTFAQTSVGSPVGLYEYTRSSNPNRDNFEEAIAALEHAKYALAFSSGSATTAVILQSLAAGSHVVSISDVYGGTHRYFTKVANAHGVDVTFTPTIESDVEKLIRPETKLVWIETPSNPTLGLVDIEKVAAIAHRHGILVVVDNTFMSPYVQNPLDHGADIVVHSVTKYINGHSDVLMGVAAFSSDSLKERLGFLQNAIGAVPSPFDCWLAHRGLKTLHLRAREATTNATAIAKALEASPHVISVNYPGIDSHPQRAIAVKQHRQGMGGGMLSFRIQGGEKAAHLFCKYTKVFTLAESLGGVESLCEVPASMTHAGIPKDQREAAGVFDDLVRMSCGIEDVEDLLADVLQALKKAVASSEQNGSA

SEQ ID NO: 14028 - DNA, 1326 bp, Aspergillus oryzae
  CDS (1)..(1326)
atgtcggcttcaggatccggtgccgcgcccgcggcttcatcatcaaccaatccagcaaaaaaggcgtttccgagcgtagatctcgagggtcacaatcttcctccctcacctgctccttctagtcctcataccggaaggcgctatgcaattgccacagaactcgtctataccgacagcggcgaccagtacaacgctagcagcgttcctatctaccagagtgccacttttaaacagacatccggtggtggaggtggagagtatgattatactcgctccggcaatccgactagaacgcaccttgaacgccacctagccaaggtcatgtccgctcagcgtgcactggttgtttcctccggcatggctgcattggatgtcatcactcggttgcttcgtcctggtgatgaagtcgtgaccggcgatgacctctacggcggaacacaccgtctgcttaaatacctgtcaaccaatggtggtatcatcgtccatcatgttgacaccacccagcccgagaaggtgcgggaagtgctgaacgagaagacagccatggtcctgctcgaaacccctaccaaccccctcattaaaatcgtcgacatcccccagatcgctaccgccgcacatgaagtgaattctacctgtcttgtggctgttgataacaccatgatgtctccgatgttgcttaatcctctcgaactgggagcagacattgtctatgagagtggaacgaagtacttgtccggtcaccacgatctcatggctggtgtgatcgctgtcaacgacctggctctcggcgagcgattgtacttcccaatcaacgcctctggctgtggattgtctccgttcgattcttggctgttgatgcgtggagtgaagaccctcaaggtacggatggatcagcaacaagcgaacgcacagcgtattgcagaattcctcgagtcccacgggtttaaggtccggtaccctgggctgcggtcgcaccctcaatatgacctccaccactcgatggcccgtggagctggagctgtactgtcattcgagacgggcgacgtcggtgtgagtgagcgtattgttgagagtgccaagctatgggctatcagcgttagcttcggctgcgtgaacagcttgatcagcatgccttgccggatgagccatgctagtatcgatgcgaagacgcgccaggagcgcgccatgccggaagatttgatccgcctgtgcgttggtattgaggatgcagatgatctgattgacgatctgacaagggcgctggtacaagctggtgccgtcaacctaagcttggatgatttccaagcgaacacgactaccaactga

SEQ ID NO: 14029 - protein, 441 aa, Aspergillus oryzae
MSASGSGAAPAASSSTNPAKKAFPSVDLEGHNLPPSPAPSSPHTGRRYAIATELVYTDSGDQYNASSVPIYQSATFKQTSGGGGGEYDYTRSGNPTRTHLERHLAKVMSAQRALVVSSGMAALDVITRLLRPGDEVVTGDDLYGGTHRLLKYLSTNGGIIVHHVDTTQPEKVREVLNEKTAMVLLETPTNPLIKIVDIPQIATAAHEVNSTCLVAVDNTMMSPMLLNPLELGADIVYESGTKYLSGHHDLMAGVIAVNDLALGERLYFPINASGCGLSPFDSWLLMRGVKTLKVRMDQQQANAQRIAEFLESHGFKVRYPGLRSHPQYDLHHSMARGAGAVLSFETGDVGVSERIVESAKLWAISVSFGCVNSLISMPCRMSHASIDAKTRQERAMPEDLIRLCVGIEDADDLIDDLTRALVQAGAVNLSLDDFQANTTTN

SEQ ID NO: 14030 - DNA, 1194 bp, Aspergillus oryzae
  CDS (1)..(1194)
atggctccgaccaatgacaacattgccgccgctacgcatgccttgcatgcagatgaggcgctgaacgtggtcaccgatgtagcccctccgctgcacctttccactacgttccggtaccctgatgatcccgaggaccttgtgccggcagcagatctcagtggttatgaccaggacaaaaccaagcatatctactctcgtctgagctcgcccaatttgaaccgattcgaagtcctcctgtcttcacttctccacggcgaggcgatcagttactcgtccggactatcggccttgcatgcggcactcgtcctcctgaatccccgccgaatcgcagttggaaatggataccatggatgtcacggtgttattaagctcttcggccgtcttaccggtcttcaaaagctggacctcgactgtcccgctgagcaattagagtcgggagatgccatccttctagagaccccggtcaaccctgagggcaccgctttcaacatcgaagagtatgccaagaaagcgcactcgcgcggagcgtatcttattgtggatagcacctttgctccgccgggccttcaggacccgttccaatggggtgcagacctggtcatgcattccggtaccaaatacttcggcggacacagcgaccttctttgtggtgttctcgctacacagcggagtgattgggcgcggcggctgttcgaggatcggatgttcctaggtagtgtcatgggcaatatggagagctggctgggcacacgcagtttgcggaccctggaggttcgcgtgcagcggcagagccagaatgccacgaatctggtcacgtggttgcacaacgcactgcaggcgcaaaacccagcccctgacagcgacgaggctgtgactcaggctgctctgcaacaggtgtaccatgccagcctgcagaaagaggatgagtcatggttgctcaagcaaatgccgaacgggttcggaccggtgttttcgatcagcatgaaaaacgaagactatgcgcgtaagctccccagtaagctcgccttcttccagcatgccaccagcctcggaggtgtagagaccctgattgagtggcggacaatgagtgatgcgacggtggatcgccgattgttgcggatcagtgtaggattagagaattgggaagacctccggagggatctggtgagcgcattccgggcgttggttcagtaa

SEQ ID NO: 14031 - protein, 397 aa, Aspergillus oryzae
MAPTNDNIAAATHALHADEALNVVTDVAPPLHLSTTFRYPDDPEDLVPAADLSGYDQDKTKHIYSRLSSPNLNRFEVLLSSLLHGEAISYSSGLSALHAALVLLNPRRIAVGNGYHGCHGVIKLFGRLTGLQKLDLDCPAEQLESGDAILLETPVNPEGTAFNIEEYAKKAHSRGAYLIVDSTFAPPGLQDPFQWGADLVMHSGTKYFGGHSDLLCGVLATQRSDWARRLFEDRMFLGSVMGNMESWLGTRSLRTLEVRVQRQSQNATNLVTWLHNALQAQNPAPDSDEAVTQAALQQVYHASLQKEDESWLLKQMPNGFGPVFSISMKNEDYARKLPSKLAFFQHATSLGGVETLIEWRTMSDATVDRRLLRISVGLENWEDLRRDLVSAFRALVQ

SEQ ID NO: 14032 - DNA, 1308 bp, Aspergillus oryzae
  CDS (1)..(1308)
atggccgagtcacgacaacctcattttgaaactcttcagcttcatgctggccaggagcctgacccggcgaccaacgctcgcgctgtgcctatttatgcgaccacatcttatacattcaatgattctgcacatggcgccaggctcttcggcctcaaagagtttggcaatatctatagccgtatcatgaaccccacagtcgatgtcttcgagaagcgtattgcagctctcgaaggtggtgttgcagcggtagcagcctcttctggccaagcggctcagttcatggcaatctcagcacttgcgcattcaggtgacaatatcgtctcgaccagtaatttgtacggaggcacatacaaccagttcaaagttttcttctcccggctagggattacgaccaaatttgtccaaggagacaagccagaggatattggtgcggcaattgatgaccgcaccaaggctgtttatgtcgagacgattggaaaccctcgatataatgtgcctgacattgaggccatcgctaaggctgcccatgagaaaggtgtgcccttggtagttgataacactttcggagccggtggctactactgccgccctatcgaacatggagccgatatcgtcgtgcacagtgcaactaaatggattggtggccacggtaccacgatcggtggtgtcgtgatagatagcggcaaattcgattggggtaaacatggtgctcgatttccgcagtttgtggagccgtccgaaggctaccacggcctgaagttctgggaaactttcgggaatctggcgttcgcaatccgtgtccgcgttgagatccttcgggatctcgggtcagcattgaatccatttgctgcgcaacagctaatccttggtctggagactcttagcttgcgtgctgaacggcatgcaagtaatgcattggctttggcgaactggctgcgtacaaacgacaatgtgagctgggtttcgtatcctggcctcgaggatcatcccaaccatgtgaccgctaagcgctatctgaagcgcgggtatggcggtgtcttatccttcggtgtcaagggaggtgctgctgctggaagccaggtcgttgacgggtttaagttgattagtaatctagctaatgtcggagattccaaaacgcttgcaatccatccttggtctacgacacatgagcaactgaccgagcaagaacggcttgaatctggtgttactgaggatgctatccgcatttccgtcggtactgagcacattgacgatatcattgccgacttcgaacagtcattcaagacttccagtgccgcacgtacctaa

SEQ ID NO: 14033 - protein, 435 aa, Aspergillus oryzae
MAESRQPHFETLQLHAGQEPDPATNARAVPIYATTSYTFNDSAHGARLFGLKEFGNIYSRIMNPTVDVFEKRIAALEGGVAAVAASSGQAAQFMAISALAHSGDNIVSTSNLYGGTYNQFKVFFSRLGITTKFVQGDKPEDIGAAIDDRTKAVYVETIGNPRYNVPDIEAIAKAAHEKGVPLVVDNTFGAGGYYCRPIEHGADIVVHSATKWIGGHGTTIGGVVIDSGKFDWGKHGARFPQFVEPSEGYHGLKFWETFGNLAFAIRVRVEILRDLGSALNPFAAQQLILGLETLSLRAERHASNALALANWLRTNDNVSWVSYPGLEDHPNHVTAKRYLKRGYGGVLSFGVKGGAAAGSQVVDGFKLISNLANVGDSKTLAIHPWSTTHEQLTEQERLESGVTEDAIRISVGTEHIDDIIADFEQSFKTSSAART

SEQ ID NO: 14034 - DNA, 1188 bp, Aspergillus oryzae
  CDS (1)..(1188)
atgtcttcttcaaacgatactcatcgctcgactcgagcattgcatgccgacgacccgctcaacctggtcacagacgttgcgcctccaatccacttgtcgacaacctataggtttcccagtgatcctaacgacctcctgccatctgtagaccctgtggatgaattcaacggaaagaactatgtatattctcgagagtttgccccaaacgcaactcgcttcgaagctgttctttcatcgctcatcggtggaaatgccatctgctactctaccggattagcagctctgactgccgctttggtacttctgaatccccgccgtatctccatcggcgagggctaccatggcagtcatgaggttatcggtgttctctcgcgcctgtccggactccagaaactggaccttcactgctccgcggagagcttagaagagggggatgtcattctcctggagacccctgtcaacccgctggggacagctttcagtattgaggaatttgcccagaaggctcactcgagaggtgcctatctcattgtcgatagcacctttgcccctccaagcttgcaagatccgttccagtggggcgctgatattgtgatgcattccggctccaagtattttggtggccacagtgaccttctctgtggtgttctcgcgacaaagcgtcaggactggaccaagaagcttttcgaagatagacttgcgtttggaagcgtcatcggcaatttagaagcttggcttggcctgcgcagtctgcgcacgctagaagtccgtgtggagcgcgcaagcaagagctctgagagattgatctcatggttgaatcaaggactgaacgcccagagtccagctccgggtagcgaggagcatatcatccagagcattcttcaaaagattcatcatgccagtttacagaacgagccttgggtacggaaacagatgccaaacggctttggtcctgttttctcgattgttctacagactgaagatttcgcacgggtcctcccaagcaagttacacctcttccagcatgcaaccagccttggtggtgttgagtccttgattgaatggagagcactgtccgactccagagtagaccggaagctcttgagactcagcgttgggttggaaaactgggaggacttgaagaacgacttgcttaaagcgttcaagtcccttttgtcgcaatcatga

SEQ ID NO: 14035 - protein, 395 aa, Aspergillus oryzae
MSSSNDTHRSTRALHADDPLNLVTDVAPPIHLSTTYRFPSDPNDLLPSVDPVDEFNGKNYVYSREFAPNATRFEAVLSSLIGGNAICYSTGLAALTAALVLLNPRRISIGEGYHGSHEVIGVLSRLSGLQKLDLHCSAESLEEGDVILLETPVNPLGTAFSIEEFAQKAHSRGAYLIVDSTFAPPSLQDPFQWGADIVMHSGSKYFGGHSDLLCGVLATKRQDWTKKLFEDRLAFGSVIGNLEAWLGLRSLRTLEVRVERASKSSERLISWLNQGLNAQSPAPGSEEHIIQSILQKIHHASLQNEPWVRKQMPNGFGPVFSIVLQTEDFARVLPSKLHLFQHATSLGGVESLIEWRALSDSRVDRKLLRLSVGLENWEDLKNDLLKAFKSLLSQS

SEQ ID NO: 14036 - DNA, 1191 bp, Aspergillus oryzae
  CDS (1)..(1191)
atgtccaacgacagcctcgccacccaggcactccatgccgacaatggcctagacggcaagtcagatatcgctctgccaatccatctcagcacaaccttccggtacgtctacaatacagaccaggatgaatctctgcgcggaccagcagtatgtcactccacggcatttcctcatcaaccatgcacaaacactagagcacgaatactaataagttcatggtttggaaccttctgctactcccgagaccgcgtcccaacccgcacccggctggaaacagtcctctcagcactcatccacggcccaacactaacatacgcctccggtctagccgccgtacatgcatacctcgtatttctcaaaccgaaacgcatagccatcggcgatggatactacggcagccttcaggtagcaaatctacaccaacagctaaccggctatcctgggcttcgaccaactggacgctctcgaagcagggatgtaatccaccttgaaacaccgattaagccaacaggggaagcactgagtatccgacgattcgcagatgaggcacacaaacgcggagcatacctaataattgactctacattaagaccaccaggtctccaggatccgtttgcgctgggcgcagacattatcatgcacagtgggacgaagtatttcggtggtcattacgatcttctctgtggaacgttgtcaattcagcctgctagagaagaaagctggttcaagactctacatgagcagcggactattcttggtagtgtactcgggagcatggaggtgtggcttggattgcggagtcttcggacgttggaattgcgggttcgacgacagagcgagaatgctactgctttggtgctctggctttatgaatgtttgaagagtgagtttgattatgtggttaagaagattgttgctgctttgcgagaacgaatacctcatgagtttgggccggtgtttcgtactgagatgaagacggaggagatgagtcgtagactatcgggattgatgcgtttgtttcaacatgcgactaatcttggtggtgtggagagtcagattgaatggaggaggctgctggatgtgtcagcgaagccgactcttcttcgggttagtattggggtggaatatttggaggatctgaagagagacttgtttcagggattcgaggtgttaagacatgaaatcgggtag

SEQ ID NO: 14037 - protein, 396 aa, Aspergillus oryzae
MSNDSLATQALHADNGLDGKSDIALPIHLSTTFRYVYNTDQDESLRGPAVCHSTAFPHQPCTNTRARILISSWFGTFCYSRDRVPTRTRLETVLSALIHGPTLTYASGLAAVHAYLVFLKPKRIAIGDGYYGSLQVANLHQQLTGYPGLRPTGRSRSRDVIHLETPIKPTGEALSIRRFADEAHKRGAYLIIDSTLRPPGLQDPFALGADIIMHSGTKYFGGHYDLLCGTLSIQPAREESWFKTLHEQRTILGSVLGSMEVWLGLRSLRTLELRVRRQSENATALVLWLYECLKSEFDYVVKKIVAALRERIPHEFGPVFRTEMKTEEMSRRLSGLMRLFQHATNLGGVESQIEWRRLLDVSAKPTLLRVSIGVEYLEDLKRDLFQGFEVLRHEIG

SEQ ID NO: 14038 - DNA, 1197 bp, Pseudomonas putida
  CDS (1)..(1197): transl_table=11
atgcgcgactcccataacaacaccggtttttccacacgggccattcaccacggctacgacccgctttcccacggtggtgccttggtgccaccggtgtaccagaccgcgacctatgccttcccgactgtcgaatacggcgctgcgtgcttcgccggggaggaggcggggcacttctacagccgcatctccaaccccaccctggccttgctcgagcaacgcatggcctcgttggagggtggtgaggcgggattggcgctggcgtcggggatgggagccattacttcgaccctctggaccctgctgcggcctggtgatgagctgatcgtggggcgcaccttgtatggctgcacctttgcgttcctgcaccatggcattggcgagttcggggtcaagatccaccatgtcgaccttaacgatgccaaggccctgaaagcggcgatcaacagcaaaacgcggatgatctacttcgaaacaccggccaaccccaacatgcaactggtggatatagcggcggtcgtcgaggcagtgcgggggagtgatgtgcttgtggtggtcgacaacacctactgcacgccctacctgcagcggccactggaactgggggcagacctggtggtgcattcggcaaccaagtacctcagtggccatggcgacatcactgcgggcctggtggtggggcgcaaggctttggtcgaccgcattcggctggaagggctgaaagacatgaccggggcagccttgtcaccgcatgacgctgcgttgttgatgcgcggcatcaagaccctggcgctgcgcatggaccggcattgcgccaacgccctggaggtcgcgcagttcctggccgggcagccccaggtggagctgatccactacccgggcttgccgtcgtttgcccagtacgaactggcacagcggcagatgcgtttgccgggcgggatgattgcctttgagctcaagggcggtatcgaggccgggcgcggcttcatgaatgccctgcagctttttgcccgtgcggtgagcctgggggatgccgagtcgctggcacagcacccggcgagcatgacgcactccagttacacgccacaagagcgggcgcatcacgggatatcagaggggctggtgaggttgtcagtggggctggaggatgtggaggacctgctggcagatatcgagttggcgttggaggcgtgtgcatga

SEQ ID NO: 14039 - protein, 398 aa, Pseudomonas putida
MRDSHNNTGFSTRAIHHGYDPLSHGGALVPPVYQTATYAFPTVEYGAACFAGEEAGHFYSRISNPTLALLEQRMASLEGGEAGLALASGMGAITSTLWTLLRPGDELIVGRTLYGCTFAFLHHGIGEFGVKIHHVDLNDAKALKAAINSKTRMIYFETPANPNMQLVDIAAVVEAVRGSDVLVVVDNTYCTPYLQRPLELGADLVVHSATKYLSGHGDITAGLVVGRKALVDRIRLEGLKDMTGAALSPHDAALLMRGIKTLALRMDRHCANALEVAQFLAGQPQVELIHYPGLPSFAQYELAQRQMRLPGGMIAFELKGGIEAGRGFMNALQLFARAVSLGDAESLAQHPASMTHSSYTPQERAHHGISEGLVRLSVGLEDVEDLLADIELALEACA

SEQ ID NO: 14040 - DNA, 1422 bp, Neotyphodium uncinatum
  CDS (1)..(1422)
atgacagtagatacgattacttcgacttctaacgggaaccaagatgtcccaaaggaattccttccaattgaattcgaaactcagcttcttcatcttggccgattcccggacattttaggcagttgcgcagtgcctgtatacagttcggcagcctttgagttcaacagcgttgcccacggtgcgcgtcttctaaacttgacgcagttcggcaacatctacagccgcttcaccaatcccaccgtcaatgtattgcaaaatcgactggccgggctggaaggaggcgtcgctgcttgtggcgtcgcatccggctctgcggcggtagtcgtgacggtaatggccctcacaggcgttggcgacaacttcgtctcatcctttcacgttcatgctggcactttccaccagttcgacagtttagccaagcagatgggcatcgagtgccgctttgtgaagtctcgagaccctgcagactttgcggcggccatcgacgacaagaccaagtttgtctggcttgagaccatcagcaaccctggcaacgtaatactagaccttgaggcagtctcgacggtctgccacaccaagggcattcctttgatttgcgataacacctttggctgtgccgggtacttttgtcgtcccatcgaccacggtgtcgatatcgtcgttcactcggccaccaagtggatcggcggccacggcactacggtaggcggtatcatcgtcgacggcggtacctttgactggggccagcacccggatcgctttccccagttccatgatccacggacgcgactctgggaacgcttttcccgtcgggcgtttgctgtccgctgccagtttgagatcctgcgcgatacggggagcaccctcagcgcccctgcggcccagcagctgctggtaggcctcgaatcgcttgccgtgcgctgcgagcgccacgcgcagaatgcggccaagattgccgactggctgcgcgagtatcccctcgtggcctgggtcagctatgttggtcacccgaaccaccccgatcaccagggagcgctcaagtacctcaagcgaggctttggctcggtcatctgcttcggtctacgggggggtttcgaagcaggtgccctgttctgcgatgcgttgaagatggtcatcaccactaccaacctgggggatgccaagaccctaatcctccatcccgcctcgactactcatgagcacttcagttccgagcatcgagctgaggctggcgtcacagatgatatgattaggctgtctgtgggtattgagcagatcaaggatatcaaggccgacttcgagcaggcctttaagcaagtgcttcggggtaaaaagagtcttcgtaagccttgcatcggaaagattctcatgcaggatgagatcaatgaagacttatttggaccttcggcttgtcgtacgtaa

SEQ ID NO: 14041 - protein, 473 aa, Neotyphodium uncinatum
MTVDTITSTSNGNQDVPKEFLPIEFETQLLHLGRFPDILGSCAVPVYSSAAFEFNSVAHGARLLNLTQFGNIYSRFTNPTVNVLQNRLAGLEGGVAACGVASGSAAVVVTVMALTGVGDNFVSSFHVHAGTFHQFDSLAKQMGIECRFVKSRDPADFAAAIDDKTKFVWLETISNPGNVILDLEAVSTVCHTKGIPLICDNTFGCAGYFCRPIDHGVDIVVHSATKWIGGHGTTVGGIIVDGGTFDWGQHPDRFPQFHDPRTRLWERFSRRAFAVRCQFEILRDTGSTLSAPAAQQLLVGLESLAVRCERHAQNAAKIADWLREYPLVAWVSYVGHPNHPDHQGALKYLKRGFGSVICFGLRGGFEAGALFCDALKMVITTTNLGDAKTLILHPASTTHEHFSSEHRAEAGVTDDMIRLSVGIEQIKDIKADFEQAFKQVLRGKKSLRKPCIGKILMQDEINEDLFGPSACRT

SEQ ID NO: 14042 - DNA, 1278 bp, Brevibacterium linens
  CDS (1)..(1278): transl_table=11
atgagtatcacccagaacggaatctcgacccgctctgtgcattcgggggccaaccccgaatcgcataccggttcggttgttgcccctatcttccagacctcgaccttcatgatggacaccccgggccagacccgcgccggcttcgactacgcgcgcaccggcaccccgaaccgcagcgacctcgaagacgtgctgtgcgagctggagaacgcctccttcgcagcggcggtgaactcggggacttccgccgaggtcgcggtcttctcggcactgctgggtcccggcgatgagatcatcatcccgcgcgacatctacggcggcacgtaccggctgctgaagaatgaatacgagcgctggggcatcagcatccgcaccgtcgatctcaccgacaccgaggcgctggcggccgcgatctcggccaagaccgcgatcgtgtgggtcgagactccgagcaatcccgggctcgacatcgtcgacatcgccgagactgccaagctcgcccacgccgcaaacgccatcctggccgtcgactccaccttcgccaccccgattctgcagcgccccatcgagctcggcgccgatgtcgtcatccactcgacgacgaagttcatcaacggccactccgatgtcatcggcggtgccgttctcgccggtgacggttcgacctgtccccgtgccgccaaggttgtcgaacgtctcgagtcctacctcgcatccgtcgggttgggcatcgcccccttcgatgcatggctgactcgccgcggcatcaaaaccctgccggtgcggatggctaagcactgtgagaacgcgcaggccgtggcgcagtggttggagagccgtcctgagatcgctgaggtgtattacccaggtctgccatctcacccgggtcatgaggtcgcgaagaagcagatgagcggcttcgggggagtggtctcattccgcaccgacaccgaggcaagagctctgtcgctggtgaagagcacgaagctcatcactctggccgaatcgctcggtggtgttgagtcactgattgaccatcctgcgaccatgacccacctggccgtcgcagactgcgaactcagcgtctcgccgacattcatccgcctgtccctgggcatcgaagacatcgccgacatcctcgccgacctcgacgcggcgctcgcttcgacggtgcagactccggacggcgtgagctccgacgcggaggcactgggtgcggaggttccaattgcggacccctcaccgtcaactcttcaacaccctgtagcaacggtatga

SEQ ID NO: 14043 - protein, 425 aa, Brevibacterium linens
MSITQNGISTRSVHSGANPESHTGSVVAPIFQTSTFMMDTPGQTRAGFDYARTGTPNRSDLEDVLCELENASFAAAVNSGTSAEVAVFSALLGPGDEIIIPRDIYGGTYRLLKNEYERWGISIRTVDLTDTEALAAAISAKTAIVWVETPSNPGLDIVDIAETAKLAHAANAILAVDSTFATPILQRPIELGADVVIHSTTKFINGHSDVIGGAVLAGDGSTCPRAAKVVERLESYLASVGLGIAPFDAWLTRRGIKTLPVRMAKHCENAQAVAQWLESRPEIAEVYYPGLPSHPGHEVAKKQMSGFGGVVSFRTDTEARALSLVKSTKLITLAESLGGVESLIDHPATMTHLAVADCELSVSPTFIRLSLGIEDIADILADLDAALASTVQTPDGVSSDAEALGAEVPIADPSPSTLQHPVATV

SEQ ID NO: 14044 - DNA, 1278 bp, Oryza sativa subsp
  CDS (1)..(1278)
atgacgctccgacgccgcagcggcgccggcggcacacctccgacgacacgctcgtcgtccacgccggggagcggcggcgcgcgcgcgatcggcggcgtcgcggcggaggtgacggactactcgatcgcgacgccgatcgtgaccggcacggcgcgctggttccgcgactcggccgacctcgtcgccttcagggaaggcggcgggcggcggcggcggcggcggcacagcttcgagtacgcccgttacggcaaccccaccgtggaggtcctggaggacaagatcagcgccatggagaaggccgaggcgacgatcgtcacctcctccggcatgaacgcgatcgttgcgacgctgctggccgtcgtcccgccgggcggccacgtcgtcgccaccaccgactgctacagcgaggcgcgtgccttcatacgtgacaggctctccaaaatgggcattaggacgacgttcgtcgatctggacgacatggaggcgttgcaatccgttcttgatcagggcaatgtaacgatgttctacgcggactcgctgacgaaccctcacctcaagtgcgtggacgtgcggcgcgtcgcggagctgtgccaccagcggggcgctctggtgtgcatcgacagcacgctggcgtcgcccatcaaccagaagccgctcaccctcggcgccgacgtcgtcctccactcccatcaccaagtgattggtgccggttgggaaaccccatgggtgacggattttacaaccggtatgggtgttggatttcttaactggcacccggtagacatcacgtctgcccgcggaaggctatggacaccgctgtcgccgccagatcttgaggcgtacatgatcattcgcggtctaaagacgatggcgctgcgggtggaggcgcagaaccggacggcgctgcgggtggcacggctgctggagaggcaccccaaggtggagcgtgtcaactacccgtggctggagagcagcccgtggcacggcgtcgcgaggaagcagatgaccggcgccggcggcgtgatcagcttcgaggtggcgtcggacatgcgcggggcgatgaggttcgtcgacgcgctggagttgcccttcatcgcgacttcgctcggcgggtgcgagagcctagtgcagcagccggccatcatgtcctactggggcaagagtgaagcggagaagaccgagaatgggatcaaggataaccttgtgaggtttagttttgggatcgaaaagtttgaggacctcaaggacgacatactacaagccctagagaagatttaa

SEQ ID NO: 14045 - protein, 425 aa, Oryza sativa subsp
MTLRRRSGAGGTPPTTRSSSTPGSGGARAIGGVAAEVTDYSIATPIVTGTARWFRDSADLVAFREGGGRRRRRRHSFEYARYGNPTVEVLEDKISAMEKAEATIVTSSGMNAIVATLLAVVPPGGHVVATTDCYSEARAFIRDRLSKMGIRTTFVDLDDMEALQSVLDQGNVTMFYADSLTNPHLKCVDVRRVAELCHQRGALVCIDSTLASPINQKPLTLGADVVLHSHHQVIGAGWETPWVTDFTTGMGVGFLNWHPVDITSARGRLWTPLSPPDLEAYMIIRGLKTMALRVEAQNRTALRVARLLERHPKVERVNYPWLESSPWHGVARKQMTGAGGVISFEVASDMRGAMRFVDALELPFIATSLGGCESLVQQPAIMSYWGKSEAEKTENGIKDNLVRFSFGIEKFEDLKDDILQALEKI

SEQ ID NO: 14046 - DNA, 1623 bp, Solanum lycopersicum
  CDS (1)..(1623)
atggccgtctctagttacgctagggcatttccgtcattcgaatgtcgttcggagcctgatttctccggcagccttccacatcctaaagccggcgttcggttctccggcaagtataactccgggagtaaccgatctcaggtttatggactgtcttctttgatctataggtttccgcctaatttcgtgaggcagctaagcattaaggctaggaggaattgcagcaacatcggcgtggctcaagttgtggcggcttcctggtctaacaaccaagccggtcctgagttcactccggcggctaatgctgtcgattcatccgcttccgctgctgttacttcgattggtatcaccacaggtgacgaggaggtggcggttgtggaaaatgcggattgtagtgatcaaaatgtacagattaagggttcgacaggtgttaaatatgcttcatttttgaattcagatggaagcgttgctattcatgccggtgaaaggttgggacgcggtattgttactgatgccataactaccccagtggttaacacatctgcttacttcttcaacaaaacttctgaccttattgattttaaggagaaaagacgtgcaagttttgaatatggccgctatgggaaccccactactgttgttttggaggagaaaattagtgcacttgagggtgctgaatcaaccttgatagtggcatctggaatgtgtgctagtactgtcatgttcctggccttggttcctgctggtgggcatattgttactactacagactgctacaggaagacacgtgtttttattgagacaatattacctaaaatgggaattacggccacagttattgatccagcagatatgggagctttggagttagcattaaatcagaagaaagtggatcttttctttactgagtctccaacaaatccattcctgagatgtgttgacattgagctggtttcaaagctttgccgtgaaaaaggagccttggtttgcatagatggaacatttgcaactcctcttaaccagaaggcccttgctctaggggctgaccttgttgtgcactctgctacaaaattccttggtgggcacaacgatgttcttgcaggttgtattagtggtcctgaaaaattagtttcagtaatccgaaacttgcatcatatcctgggtggtgctctcaatcctaatgctgcatatcttatcatccgaggcatgaagacgctgcatcttcgtgtacagcaacaaaattctactgcattgaggatggccgaaattttagaggctcatcccaaggtgaaacacgtctattatccaggcttgccgagtcatccggaatatcaccttgcaaagaaacaaatgactggctttggtggtgtggtcagttttgaggttgatggagacctcctaactactgcaaaatttgtggatgctctgaggattccttatattgctccatcgtttggaggttgtgagagcattgtggaccaaccagcaataatgtcttattgggatcttagccagtctgatagagcaaagtatggcatcttggataacttggtccgatttagctttggagtggaagattttgaagatgtgaaagctgatgttcttcaggctttggattccatttag

SEQ ID NO: 14047 - protein, 540 aa, Solanum lycopersicum
MAVSSYARAFPSFECRSEPDFSGSLPHPKAGVRFSGKYNSGSNRSQVYGLSSLIYRFPPNFVRQLSIKARRNCSNIGVAQVVAASWSNNQAGPEFTPAANAVDSSASAAVTSIGITTGDEEVAVVENADCSDQNVQIKGSTGVKYASFLNSDGSVAIHAGERLGRGIVTDAITTPVVNTSAYFFNKTSDLIDFKEKRRASFEYGRYGNPTTVVLEEKISALEGAESTLIVASGMCASTVMFLALVPAGGHIVTTTDCYRKTRVFIETILPKMGITATVIDPADMGALELALNQKKVDLFFTESPTNPFLRCVDIELVSKLCREKGALVCIDGTFATPLNQKALALGADLVVHSATKFLGGHNDVLAGCISGPEKLVSVIRNLHHILGGALNPNAAYLIIRGMKTLHLRVQQQNSTALRMAEILEAHPKVKHVYYPGLPSHPEYHLAKKQMTGFGGVVSFEVDGDLLTTAKFVDALRIPYIAPSFGGCESIVDQPAIMSYWDLSQSDRAKYGILDNLVRFSFGVEDFEDVKADVLQALDSI

SEQ ID NO: 14048 - DNA, 1278 bp, Rhizobium sp
  CDS (1)..(1278): transl_table=11
atgccctcgaaactggcaggccccctggccaaagccgagagccgcagcccgacgatggcccggccgcacactgccggccacccgagccttgcatgggaaaccctggcgctcgacggcggcctgacgatcgatcctgcgacgaaggcgatcgcccccaatatatcgatgtcggtcaacaacctgctggtccccggcgacggcgccttttcggccgacggcgtcgaggatctgacagcgctgcccttcctctacgcgcgctggaccaatccgacggtgcggcagctcgagctgcgaatggccgcgctcgaaggcgccgacgatgcgctggcgaccgcgaccggcgtcgccgcgatcgccgccaccttcctgacctgcctgaaaaggggcgatcacctgatcatcagcgatgtctgctacgcgggcgccaacgagctggcgcggcggatgttgcccgactacggcatcgaggtgaccgcggtgaacatgtcgcgcctcgacgaggtcgccgcggcgttccggcccaacacgcggctcgtccattgcgaaagcccctgcaacccgatcctgcggttgaccgatctttcggcggtagcggcgctcgcacatcggcacggggcattggtttcggtcgattccactctggcaacgccggttgcgacccggccacttgcgctcggcgtcgacctcgtcattcactccctgacgaagttcatcaatggccacggcgatgcgcttggcgggatcgtttgcggccgcaaggaactcgtcgagaagatccgatcgcgcgccggcgtctatctcggcgcttcgctctcggcccagaatgcctggcttatcatgcgcggcatcgatacgctcttcccgcggctcaaggcgatgtccgattcggcaatgcggattgcccatttcctccgcgatcatccgggcgtcagatcggtcacctaccccggtctggagacgcatccccagcatgcgctggcaagacgtcagatgcgcatcttcggcggtatagtcacgttccagacggacgacccgcagaaaatcgcgctccggctcgccgaacggctgcgcgtcgtgcactacgccttctcgctcggccaccagcgcagcatcgtcgtgcttctcgatacgaaggaaatgatgaactcgacctatgggctggaaggcccgcagctcgatgactatcgcgccttcgccggcgacggcgtcttccggctttccgtcggcctcgagtcggtcgacgacatcatcgccgatctggatcgggcgctccgatga

SEQ ID NO: 14049 - protein, 425 aa, Rhizobium sp
MPSKLAGPLAKAESRSPTMARPHTAGHPSLAWETLALDGGLTIDPATKAIAPNISMSVNNLLVPGDGAFSADGVEDLTALPFLYARWTNPTVRQLELRMAALEGADDALATATGVAAIAATFLTCLKRGDHLIISDVCYAGANELARRMLPDYGIEVTAVNMSRLDEVAAAFRPNTRLVHCESPCNPILRLTDLSAVAALAHRHGALVSVDSTLATPVATRPLALGVDLVIHSLTKFINGHGDALGGIVCGRKELVEKIRSRAGVYLGASLSAQNAWLIMRGIDTLFPRLKAMSDSAMRIAHFLRDHPGVRSVTYPGLETHPQHALARRQMRIFGGIVTFQTDDPQKIALRLAERLRVVHYAFSLGHQRSIVVLLDTKEMMNSTYGLEGPQLDDYRAFAGDGVFRLSVGLESVDDIIADLDRALR

SEQ ID NO: 14050 - DNA, 1362 bp, Streptomyces hygroscopicus subsp
  CDS (1)..(1362): transl_table=11
atgagccagcccatcgactccgtcaccgccggccacacccccgaggaaacctccgccgggcccgacacctccgcgtggtctttcgagaccaagcagatccatgcgggtgccgcgccggacccgacgaccggcgcccgggcgacgccgatctaccagacgacgtcgttcgtgttccgggacacccagcacgccgccgacctgttctcgctcgccgagcccggcaacatctacacccgcctccacaaccccacccaggacgtcttcgagcagcggatcgccgcgctggagggcggggtcgcggcggtggcgctgtcctccgggcaggcggcggagaccctggcgatcctgacgctggcgagcgcgggggaccacatcgtctccagtacgtcgctgtacggcggcacgtacaacctgttccggcacacgctgccgaagctcggcatcgaggtgtccttcgtggacgacccggacgatgtcgaggcctggcgggcggcggtccggccgaacaccaaggcgctgttcgcggagacgctgggcaacccgcgcggcaacgtgctggacgtgcgggcggtcgcggacgtggcgcacgcggcgggcgtgccgctgatcgtggacaacacggttccgactccctacctgttgcggcccatcgagcacggcgcggacatcgtcgtgcactcggcgaccaagttcctgggtggtcacggcaccgcgatcgcgggtgtcgtcgtggacggcggcaccttcgacttcggcgcccacgccgaccgtttccccgacttcaccgagcctgaccccagctaccacggtctgcggtactggcccgccctcggccccggcgccttcgccgtcaagctccgggtgcagctgctgcgtgaccttggcccggcgctctccccgcactccgcgttcctgctgctccagggcgtggagacgctgagcctgcgcatcgagcggcactccgcgaacgcccaggcactggccgagtggctggagcagcgcgacgaggtcgcggtcgtccactacccgggactgccgtccagtcgctggtacgaggccgggcagaggtacctgccgcgcggtgccggtgccatcgtctcgttcgagttgcgggacggcgtcgaggcgggcaagcggttcgtggacgccgtcgagctgttcagccacctcgccaacatcggggacgtccgcagcctcatcatccacccggcgtccaccacccacagccagctcgacgaggagcagttggcggccaccggcacctcccccggcctggtgcggctgtcggtcggcatcgagaacctcgccgacctcaaggcggacctggaggccgggttccgcgcggccaaggacgcgtcctga

SEQ ID NO: 14051 - protein, 453 aa, Streptomyces hygroscopicus subsp
MSQPIDSVTAGHTPEETSAGPDTSAWSFETKQIHAGAAPDPTTGARATPIYQTTSFVFRDTQHAADLFSLAEPGNIYTRLHNPTQDVFEQRIAALEGGVAAVALSSGQAAETLAILTLASAGDHIVSSTSLYGGTYNLFRHTLPKLGIEVSFVDDPDDVEAWRAAVRPNTKALFAETLGNPRGNVLDVRAVADVAHAAGVPLIVDNTVPTPYLLRPIEHGADIVVHSATKFLGGHGTAIAGVVVDGGTFDFGAHADRFPDFTEPDPSYHGLRYWPALGPGAFAVKLRVQLLRDLGPALSPHSAFLLLQGVETLSLRIERHSANAQALAEWLEQRDEVAVVHYPGLPSSRWYEAGQRYLPRGAGAIVSFELRDGVEAGKRFVDAVELFSHLANIGDVRSLIIHPASTTHSQLDEEQLAATGTSPGLVRLSVGIENLADLKADLEAGFRAAKDAS

SEQ ID NO: 14052 - DNA, 1197 bp, Citrobacter freundii
  CDS (1)..(1197): transl_table=11
atgtctgactgtcgtacttacggattcaacacccagatcgttcacgcggggcaacaacccgacccttctacaggcgcgctcagtacgcctattttccagacttcaacgtttgtttttgacagcgccgaacaaggtgccgcccgctttgcgctcgaagagtccgggtacatttacacccgtttgggtaaccccaccaccgatgcgctggagaaaaagctggcggtactggaaagaggtgaagccgggctggcaaccgcatccggtatttctgccatcaccaccacgctgctgacgttgtgccagcagggcgaccatatcgtttccgccagcgcgatttacggctgcacccacgcgtttttgtcgcacagcatgccgaagtttgggattaacgtcaggttagtggatgcgggaaagcctgaagaaatccgcgccgccatgcgcccggaaaccaaagtagtgtatatcgaaacgcccgctaacccgacgctgtcgctggtcgacattgaaacggtagccggtatcgcccatcaacaaggcgcattgctggtggtggataacacctttatgtcaccgtactgccagcagcctttacagctaggcgcggatattgtggtgcacagcgtcactaaatatatcaacggtcacggagacgtgattggcgggatcattgttggtaagcaggagtttattgaccaggcgcggtttgttggtctgaaagatatcaccggcggctgcatgagtcctttcaacgcgtggctgacgctacgcggcgttaaaacactggggattcgtatggaacgccactgtgaaaacgcattgaaaatcgcccgcttcctcgaggggcatccgtccattacccgcgtttattatcctggcttgtcttcacacccgcagtatgagctgggccagcgacagatgagcctgccaggaggaattatcagcttcgaaatcgctggcggcctcgaggctggcagacggatgatcaattctgtagaattgtgcctcctcgcggtcagtctcggtgataccgaaaccctcattcagcacccagcgtctatgacacattcgcccgttgcgccagaggaacggcttaaagcaggtattaccgacgggcttatccgtctttctgtgggtcttgaagatccagaagatattattaacgaccttgaacacgccatcagaaaggcaacattctga

SEQ ID NO: 14053 - protein, 398 aa, Citrobacter freundii
MSDCRTYGFNTQIVHAGQQPDPSTGALSTPIFQTSTFVFDSAEQGAARFALEESGYIYTRLGNPTTDALEKKLAVLERGEAGLATASGISAITTTLLTLCQQGDHIVSASAIYGCTHAFLSHSMPKFGINVRLVDAGKPEEIRAAMRPETKVVYIETPANPTLSLVDIETVAGIAHQQGALLVVDNTFMSPYCQQPLQLGADIVVHSVTKYINGHGDVIGGIIVGKQEFIDQARFVGLKDITGGCMSPFNAWLTLRGVKTLGIRMERHCENALKIARFLEGHPSITRVYYPGLSSHPQYELGQRQMSLPGGIISFEIAGGLEAGRRMINSVELCLLAVSLGDTETLIQHPASMTHSPVAPEERLKAGITDGLIRLSVGLEDPEDIINDLEHAIRKATF

SEQ ID NO: 14054 - DNA, 1095 bp, Streptococcus anginosus
  CDS (1)..(1095): transl_table=11
atggataaaaagttacaattagacacgattttagctcatgctggtattaaaacggatgaagcaacaggtgccttgacaacacctttgcatttttcaacgacctatcagcatccagaatttggaaaatccactggatatgactatacgcgcacgaaaaacccaacgcgaagtagcttggagaagacgttagcagccattgagcatgcggattatgcgttagcgaccagttcaggaatgagtgctattgtgctagcctttagcgttttcccgattgggagtagagttatagcggttcgtgacctttatggcggttcttttcgctggtttcatcaagtggagcaagaagggcgctttcactttacatatgcaaatacggaagaggaattgcttgcggctttaacggaggatatagatgtagtgtatctggaaaccccgaccaatccgttaatgcttgagtttgatgttgcatttattgcagaaaaagctcatgcaaaaggtgcaaaggttattgtagataatacgttttatactccaatttatcaacgtcctttggaaaatggagcggatcttgtgctgcattcggcgaccaagtatttaggaggacataatgacgttctggctggtgctcttatgacgagtgacaaagagctttatgagaatctattctacaatctcaatacgacaggagctgttttgtctccatttgatagttatctcttgcttcgaggtttgaaaaccttgtctctgcgtatggagcgttcaacaaaaaacgcacaagctgtggcagctttcttgaaagattcgccagcagtaaaagaggttctctatccgggaaaaggcggcatgatttcctttaaagtcaaggatgaagcagttattccacatttattaaatacactaaaagtctttacctttgcagaaagcttaggtggtgtagaaagcttgattacctatcctgcgacacaaacgcatgcagatattccagcagaagtgcggaaatcctacggtttaacagatgacttgttgcgtttatccattggaatcgaagacagccaagacttaatcacagatttaaaatttgctttggaggtataa

SEQ ID NO: 14055 - protein, 364 aa, Streptococcus anginosus
MDKKLQLDTILAHAGIKTDEATGALTTPLHFSTTYQHPEFGKSTGYDYTRTKNPTRSSLEKTLAAIEHADYALATSSGMSAIVLAFSVFPIGSRVIAVRDLYGGSFRWFHQVEQEGRFHFTYANTEEELLAALTEDIDVVYLETPTNPLMLEFDVAFIAEKAHAKGAKVIVDNTFYTPIYQRPLENGADLVLHSATKYLGGHNDVLAGALMTSDKELYENLFYNLNTTGAVLSPFDSYLLLRGLKTLSLRMERSTKNAQAVAAFLKDSPAVKEVLYPGKGGMISFKVKDEAVIPHLLNTLKVFTFAESLGGVESLITYPATQTHADIPAEVRKSYGLTDDLLRLSIGIEDSQDLITDLKFALEV

SEQ ID NO: 14056 - DNA, 1422 bp, Neotyphodium uncinatum
  CDS (1)..(1422)
atgacagtagatacgattacttcgacttctaacgggaaccaagatgttccaaaggagttcttcccaaaagaattcgaaactcagcttctccatgttggccggttcccggacattttaggcagttgcgcggtgcctgtatacagttcggcagcctttgagttcaacagcgttgcccacggtgcgcgtcttctaaacttgacgcagttcggcaacatctacagccgcttcaccaatcccaccgtcaatgtattgcaaaatcgactggccgggctggaaggaggcgtcgctgcttgtgccgtcgcatccggctctgcggcggtagtcgtgacggtaatggccctcgcaggcgttggcgacaacttcgtctcatcctttcacgttcatgctggcactttccaccagttcgagagtttagccaagcagatgggcatcgagtgccgctttgtgaagtctcgagaccctgcagactttgcggcggccatcgacgacaagaccaagttcgtctggcttgagaccatcagcaaccctggcaacgtaatactagaccttgaggcagtctcgatggtctgccacaccaagggcattcctttgatttgcgataacacctttggctgtgccgggtacttttgtcgtcccatcaaccacggcgtcgatatcgtcgttcactcggccaccaagtggatcggcggccacggcactacggtaggcggtgtcatcgtcgacggcggtacctttgactggggccagcacccggatcggttcccccagttccatgatccacggacgcgactctgggaacgcttttcccgtcgggcgtttgctgtccgctgccagtttgagatcctgcgcgatacggggagcaccctcagcgctcctgcggcccagcagctgctggttggcctcgaatcccttgccgtgcgctgcgagcgccacgcgcagaatgcggccaagattgccgactggctgcgtgagcatcccctcgtggcctgggtcagctatgttggtcacccgaaccaccccgatcaccagggagcgctcaagtacctcaagcgaggctttggctcggtcatctgctttggtctacgggggggtttcgaagcaggtgccctgttctgcgatgcgttgaagatggtcatcaccactaccaacctgggggatgccaagaccctgatcctccatcccgcctcgactactcatgagcacttcagttccgagcatcgagctgaggctggcgtcacagatgatatgatcaggctgtctgtgggtattgagcagatcaaggatatcaaggccgacttcgagcaggcctttgagcaagtgcttcggggtaagaagagtcttcgtaagccttgcatcggaaagattctcttgcaggatgagatcaatgaagacttatttggaccttcagcttgtcgtacgtaa

SEQ ID NO: 14057 - protein, 473 aa, Neotyphodium uncinatum
MTVDTITSTSNGNQDVPKEFFPKEFETQLLHVGRFPDILGSCAVPVYSSAAFEFNSVAHGARLLNLTQFGNIYSRFTNPTVNVLQNRLAGLEGGVAACAVASGSAAVVVTVMALAGVGDNFVSSFHVHAGTFHQFESLAKQMGIECRFVKSRDPADFAAAIDDKTKFVWLETISNPGNVILDLEAVSMVCHTKGIPLICDNTFGCAGYFCRPINHGVDIVVHSATKWIGGHGTTVGGVIVDGGTFDWGQHPDRFPQFHDPRTRLWERFSRRAFAVRCQFEILRDTGSTLSAPAAQQLLVGLESLAVRCERHAQNAAKIADWLREHPLVAWVSYVGHPNHPDHQGALKYLKRGFGSVICFGLRGGFEAGALFCDALKMVITTTNLGDAKTLILHPASTTHEHFSSEHRAEAGVTDDMIRLSVGIEQIKDIKADFEQAFEQVLRGKKSLRKPCIGKILLQDEINEDLFGPSACRT

SEQ ID NO: 14058 - DNA, 1146 bp, Micromonospora echinospora
  CDS (1)..(1146): transl_table=11
gtgagcggtatgcgcttcgacacccggctggtgcacggcggccgccggccgtcggccggcaccggggacgtcgtccccccgatccacgtctccaccacctacgagcgccgcgcgcaggacgagccccgctacttctacggccggggcgagaaccccacccgggaggagctggaggagtgcctcgccggtctggagcgggcgccgttcgccacggtcttctcctccgggcaggccgccgccgcgaccctgctgtcgctggtgcggcccgggcagtgcgtggtgagcaccgacgacgtgtacgccggcaccgacggcctgttcgacctggccgcgcggcagggcgtgcgggtgcggtacgccgacctgaccacgccggaggggatcgcggcggccctggccgagccggacctggccctggtctggatcgagacgccgaccaacccgctgctcaccgtggtggacgtcgccgaggtcagccggcgggcgcacgagcggggggcccgcgtggtggtcgacaacaccttcgccagcccggtgctccagcagccgctggcgctcggcgccgacgtctcgctgtacagcaccaccaagtccatcgccggccacgcggacgtgctgggcggtgccctcgtctaccgcgacgcggacctgcacgccgcggtccgggcgtaccggacgacggccgggaacgtgccgggggcgctggactgcttcctggtccgccgggggctgcacaccctgtcgctgcgggtgcaccggcaggtcgccaccgcgcgcgtcctggtggagcggctgcgggcgagccccgtggtcggcgccgtccactatccggggctgcccgagcacccccagcacgcggtcgtcaaggcccagatgagcgcgcccggcgcgatcgtctccttcgactacctcggcggccccgccgagcgactgctggaccggttcacgctcttcacctgcggcgtcagcctcgggggcgtgcactcccttgtggagtgcccggccctgatgacgcaccgtccgctgtcggccgaggcgcgcgcgcgtcggggcatcggcgagtcgctgatccggttgtcggtcggcatcgaggacccgcaggacctcgccgaggacctgtcccgggcgctggcgggcggcacctga

SEQ ID NO: 14059 - protein, 381 aa, Micromonospora echinospora
MSGMRFDTRLVHGGRRPSAGTGDVVPPIHVSTTYERRAQDEPRYFYGRGENPTREELEECLAGLERAPFATVFSSGQAAAATLLSLVRPGQCVVSTDDVYAGTDGLFDLAARQGVRVRYADLTTPEGIAAALAEPDLALVWIETPTNPLLTVVDVAEVSRRAHERGARVVVDNTFASPVLQQPLALGADVSLYSTTKSIAGHADVLGGALVYRDADLHAAVRAYRTTAGNVPGALDCFLVRRGLHTLSLRVHRQVATARVLVERLRASPVVGAVHYPGLPEHPQHAVVKAQMSAPGAIVSFDYLGGPAERLLDRFTLFTCGVSLGGVHSLVECPALMTHRPLSAEARARRGIGESLIRLSVGIEDPQDLAEDLSRALAGGT

SEQ ID NO: 14060 - DNA, 1188 bp, Fusobacterium nucleatum
  CDS (1)..(1188): transl_table=11
atggaaacgaaaaaatatggtttaggaacaactgctatacatgcaggaactttaaaaaatttatatggaactcttgcaatgccaatatatcaaacttctacttttatatttgactcagctgaacaaggtggaagaagatttgctcttgaagaagctggatatatttatacaagattagggaatcctacaacaacagttttagaaaataaaattgcagctcttgaagaaggagaagctgctgttgctacatcatctggtatgggagctatatcttcaacattatggactgttttaaaagcaggggatcatgttgttactgataaaactttatatggttgtacttttgctttaatgtgtcatggacttacaagatttggaatagaagttacttttgttgatacttcaaatttagatgaagttaaaaatgctatgaaaaaaaatacaagagttgtttatcttgaaacacctgctaacccaaatttaaaaatagttgatttagaagcactttctaaacttgctcatacaaatccaaatactttggttattgttgacaatacttttgcaactccatatatgcaaaaacctttaaaattaggtgcagatattgttgttcactctgtaacaaaatatataaacggacatggagatgtaatagcaggtcttgttataacaaataaagaacttgcagatcaaattcgttttataggtctaaaagatatgacaggagcagttttaggaccacaagatgcttattatatcattagaggtatgaaaacttttgaaattcgtatggaaagacattgtaaaaatgctaaaaaagttgttgaatttttaaataaacacccaaaaattgaaagagtttattatcctggacttgaaacacaccctggtcatgaaatagcaaaaaaacaaatgaaagattttggagcaatgatttcttttgaactaaaaggtggttttgaagcaggtaaaactttactaaataacttaaaactttgttcattagctgtttcattgggagatactgaaactcttattcaacacccagcatctatgacacactcaccttatacaaaagaagaaagagaagctgctggaataactgatggcttggttagattatcagttggtcttgaaaatgttgaagatattatagcagatttggaacaaggactagaaaaaatttaa

SEQ ID NO: 14061 - protein, 395 aa, Fusobacterium nucleatum
METKKYGLGTTAIHAGTLKNLYGTLAMPIYQTSTFIFDSAEQGGRRFALEEAGYIYTRLGNPTTTVLENKIAALEEGEAAVATSSGMGAISSTLWTVLKAGDHVVTDKTLYGCTFALMCHGLTRFGIEVTFVDTSNLDEVKNAMKKNTRVVYLETPANPNLKIVDLEALSKLAHTNPNTLVIVDNTFATPYMQKPLKLGADIVVHSVTKYINGHGDVIAGLVITNKELADQIRFIGLKDMTGAVLGPQDAYYIIRGMKTFEIRMERHCKNAKKVVEFLNKHPKIERVYYPGLETHPGHEIAKKQMKDFGAMISFELKGGFEAGKTLLNNLKLCSLAVSLGDTETLIQHPASMTHSPYTKEEREAAGITDGLVRLSVGLENVEDIIADLEQGLEKI

SEQ ID NO: 14062 - DNA, 1173 bp, Rhodococcus erythropolis
  CDS (1)..(1173): transl_table=11
atgagtgagcaacgcagcaaggccgacaacatcagctggcagggtttctccacgaaagcggtgcatgcgggttacgaacccgatccgctgaccggcgcggtcaacgtgccgatctacgcaagttccaccttcgcccaagacggcgtcggtggaatgcgcagtggcttcgagtacgcgcgaacgggcaaccccacccgtcgcccgctcgaggcgaaccttgccgcgctcgaatccggaacctacggccgagcgttcagttcgggaatggcggccaccgactgcctgctccgttcggtacttcgaccgggcgatcacctggtcatccccgacgacgcgtacggcggaaccttccgtctcatcgacaaggtgttcacgcagtgggggatcgagtacaccccggctccggtgtccgacgtcgatgcggtgcgcgcggcgatgaagtccaacaccaagctggtctgggtcgagacgcccacgaacccgctgctcaatatcggtgacatcgagcttcttgccgaggtcgcccacgagggcaacgcaaagatcgtggtggacaacaccttcgcgtcgccgtacctgcagcagccgctgcagctcggtgccgacatcgcgctgcactccacgaccaagtacatcggcggacactccgacgtggtcggtggcgctctcgtctgcaacgacgaagaactggacaccgcgtttgccttcctgcagaacggatccggcggcgttcccggcccgttcgacgcgttcctgacgttgcgcggaatcaagacactggcgctgcgtatggagcgtcacagtgacaacgcggagaaggtcgtcgaattgctcgacggccaccccgcggttgccagcgtcatctacccgggcctggcttcgcatccgtcacacaaggtcgcggccaagcagatgcgacgcttcggcggcatgatctccgtccgcctcaagggcggcaaggcggcagctctcgacctgtgctcgcgcaccgagatcttcacgctggcagaatctctcggcggcgtcgaatctctcatcgagttccccggcgcgatgacccacgcctcgacggccggttccgctctcgaggttcccgacgatctggttcgcctgtcggtcggcatcgaagacgcctccgatctggtcggcgacatcgagcaagcgctgtcctga

SEQ ID NO: 14063 - protein, 390 aa, Rhodococcus erythropolis
MSEQRSKADNISWQGFSTKAVHAGYEPDPLTGAVNVPIYASSTFAQDGVGGMRSGFEYARTGNPTRRPLEANLAALESGTYGRAFSSGMAATDCLLRSVLRPGDHLVIPDDAYGGTFRLIDKVFTQWGIEYTPAPVSDVDAVRAAMKSNTKLVWVETPTNPLLNIGDIELLAEVAHEGNAKIVVDNTFASPYLQQPLQLGADIALHSTTKYIGGHSDVVGGALVCNDEELDTAFAFLQNGSGGVPGPFDAFLTLRGIKTLALRMERHSDNAEKVVELLDGHPAVASVIYPGLASHPSHKVAAKQMRRFGGMISVRLKGGKAAALDLCSRTEIFTLAESLGGVESLIEFPGAMTHASTAGSALEVPDDLVRLSVGIEDASDLVGDIEQALS

SEQ ID NO: 14064 - DNA, 1341 bp, Oryza sativa
  CDS (1)..(1341)
atggccaccgtctcctccctcccgtccccggcgttcctggccgccgacccggccgccgcgctcccctccgccaccatcctccgcttcccgccaaacttcgtccgccagctcagcaccaaggcccgccgcaactgcagcaacatcggcgtcgcgcagatcgccctgctcggttcagacgccagcctcgccgtccacgcgggcgagaggctgggcagaaggatcgccacagacgcgatcaccacgccagtagtgaacacctcggcctactggttcaacaactcgcaggagctcattgacttcaaggaggggaggcatgctagcttcgagtatgggaggtatggtaacccgaccactgaggcattggagaagaagatgagtgcactggagaaagccgagtccactgtctttgtggcatccgggatgtatgcaagtgtggctatgctcagcgcgcttgttccagcaggtgggcacgttgtgaccaccactgattgttaccgcaagacgagaatttacatggagactgaactacctaagaggggaattacgatgaccgttattagacctgctgacatggatgctctccaaaatgcactggataataataatgtatccctattcttcaccgagactcctactaatccatttctgagatgcatcgacattgatcttgtctcaaaaatgtgccatagcaagggagcattgctttgtattgatagtacctttgcatccccaatcaatcagaaggcactaactctaggtgctgacttagttatccattcagcaacaaagtacattgctgggcacaatgatgttattggaggctgcatcagtggcagagatgagctagtttccaaagtccgcatctatcaccatgtagttggtggtgttctaaatccgaatgctgcctacttgattcttcgaggcatgaagacactgcatctccgtgtacaatgtcagaataatactgcaatgcggatggcccaatttttagaggaacatccaaagattgcacgtgtctactatcctggtctgccaagtcacccagaacatcacattgccaagagtcagatgaccggctttggtggtgtcattagttttgaggttgctggagactttgatgctactaggagatttattgattctgttaagataccctatcatgccccatcatttgggggctgtgagagcattattgatcagcctgccatcatgtcttactgggattcaaaggagcagagagaaatctatggaatcaaggacaacttgatcaggttcagcattggagtggaggattttgaggatttgaagaatgacgttgttcaggcgcttgacaagatctaa

SEQ ID NO: 14065 - protein, 446 aa, Oryza sativa
MATVSSLPSPAFLAADPAAALPSATILRFPPNFVRQLSTKARRNCSNIGVAQIALLGSDASLAVHAGERLGRRIATDAITTPVVNTSAYWFNNSQELIDFKEGRHASFEYGRYGNPTTEALEKKMSALEKAESTVFVASGMYASVAMLSALVPAGGHVVTTTDCYRKTRIYMETELPKRGITMTVIRPADMDALQNALDNNNVSLFFTETPTNPFLRCIDIDLVSKMCHSKGALLCIDSTFASPINQKALTLGADLVIHSATKYIAGHNDVIGGCISGRDELVSKVRIYHHVVGGVLNPNAAYLILRGMKTLHLRVQCQNNTAMRMAQFLEEHPKIARVYYPGLPSHPEHHIAKSQMTGFGGVISFEVAGDFDATRRFIDSVKIPYHAPSFGGCESIIDQPAIMSYWDSKEQREIYGIKDNLIRFSIGVEDFEDLKNDVVQALDKI

SEQ ID NO: 14066 - DNA, 1194 bp, Rhizobium leguminosarum bv
  CDS (1)..(1194): transl_table=11
  misc_feature (788)..(788): n is a, g, c or t
atgaccatgaaccagtcgatcaacccgcacgaccttggcgcccatgcggccgctgacgatctctttacgcctgtcgatccggcggcattcaacgccgtgtctccgccgatcttccaaacgtcgctgttcacctacgacagttacgaggcgatggaggatgttttcgccggccgcacgcgcaactacatctattcgcgtggtgacaatccgacggttcgtgaattcgaactcctggtcgcccgcctcgagggcgcagaggatggacgggctttctcgagcggaacggccgccattacttcgacaattctcagtctcgttgaggccggagaccgggtcgttgcggttcgccatctctacaacgatgtctaccgccttctggtgaagctgctcggcaggctcggcgtcgcggtggactttgtcgatcccgccgaccacgacgaggtccgcaaggctctgtcgggcgccaagctgctctatcttgaaaaccccacatccttcgtcttcgagcttcaggacattgcggcgctgtcggccatggcaaaggaggccggtgttacgacaatcatcgacaattcctgggcaacgccgctctttcaaaaaccgatccagcatggcgtcgatatcgtcattcacgccgcctcgaaatatctcggcggtcacagcgatacggtggccggcgtcgtcgtcggctcgaaggaggccatcgccaggatcaattcaatatcctacccctatgtcggcgccaaactgtcaccgttcgaggcctggctgctgctgcgcggcatgcngacgctgcgtgtccgtctcaaggagcacgagcgcagcgggcttttgttggcagggcggctgaaggagcattctgcgatcgcacgcgttcgtcacccggcattccaggaacatcccggacgggcaacgctcacgggttatgccgggctgttcgccttcgacctctatcccgatatcgatgtcgcacgttttgtgaatagccttcgcgacatccgcctcggtgtcagctggggggggaccgaaacgctggtggtccccgccaaggtcgcgttgcagatccccgaccggatgacctccttcatccggttcggtgtgagcgagcagacggttcggttcgccgttggtctggaagagccggaactgttgtggagtgatttgcagcaggcgctgtacgccgcgaaacggtag

SEQ ID NO: 14067 - protein, 397 aa, Rhizobium leguminosarum bv
  misc_feature (263)..(263): The Xaa at location 263 stands for Arg, Gln, Leu, or Pro.
MTMNQSINPHDLGAHAAADDLFTPVDPAAFNAVSPPIFQTSLFTYDSYEAMEDVFAGRTRNYIYSRGDNPTVREFELLVARLEGAEDGRAFSSGTAAITSTILSLVEAGDRVVAVRHLYNDVYRLLVKLLGRLGVAVDFVDPADHDEVRKALSGAKLLYLENPTSFVFELQDIAALSAMAKEAGVTTIIDNSWATPLFQKPIQHGVDIVIHAASKYLGGHSDTVAGVVVGSKEAIARINSISYPYVGAKLSPFEAWLLLRGMXTLRVRLKEHERSGLLLAGRLKEHSAIARVRHPAFQEHPGRATLTGYAGLFAFDLYPDIDVARFVNSLRDIRLGVSWGGTETLVVPAKVALQIPDRMTSFIRFGVSEQTVRFAVGLEEPELLWSDLQQALYAAKR

SEQ ID NO: 14068 - DNA, 1200 bp, Xanthomonas campestris pv
  CDS (1)..(1200): transl_table=11
atgtccaaccgcaccgcaaacagccacgatggcgagcgcgcactgtcgctcgcaacgctggcgatccatggtggacagtcgccggaccccagcaccggggcggtgatgccgccgatctacgcgacgtccacctatgcgcagtccagccccggcgagcatcagggttttgagtactcgcggacccacaaccccacgcgttttgcctatgagcgctgtgttgccgtgctggaaggcggcacccgcgggtttgccttcgcctccggcatggccgcgacctccacagtgatggagttgttggacgccggcagccacgtggtagcgaccgatgacctgtacggcggctcgttccgcctgttcgagcgtgtgcgtcgccgcaccgccggcctggacttcagtttcgtcgacctcaccgacccggccgcgttcgaggccgcgatccgcccgaccaccaagatggtctggatcgaaaccccgaccaacccgatgctcaagctggtcgacatcgccgccattgcggcgatcgcgcgcaagtacggcctgctggtggtggtggacaacaccttcgcctcgccgatgctgcagcgcccgctggagctgggcgccgacctggtggtgcattcggccaccaaatacctcaacggccactcggacatggtgggcggcatcgccgtggtcggcgacaacgccgaactcgccgaacagatggccttcctgcagaactcgatcggcggcgtacaaggcccgttcgacagcttcctggccctgcgcgggctcaagaccctgccgctgcgcatgcgcgcgcactgcgaaaacgccctggcgctggcgcagtggctggagacccacccggcgatcgaaaaagtgatctatcccggcctgacctcgcacccgcagcacgcactcgccaagcagcagatgtccggcttcggcggcatcgtctcgatcgtcctcaagggcggcttcgaggcagccaagcgtttctgcgaaaagaccgaactgttcaccctggccgaatcgttgggtggtgtggaaagtttggtcaatcatcccgccgtcatgacccatgcctcgatccctgtggcccgccgcgaaaagcttggcatcagcgatgcgctggtgcggctgagtgtgggggttgaggatgtgggggatttgcggggggatttggagcgtgcgcttgaggcgtctcagtctccatga

SEQ ID NO: 14069 - protein, 399 aa, Xanthomonas campestris pv
MSNRTANSHDGERALSLATLAIHGGQSPDPSTGAVMPPIYATSTYAQSSPGEHQGFEYSRTHNPTRFAYERCVAVLEGGTRGFAFASGMAATSTVMELLDAGSHVVATDDLYGGSFRLFERVRRRTAGLDFSFVDLTDPAAFEAAIRPTTKMVWIETPTNPMLKLVDIAAIAAIARKYGLLVVVDNTFASPMLQRPLELGADLVVHSATKYLNGHSDMVGGIAVVGDNAELAEQMAFLQNSIGGVQGPFDSFLALRGLKTLPLRMRAHCENALALAQWLETHPAIEKVIYPGLTSHPQHALAKQQMSGFGGIVSIVLKGGFEAAKRFCEKTELFTLAESLGGVESLVNHPAVMTHASIPVARREKLGISDALVRLSVGVEDVGDLRGDLERALEASQSP

SEQ ID NO: 14070 - DNA, 1527 bp, Oryza sativa subsp
  CDS (1)..(1527)
atggcttcgtcagtagcactcgtgctaatgaaggcttccctcccgcggcggcagcgcatggaccgacctcgccgttctcccgcggcggttcagcttgtcgccggcgttgatgcagccgacgacatgtttggctccctcgcaggttgtcctcctcggccgctggagtatcccgtggtgccagacttggacgactacgacgtcgatgacgctccggtggctggacgacccgcacccgcctcggacaagacgctggcggtgcacgccggggagaagctcgggagcggcgccgccgccgcggagacggactcgatcgcgacgccgatcgtgggcggcacgacgcactggttcagggactcggccgacctcatcgccttccgggaaggccggcggcggagcttcgagtacgggcggtacggcaacccgacggtgaaggtgctggaggagaagatcagcgcgctggagagggcggaggcgacgctggtgacctcctccggtatgaacgccatcgtcgccacgctgctcgccctcgtccctcccggcggccacgtcgtcgccaccgccgactgctacagcgaggcccgcgcattcatccgcgacaagctctccaacatgggcatcacggtatgtaaagttgtaaacaccattaatggaagcttcatcaaagcatcagcatggcattgcttgcaatctgactctaataatggcgttcgttccatggatttgcagtcgacgttcgtggatcttgacgacgacatggaggctctggaatccgttcttgatgagggcgaggtgacgatgttctacgccgactcgatgacgaaccctcacctgaaggtcgtcgacgtgacacgcgtcgcggagctgtgccaccggagaggcgcgctggtgtgcatcgacagcacgctggcgtcgcccatcaaccagaagccgctcgccctcggcgccgacgtggtcctccactccgccaccaagtacatcgccggccaccacgacgtcatcgccggctgcgtcagcggctcggaggccctcgtctcgcggatccgcacgtggcaccacgacctcggcggcgccatcagtccgaatgcggcgtacatgatcattcggggattgaagacgttggcgctgcgggtgcaggcgcagaacaggacggcgctgcggatggcgcagctgctggagaagcaccccaagatcgagcgcgtctactaccctgggctggagagcagcccgtggcacggcgtagcgacgaggcagatggctggtgcaggcggcgtggtcggcttggaggtggcgtcggacatgcgcggcgcgatgaggttcgtggacgcgctggagttgccgctcatcgcgacgtcgctcggcggctgcgagagccttgtccagcagcccgcaatcatgtcctactggggtaagtgcgacgaggagaaggcaaagaatgggatcaaggacaactttgtgaggttcagttttgggatcgagaagtttgaggatctcagggatgacatactccaagccttagggaagatttaa

SEQ ID NO: 14071 - protein, 508 aa, Oryza sativa subsp
MASSVALVLMKASLPRRQRMDRPRRSPAAVQLVAGVDAADDMFGSLAGCPPRPLEYPVVPDLDDYDVDDAPVAGRPAPASDKTLAVHAGEKLGSGAAAAETDSIATPIVGGTTHWFRDSADLIAFREGRRRSFEYGRYGNPTVKVLEEKISALERAEATLVTSSGMNAIVATLLALVPPGGHVVATADCYSEARAFIRDKLSNMGITVCKVVNTINGSFIKASAWHCLQSDSNNGVRSMDLQSTFVDLDDDMEALESVLDEGEVTMFYADSMTNPHLKVVDVTRVAELCHRRGALVCIDSTLASPINQKPLALGADVVLHSATKYIAGHHDVIAGCVSGSEALVSRIRTWHHDLGGAISPNAAYMIIRGLKTLALRVQAQNRTALRMAQLLEKHPKIERVYYPGLESSPWHGVATRQMAGAGGVVGLEVASDMRGAMRFVDALELPLIATSLGGCESLVQQPAIMSYWGKCDEEKAKNGIKDNFVRFSFGIEKFEDLRDDILQALGKI

SEQ ID NO: 14072 - DNA, 1185 bp, Thermoplasma volcanium
  CDS (1)..(1185): transl_table=11
atgaataaagttagaatggcagaaaagaggctctttaatggttttaatacccgggcggtacaatcgggagaactgcgagaccctaggtttggcaacgtcactacgcctatatttgagacatccacttttgtctttcctaattcagaaaaagatgcctatatcgataacacgagaaatttgccatacatatatacgaggtggggaaacccaacagtccaagcgtttgaagaaaaatatgcttcgctagaaaaggccgaacatgcactctcattctcatccggtatgggtgctataacatcggtaatccttgctttagcagaaaggggagacaagatattgtctgtttctgatctttatggacagacattctactttcttaacaaagttctcccagagtacggcatatccgttgaatacataagcacagataggctaaattcaggggaattcaagccctcggattacgatatcatttatctcgaatccataactaaccccacattaaaagttccagacataaaagcggtttctgaaaggtctaccggaaaaaaaataatagtcgatgctacatttgcatctccatacaaccagaaccctctggaccttggtgcggatgtagttatacacagtgcaaccaagtacatatcaggacacagtgacgtagtaatgggcgtattttctacaaacgataaatctatattcgataaggttgttgtaaggagaaagacttttggatcaaacccggatccgatacagtcttatctggcgcttagaggaataaaaactctcggcctaaggatggagaaacacaacaaaaacggtatggaactagcgaaataccttagaacagaacccaggataagccacgtctactatcctgacactgaaattggcaaaaaagtcctaaggggattcggaggcatgatatcttttgaactaaggccagaactagatgttcacgtattcatgaggaaccttaagatacccatggttgctgcaagcctaggtggtgtggagagcctcattactcttcctgttgaaacttcacactcgtccatgactaaagaagagagggagaggataggcataacagacaacctagtccgattctcaataggcatagaagaccatgtagacttgatcgatgatataaaacaagctttggataaggcttcagagtcttga

SEQ ID NO: 14073 - protein, 394 aa, Thermoplasma volcanium
MNKVRMAEKRLFNGFNTRAVQSGELRDPRFGNVTTPIFETSTFVFPNSEKDAYIDNTRNLPYIYTRWGNPTVQAFEEKYASLEKAEHALSFSSGMGAITSVILALAERGDKILSVSDLYGQTFYFLNKVLPEYGISVEYISTDRLNSGEFKPSDYDIIYLESITNPTLKVPDIKAVSERSTGKKIIVDATFASPYNQNPLDLGADVVIHSATKYISGHSDVVMGVFSTNDKSIFDKVVVRRKTFGSNPDPIQSYLALRGIKTLGLRMEKHNKNGMELAKYLRTEPRISHVYYPDTEIGKKVLRGFGGMISFELRPELDVHVFMRNLKIPMVAASLGGVESLITLPVETSHSSMTKEERERIGITDNLVRFSIGIEDHVDLIDDIKQALDKASES

SEQ ID NO: 14074 - DNA, 1332 bp, Pichia pastoris
  CDS (1)..(1332)
atgccttctcacttcgacactttgcagctgcacgccggtcagactgaagctccacacaatgccagagctgttcctatctacgctacctcgtcttacgttttcagagactctgagcacggtgccaagctgttcggtttggaggagccaggttacatctactctcgtttgatgaaccctactcagaacgtctttgaagagagaattgccgctttggagggtggtgccgctgctttggctgttggatccggtcaagctgctcaattcctggctattgctggtttggctcacaccggtgacaacgtcatctccacctctttcttgtacggaggaacttacaaccagttcaaggtcgccctcaagagactgggaattgaatccagatttgtccatggtgatgacccagctgaattcgagagactgatcgatgataagaccaaggccatctacgttgagtccattggtaacccaaagtacaatattccagattttgaggctctcgcaggacttgcccacaagcacggtatcccattagttgttgacaacacctttggtgccggtggttactacgttagaccaatcgagcttggtgctgacactgtcacccactccaccactaagtgcatcaatggtcacggtaacaccatcggtggtgttgtcgttgactctggtaagttcccatggaaagactacccagagaagtaccctcaattctccaagccatctgagggttaccacggtttgatcttgaatgacgcctttggaccagctgccttcattggtcacttgagaactgaactgctaagagatttgggtcctgcttcaagtccattcggtaacttcttgaacataatcggtttggagaccttatctctgagagctgagagacacgctgagaatgctttgaagctggccaaatacttggaaacctctccatacgtcagctgggtctcttaccctggtttggagtctcacgactaccacgaggccgctaagaagtacttgaagaacggtttcggtggtgtattgtcttttggagtcaaggatcatggcaagccagccctcactcccttcgaagaggctggtcctaaggttgtagactccctgaaggttttctccaacttggctaacgttggtgactccaagtctttgatcattgctccttactactctactcaccaacagttgtctcacgaggagaagctggcttccggtgtcaccaaggactctatccgtgtttctgtcggaacagagttcatcgatgatcttattcgagaccttgaacaggcctttgccttcgtttacgaggagcgaaacacaaagttcgtgagttag

SEQ ID NO: 14075 - protein, 443 aa, Pichia pastoris
MPSHFDTLQLHAGQTEAPHNARAVPIYATSSYVFRDSEHGAKLFGLEEPGYIYSRLMNPTQNVFEERIAALEGGAAALAVGSGQAAQFLAIAGLAHTGDNVISTSFLYGGTYNQFKVALKRLGIESRFVHGDDPAEFERLIDDKTKAIYVESIGNPKYNIPDFEALAGLAHKHGIPLVVDNTFGAGGYYVRPIELGADTVTHSTTKCINGHGNTIGGVVVDSGKFPWKDYPEKYPQFSKPSEGYHGLILNDAFGPAAFIGHLRTELLRDLGPASSPFGNFLNIIGLETLSLRAERHAENALKLAKYLETSPYVSWVSYPGLESHDYHEAAKKYLKNGFGGVLSFGVKDHGKPALTPFEEAGPKVVDSLKVFSNLANVGDSKSLIIAPYYSTHQQLSHEEKLASGVTKDSIRVSVGTEFIDDLIRDLEQAFAFVYEERNTKFVS

SEQ ID NO: 14076 - DNA, 1122 bp, Arabidopsis thaliana
  CDS (1)..(1122)
atgaagacgagttcgatcacgacccttgtagtcaacacaacgacctacttcttcaaagatactaccgagctaatcgacttcaaggaaaaacggattgacttgtatgagtatgctcgttatggaaacccaacaactatggcactcgaagaaaagattagtgtacttgaaggggctgaatcaactttggtaatggcatcggggatgtatgcaagtaatgttatgcttttggctttggttcctacaaatggacatattgtggcaactaaagattgttacaaggagacaaggattttcatggagaattttcttactaaactgggaatcactgtaacttttattgactctgatgatattgcggggctccaaactcttgttaataaccatgaggtttctttgttctttaccgagtccccaacaaatccatttcttcgatgtgtagatattaagttagtttcaaaaatctgtcatagaagaggaactcttgtttgtatagacgctaccattgcaacacctatcaatcaaaagacacttgctcttggtgctgatcttgttcaccattctgctactaagtacattggaggccacaacgattttctagctggaagcatatccggttcaatggagttggtttccaagattcgcaatttgcataagcttttgggaggcacgcttaatccgaacgctgcatatttactcatacgaggcatgaagacgatgcatcttcgtgtaagacaacagaattcaaccggtatgaagatggcccaagtgttagaagcacatcccaaggtgagtcgcgtttactatctaggccttccgagtcatcccgaacatttaatagccaagcgacaaatgactggtattggtggcctgatctctttcgagattgatggagatctcaagactacaatcaagttcatcgatgctctgaagatcccttaccttgcagcatcgtttggtggatgcgagagcctcgtggaccaactcgccacagggatctgggatataccacgagaagaaaggcttaaagatggattccaagacaacctagttcgcttcagttttggtattgaagactttgaggacatcaaggctgacgttctccaagctcttgaaaccatctga

SEQ ID NO: 14077 - protein, 373 aa, Arabidopsis thaliana
MKTSSITTLVVNTTTYFFKDTTELIDFKEKRIDLYEYARYGNPTTMALEEKISVLEGAESTLVMASGMYASNVMLLALVPTNGHIVATKDCYKETRIFMENFLTKLGITVTFIDSDDIAGLQTLVNNHEVSLFFTESPTNPFLRCVDIKLVSKICHRRGTLVCIDATIATPINQKTLALGADLVHHSATKYIGGHNDFLAGSISGSMELVSKIRNLHKLLGGTLNPNAAYLLIRGMKTMHLRVRQQNSTGMKMAQVLEAHPKVSRVYYLGLPSHPEHLIAKRQMTGIGGLISFEIDGDLKTTIKFIDALKIPYLAASFGGCESLVDQLATGIWDIPREERLKDGFQDNLVRFSFGIEDFEDIKADVLQALETI

SEQ ID NO: 14078 - DNA, 1143 bp, Lactobacillus reuteri
  CDS (1)..(1143): transl_table=11
atgaaattcaacacccaattaattcatggcggtaatagtgaggatccaacaactggtgccgtttcaacaccaatctaccgttcatcaacattccaccaacacgttcttggcggtgaacctaaatgggaatattctcgaacaggaaatccaacacgtgtatctcttgaaaaattaatcgcagagcttgaacatgggacagtcggctttgcatttgcttctggatctgctgctattcatgctactttttctctattctcgcaaggcgatcattttgtagttggtagtgatgtatatgggggaacgttccggttaatcaataaggtattaaaacgctttggctttgaatttactgttgttgatatgcaagaccttgaagcagtagaaaatgcaattcaagataataccgttgcagtttactttgaaacaccgactaatccgctcttacaaatcgctgatattaaagcaattgccgatatcgcaaagaagcatggagtaaagacaattgttgataatacctttgccactccttataatcaacaaccattaactctcggggcggatattgttgttcactccgcaaccaaatatttaggcggtcatagtgatgttgttgccggattagcagttactaacgatgatgaaattgctgaacaattagcattcctgcaaaactcaatcggtagtacgcttggtcctgacgatagttggctattacaacgggggatgaaaactctcggtgcccggatgcgagttcaccaagaaaatgcgaatgaagttattaacttcctccaaaatgatgaccacattggaaaaatttattatccaggcttaaaagatttccctggtcatgaggttgcagctaagcaaatgcggaactttggagcaatgatctcctttgaacttaaggatagtttagatgcgaagaagtttgttgaaagtctacaattgattgatcttgccgaaagtttggggggaattgaaagtttgattgaagttccagctgtcatgactcatggatctattccccgggaaatacgattagaaaacggaattaaagatgagttgattcgtctttcagtgggaattgaggaccctgaagatattattgctgacttgcaacaagcacttaaaaaattagattaa

SEQ ID NO: 14079 - protein, 380 aa, Lactobacillus reuteri
MKFNTQLIHGGNSEDPTTGAVSTPIYRSSTFHQHVLGGEPKWEYSRTGNPTRVSLEKLIAELEHGTVGFAFASGSAAIHATFSLFSQGDHFVVGSDVYGGTFRLINKVLKRFGFEFTVVDMQDLEAVENAIQDNTVAVYFETPTNPLLQIADIKAIADIAKKHGVKTIVDNTFATPYNQQPLTLGADIVVHSATKYLGGHSDVVAGLAVTNDDEIAEQLAFLQNSIGSTLGPDDSWLLQRGMKTLGARMRVHQENANEVINFLQNDDHIGKIYYPGLKDFPGHEVAAKQMRNFGAMISFELKDSLDAKKFVESLQLIDLAESLGGIESLIEVPAVMTHGSIPREIRLENGIKDELIRLSVGIEDPEDIIADLQQALKKLD

SEQ ID NO: 14080 - DNA, 1152 bp, Oryza sativa subsp
  CDS (1)..(1152)
atgaaggagcctagcgtggcgacgatactgacgagcttcgagaactcgttcgatgggttcgggtctatgagcacgccgctgtaccagacggccacgtttaagcagccttcagcaaccgataatggaccttatgattacactagaagtggtaaccctacacgtgatgttctccaaagccttatggctaagcttgagaaggcggatcaggcattctgcttcaccagtgggatggcagcactagctgcagtaacacacctccttaagtctggacaagaaatagttgctggagaggacatatatggtggctcagaccgtctgctctcacaagttgccccgagacatgggattgtagtaaaacgaattgatacaaccaaaattagtgaggtaacttctgcaattgggcccttgactaaactagtatggcttgaaagtcccaccaatccccgtctacaaattactgatataaagaaaatagcagagatagctcattaccatggtgctcttgttttagtagacaacagcatcatgtctcctgtgctctcccgtcctctagaacttggagcagatattgttatgcactcagcaaccaaatttatagctggacatagcgatcttatggctggaattcttgcggtgaagggtgaaagcttggctaaagagattgcatttctacaaaatgctgaaggatcaggtttggcaccatttgattgctggctttgtttgagaggaatcaaaaccatggctttgcgggtggagaagcagcaggctaatgctcagaagattgctgaatttctagcttctcatccaagagtaaagaaagtgaactatgcaggacttcctgatcatcctggacgatctctacactattcccaggcaaagggagcgggttcagttctcagtttcctaactggttcattagctctctcaaaacatgttgttgagaccacaaagtacttcaatgtaacagttagctttggaagtgtgaaatcgctcattagcctgccatgcttcatgtcacacgccagcatcccttctgcggttcgcgaggagcgcggcctgacagacgatctagtcaggatatcggttggaattgaggatgccgacgacctcatagcggatcttgatcatgctctccggtctggtccagcttag

SEQ ID NO: 14081 - protein, 383 aa, Oryza sativa subsp
MKEPSVATILTSFENSFDGFGSMSTPLYQTATFKQPSATDNGPYDYTRSGNPTRDVLQSLMAKLEKADQAFCFTSGMAALAAVTHLLKSGQEIVAGEDIYGGSDRLLSQVAPRHGIVVKRIDTTKISEVTSAIGPLTKLVWLESPTNPRLQITDIKKIAEIAHYHGALVLVDNSIMSPVLSRPLELGADIVMHSATKFIAGHSDLMAGILAVKGESLAKEIAFLQNAEGSGLAPFDCWLCLRGIKTMALRVEKQQANAQKIAEFLASHPRVKKVNYAGLPDHPGRSLHYSQAKGAGSVLSFLTGSLALSKHVVETTKYFNVTVSFGSVKSLISLPCFMSHASIPSAVREERGLTDDLVRISVGIEDADDLIADLDHALRSGPA

SEQ ID NO: 14082 - DNA, 1623 bp, Solanum tuberosum
  CDS (1)..(1623)
atggccgttccaagcagtgctagggcatttccgtccttccaatgccgttccgatcccgacttctccggcggcgttccacgtcatgacctccctaacgccggcgttcgtttttcagttaaggtcaagtcgttgagtcgtggatcttcggttcacggtatgtcttctctgatccttcgcttcccgcccaacttcgtaaggcagctcagcgttaaagctcgtaggaactgcagtaacatcggtttagcacaagttgttgcggcttcctggtctaataaccacgcttctcctgactttactccggcggctaaggccgtagatgccgcctccattgctccttttgatattaccacaggtgatgaggagggggcggtggtggaagattcgcctcgtgctgatcgaaatgtacagattgaggatttgacagatgtcaaatattcttcatttttgagttctgatgggagcatcgcaattcatgccggtgaaaggttaggacgtggtattgttactgatgcaataactaccccagtggttaacacatctgcttatttcttcaagaagacttctgaccttattgacttcaaggagaaaaaacgtgcgagttttgaatatgggcgctatgggaaccccactagtattgttgcagaggaaaagataagtgcactggagggtgctgatgcaaccttgttaatggcatctggaatgtgtgctagtactgtattgttgttggcattggttcctgctggtgggcatattgtaacaacaacagactgctataggaagacccggatatttattgagacaatactgcctaaaatgggaatcacggcgacagtcattgacccagctgatattggagctctagagtctgtgctaaatcagaagaaagtgactcttttctttaccgagtctccaacaaatccattcctgagatgtgttgacattgagcttgtttcgaagctttgccatgaaaaaggagcattagtttgcatagatgggacgtttgcaactccccttaaccaaaaggtccttgctctaggggctgacctcgttgtgcactctgcaacaaaatatcttggtggccacaatgatgttcttggaggttgcatcagtggtcctgataagttagtttcagcagttcgtaccttgcatcatatcctgggtggtgctatcaatcctaatgctgcgtatttaatcatcagaggcatgaagacgttgcatctccgtgtacagcaacagaactcaactgcacaaaggatagccgaaattttagaggctcatccaaaggtgaggtgtgtctattatccaggcttgccaagtcatccagaataccatcttgcaaagagacaaatgactggttttggtggggtggtcagttttgaggttgatggggatctgctaactactgcaaaatttgttgatgctctaaaaattccttatattgctccatcgtttggaggttgtgagagcattgtggaccaaccagcaattatgtcttactgggatcttaaggagtcagagagagctaagtatgggatcatggacaacttggttcgattcagctttggagtagaagactttgaagacttgaaagctgatattcttcaggcgctggagtccatgtag

SEQ ID NO: 14083 - protein, 540 aa, Solanum tuberosum
MAVPSSARAFPSFQCRSDPDFSGGVPRHDLPNAGVRFSVKVKSLSRGSSVHGMSSLILRFPPNFVRQLSVKARRNCSNIGLAQVVAASWSNNHASPDFTPAAKAVDAASIAPFDITTGDEEGAVVEDSPRADRNVQIEDLTDVKYSSFLSSDGSIAIHAGERLGRGIVTDAITTPVVNTSAYFFKKTSDLIDFKEKKRASFEYGRYGNPTSIVAEEKISALEGADATLLMASGMCASTVLLLALVPAGGHIVTTTDCYRKTRIFIETILPKMGITATVIDPADIGALESVLNQKKVTLFFTESPTNPFLRCVDIELVSKLCHEKGALVCIDGTFATPLNQKVLALGADLVVHSATKYLGGHNDVLGGCISGPDKLVSAVRTLHHILGGAINPNAAYLIIRGMKTLHLRVQQQNSTAQRIAEILEAHPKVRCVYYPGLPSHPEYHLAKRQMTGFGGVVSFEVDGDLLTTAKFVDALKIPYIAPSFGGCESIVDQPAIMSYWDLKESERAKYGIMDNLVRFSFGVEDFEDLKADILQALESM

SEQ ID NO: 14084 - DNA, 1620 bp, Solanum tuberosum
  CDS (1)..(1620)
atggccgtctctagttacgctagggcatttccgtcattcgaatgtcgttcggaacctgatttctccggcagccttccacatcctaaagccggcgttcgattctccggcaagtataactccgggagtaaccgatctcaggtttatggtctgtcttctctgattttcaggtttcctcctaatttcgtgaggcagctaagcattaaggctaggaggaattgcagcaatatcggcgtggctcaagttgtggcggcttcctggtctaacaaccaagccggtcctgagttcactccggcggctaatgctgtcgattcttccgcttccgctgctgttacttcgattggtatcaccgcaggtgacgaggaggtggcggttgtggaaaatgcggattgtaatgatcaaaatgtacaaattacgggtacaggtgttaaatatgcttcatttttgaattcagatggaagcgttgctattcatgccggtgaaaggttgggacgcggtattgttactgatgccataactaccccagtggttaacacatctgcttacttcttcaacaaaacttctgaccttattgattttaaggagaaaagacgtgcaagttttgaatatggccgctatgggaaccccactactgttgttttggaggagaaaattagtgcacttgagggtgctgaatcaaccttgatagtggcatctggaatgtgtgccagtactgtaatgttcctggccttggttcctgctggtgggcatattgttactaccacagactgctacaggaagacacgtgtttttattgagacaatactgcctaaaatgggaattacggccacagtcattgatccagcagatatgggagctttggagttaacattaaatcagaagaaagtggatcttttctttaccgagtctccaacaaatccattcctgagatgtgttgacattgagctggtttcaaagctttgccgtgaaaaaggagccttggtttgcatagatgggacgtttgcaactcctcttaaccagaaggcccttgctctaggggctgaccttgttgtgcactccgctacaaaattccttggtgggcacaatgatgttcttgcaggttgcattagtggtcctgaaaaattagtttcagtaatccgaaacttgcatcatatccttggtggtgctctcaatcctaatgctgcatatcttatcatccgaggcatgaagacgctgcatcttcgtgtacagcaacaaaattcaactgcattgaggatggccgaaattttagaggctcatcccaaggtgaaacacgtctattatccaggcttgccgagtcatccggaatatcatcttgcaaagaaacaaatgactggctttggtggtgtggtcagttttgaggttgatggagacctcctaactactgcaaaatttgtggatgctctgaggattccctatattgctccatcgtttggaggttgtgagagcattgtggaccaaccagcaataatgtcttattgggatcttagccaatctgatagagcaaagtatggtatcttggataacttggttcggtttagctttggagtggaagactttgaagatgtgaaagctgatgttcttcaggctttggattccatatag

SEQ ID NO: 14085 - protein, 539 aa, Solanum tuberosum
MAVSSYARAFPSFECRSEPDFSGSLPHPKAGVRFSGKYNSGSNRSQVYGLSSLIFRFPPNFVRQLSIKARRNCSNIGVAQVVAASWSNNQAGPEFTPAANAVDSSASAAVTSIGITAGDEEVAVVENADCNDQNVQITGTGVKYASFLNSDGSVAIHAGERLGRGIVTDAITTPVVNTSAYFFNKTSDLIDFKEKRRASFEYGRYGNPTTVVLEEKISALEGAESTLIVASGMCASTVMFLALVPAGGHIVTTTDCYRKTRVFIETILPKMGITATVIDPADMGALELTLNQKKVDLFFTESPTNPFLRCVDIELVSKLCREKGALVCIDGTFATPLNQKALALGADLVVHSATKFLGGHNDVLAGCISGPEKLVSVIRNLHHILGGALNPNAAYLIIRGMKTLHLRVQQQNSTALRMAEILEAHPKVKHVYYPGLPSHPEYHLAKKQMTGFGGVVSFEVDGDLLTTAKFVDALRIPYIAPSFGGCESIVDQPAIMSYWDLSQSDRAKYGILDNLVRFSFGVEDFEDVKADVLQALDSI

SEQ ID NO: 14086 - DNA, 1416 bp, Solanum tuberosum
  CDS (1)..(1416)
atggcatgttctctgtctctcaagcagcccttcagctctttgcctaccaacacaaccacccagggtaaattgcctgtaaactttccagtgacatttgggtgcatgaatgggaagggaactctaatagaacagaaattccaactgaattgctcaagagacaaagagatggatctcactgcatcagctttgattgatagtgctgctgccgaatgcatggatgagatggggactatggaactacctcctcaagttgaggctagggaagcaaaagagccaagtgtttcaacaatgttgatgaacttcagtaatgattttgatccttatggtgccttaagtacccccttgtatcaaacatctacttttaagcagccttcagcaaccgaaaatgggcaatatgattatacacggagtggaaatccaacaagggatgcattggaaaagcttcttgcagagcttgagaaagcagatcgagcattttgctttaccagtggaatggccgccttggcagctgtaactcgtctcgttaaagctggtgaggagattgttgccggggatgacatatatggtggttctgaccggctgctctcacaagttgttccaaaagccgggatcgtggtcaagcgagtggataccactaacttagatgaggttgcttctgtgattaaaccatggacaaagcttatttggctggaaagcccaaccaaccctcgtcaacaaatttgtgatattcgtaaaatagccaagatcgctcatgcacatggggctcttgtgctggtagataacagcattatgtccccagtactgtcccatcctttggagctcggagcagatattgtgatgcattcagctactaagttcatatccggtcatagtgatctcatggctggtgtacttgccgtcagaggagaaagcttggcgaaagaggtgtacttcctacaaaatgctgaaggtgcagggttagcgccattcgattgttggctttgtttaagaggaatcaaaacaatggcacttcgtgttgaaaaacaacaggagaatgcacaaaaaattgctgaatttttatcttcccatccacgagtgaaaaaggtcaactatccaggtcttcttgaccatccagggaggtctttgcacttctctcaggctacgggtgcaggatcggtgctgagtttcctgacaggttctttggcactctctaagcatgttgctgaggctaccaagtatttcagcattaccgtcagttttggaagtgtcaagtcactcataagcttgccttgcttcatgtcccatgcgagcatacctgttgaagtacgagaggctagaggtcttactgaggacctggttcgaatttctgttgggattgaagatgtcaacgacttgatagatgatttagactatgcactcaagactgggcctgcctag

SEQ ID NO: 14087 - protein, 471 aa, Solanum tuberosum
MACSLSLKQPFSSLPTNTTTQGKLPVNFPVTFGCMNGKGTLIEQKFQLNCSRDKEMDLTASALIDSAAAECMDEMGTMELPPQVEAREAKEPSVSTMLMNFSNDFDPYGALSTPLYQTSTFKQPSATENGQYDYTRSGNPTRDALEKLLAELEKADRAFCFTSGMAALAAVTRLVKAGEEIVAGDDIYGGSDRLLSQVVPKAGIVVKRVDTTNLDEVASVIKPWTKLIWLESPTNPRQQICDIRKIAKIAHAHGALVLVDNSIMSPVLSHPLELGADIVMHSATKFISGHSDLMAGVLAVRGESLAKEVYFLQNAEGAGLAPFDCWLCLRGIKTMALRVEKQQENAQKIAEFLSSHPRVKKVNYPGLLDHPGRSLHFSQATGAGSVLSFLTGSLALSKHVAEATKYFSITVSFGSVKSLISLPCFMSHASIPVEVREARGLTEDLVRISVGIEDVNDLIDDLDYALKTGPA

SEQ ID NO: 14088 - DNA, 1272 bp, Cephalosporium acremonium
  CDS (1)..(1272)
  misc_feature (147)..(147): y is t or c
atgtctcctacagcggcacccgccattgacggcgccgtcgtcgagacgcctccgcgccctcctactcctgtccacaacttcggcaccctcgccgtccacgcgggctcgccgcacgatgccgccaccggtgccgttatcgagtccatytcgctgtctaccacctttgcccagaccgccgtcggcaaacccgtaggtgagtacgagtactcgcgctccgccaaccccaaccgcaccaacttcgagacggccgtcgcggccctcgaacacgcccgctacgccctcgccttctccagtggtagcgccaccaccgccaccatcctccagagccttgccgccggctcccacgttatctcagtctccgacgtttacggcggcacccaccgctacttcacccaggttgccaaggcccacggtgtcaaggtcacattcactccggaaattgaagtcgacgtcagtgagcacatcaccgaccaaacccgcctcatctggatcgagacccctagcaaccccaccctgcgtcttgtcgacatccgcgccgttgtctccgtcgcccacaagcatggtgtcctcgttgtcgtcgacaataccttcctctcaccttatgtgcagaacccgctcgacctcggcgccgacattgtcgtccacagcgtcaccaagtacattaacggccacagcgacgtcgtcatgggcgttgccgctttcaactccccggaattgaaggaccgcctcggcttcctccagaacgccattggcgccgtcccctccgccttcgacagctggctcgcccaccgcggcctcaagaccctccacctccgcgcccgcgaggcgtcgcgcaacgccgccgctgtcgccgctgccctcgaggcctcccctaatgtcatctccgtcaactaccctggccttgactcgcaccctcatcgccacatcgccctcaagcagcaccgcgacggcatgggcggcggcatgctctccttccgcattcgcggtggccacgacgccgccgagcgcttctgccagcagacccgaatcttcaccctagccgagtcccttggcggcgttgagtcgctcgtcgagttgcccagcagcatgacccatgccggtatcccccgcgaccagcgcgaggccgtcggcgtctttgacgacctggtccgcgtgagctgcggtgttgaggatgccgaggacctgaagaatgacgtgccgcgccgtggagaaggccgtggagttgtcaaagaatggtgtcaagggccaataacgccgacctacctcccctga

SEQ ID NO: 14089 - protein, 423 aa, Cephalosporium acremonium
MSPTAAPAIDGAVVETPPRPPTPVHNFGTLAVHAGSPHDAATGAVIESISLSTTFAQTAVGKPVGEYEYSRSANPNRTNFETAVAALEHARYALAFSSGSATTATILQSLAAGSHVISVSDVYGGTHRYFTQVAKAHGVKVTFTPEIEVDVSEHITDQTRLIWIETPSNPTLRLVDIRAVVSVAHKHGVLVVVDNTFLSPYVQNPLDLGADIVVHSVTKYINGHSDVVMGVAAFNSPELKDRLGFLQNAIGAVPSAFDSWLAHRGLKTLHLRAREASRNAAAVAAALEASPNVISVNYPGLDSHPHRHIALKQHRDGMGGGMLSFRIRGGHDAAERFCQQTRIFTLAESLGGVESLVELPSSMTHAGIPRDQREAVGVFDDLVRVSCGVEDAEDLKNDVPRRGEGRGVVKEWCQGPITPTYLP

SEQ ID NO: 14090 - DNA, 1752 bp, Solanum tuberosum
  CDS (1)..(1752)
atggccgtctctagttacgctagggcatttccgtcatttgaatgtcgttcggaacctgatttctccggcagccttccacatcctaaagccggcgttcggctctccggcaagtataactccaggagtaaccgatctcaggtttatgggctgtcttctctgattttcaggtttcctcctaatttcgtgaggcagctaagcattaaggctaggaggaattgcagcaatattggcgtggctcaagttgtggcggcttcctggtctaacaaccaagccggtcctgaattcactccggcggctaatgctgtcgattcatccgcttctgctgctgttacttcgattggtatcaccgcaggtgacgaggaggtggcggttgtggaaaatgcggattgtaatgatcaaaatgaacaaattacgggtacaggtgttaaatatgcttcatttttgaattcagatggaagcgttgctattcatgccggtgaaaggttgggacgcggtattgttactgatgccataactaccccagtggttaacacatctgcttacttcttcacaaaacttcctgaccttattgattttaaggagaaaaagacgtgcaaagttttgaatatggcccgctatgggaaccccactactgttgttttggaggagaaaattagtgcacttgagggtgctgaatcaaccttgatagtggcatctggaatgtgtgccagtactgtaatgttcctggccttggatgctgctggtgggcatattgttactaccacagactgctacaggaagacacgtgtttttattgagacaatactgcctaaaatgggaattacggccacagtcattgatccagcagatatgggagctttggagttaacattaaatcagaagaaagtggatcttttctttaccgagtctccaacaaatccattcctgagatgtgttgacattgagctggtttcaaagctttgccgtgaaaaaggagccttggtttgcatagatgggacgtttgcaactcctcttaaccagaaggcccttgctctaggggctgaccttgttgtgcactccgctacaaaattccttggtgggcacaatgatgttcttgcaggttgcattagtggtcctgaaaaattagtttcagtaatccgaaacttgcatcatatccttggtggtgctctcaatcctaatgctgcatatctagccatccgaggcaggggactcaaccatcttcgtgacagcaccaaaattcaactgcatttgaggatggccgaaattttagaggctcatcccaaggtgaaacacgtctattatccaggcttgccgagtcatccggaatatcatcttgcaaagaaacaaatgactggctttggtggtgtggtcagttttgaggttgatggagacctcctaactactgcaaaatttgtggatgctctgaggattcccaaaattgctccctcgtttgaaggttgtaaatcaattgtggaccaaccagcaataatgtcttattgggatcttagccaatctgatagagcaaagtatggaatcctggataacttggttcggtttagctttggagtggaagactttgaagatgtgaaagctgatgttcttcaggctttggattccattaggctgtttcacctgcaacaattttttttcacgtggttccatcccgatttggttgttcgtacctgtgttattaccgacttccatcacgtagccaattgtttgaatgtaatgaaaggatcatcaagtagatga

SEQ ID NO: 14091 - protein, 583 aa, Solanum tuberosum
MAVSSYARAFPSFECRSEPDFSGSLPHPKAGVRLSGKYNSRSNRSQVYGLSSLIFRFPPNFVRQLSIKARRNCSNIGVAQVVAASWSNNQAGPEFTPAANAVDSSASAAVTSIGITAGDEEVAVVENADCNDQNEQITGTGVKYASFLNSDGSVAIHAGERLGRGIVTDAITTPVVNTSAYFFTKLPDLIDFKEKKTCKVLNMARYGNPTTVVLEEKISALEGAESTLIVASGMCASTVMFLALDAAGGHIVTTTDCYRKTRVFIETILPKMGITATVIDPADMGALELTLNQKKVDLFFTESPTNPFLRCVDIELVSKLCREKGALVCIDGTFATPLNQKALALGADLVVHSATKFLGGHNDVLAGCISGPEKLVSVIRNLHHILGGALNPNAAYLAIRGRGLNHLRDSTKIQLHLRMAEILEAHPKVKHVYYPGLPSHPEYHLAKKQMTGFGGVVSFEVDGDLLTTAKFVDALRIPKIAPSFEGCKSIVDQPAIMSYWDLSQSDRAKYGILDNLVRFSFGVEDFEDVKADVLQALDSIRLFHLQQFFFTWFHPDLVVRTCVITDFHHVANCLNVMKGSSSR

SEQ ID NO: 14092 - DNA, 1323 bp, Candida albicans
  CDS (1)..(1323): transl_table=12
atgccttctcactttgatacacttcaattacatgctgggcaaccagttgaaaaaccacaccaaccaagagccccaccaatttatgcaaccacctcctatgttttcaatgactctaaacacggtgctcaattatttggtttagaaaccccaggatacatttactccagaattatgaatccaacaaacgatgtgtttgaacaaagaattgctgccttggaaggtggtattggtgcattggccacttcttctggtcaatcagctcaattcttggctattgctgggttggctcatgctggtgataacattatcagtacatcctacttgtatggtggtacttataatcaattcaaagttgctttcaaacgtttgggcattgaaaccaaattcgttaatggtgacgccgctgaagattttgctaaattgattgacgacaagacaaaagctatttatattgaaaccattggaaaccctaaatataatgttccagactttgaaaaaatcaccaaattggcccatgaacacggtattcctgttgttgtcgacaacacttttggtgctggtggatttttagttaacccaattgcccacggtgctgatattgttgttcattctgctactaaatggattggtggtcacggtactacaattgctggtgttattgttgattccggtaacttcccatggaccgagtacccagaaaaatacccacaattctctaaaccatcagaaggttaccacgggttggtcttgaatgatgctttaggtaaggccgcatacattggtcacttgagaattgaattgttgagagacttgggtccagctttgaatccatttggaagttttttgttgttgcaaggtttggaaactttgtctttgagagttgaaagacaatctgaaaatgctttgaaattggcccaatggttagaaaagaacccaaatgttgagtctgtgtcctatttgggattgccatctcacgaatcccacgaattgagtaaaaaatacttgaacaatgacgctaagtactttggtggtgctttagcatttactgtcaaggacatcaccaacacctccagcgacccattcaatgaagcctcaccaaagttggttgacaatttggagattgcttcaaacttggctaatgtgggtgactctaagactttggttattgctccatggtttactacacatcaacaattgtctgatgaagaaaagttggcttctggtgttaccaagggcttaatcagagtttctactggtactgaatatattgatgatattattaacgactttgaacaagcattcaagaaggtttataacaactaa

SEQ ID NO: 14093 - protein, 440 aa, Candida albicans
MPSHFDTLQLHAGQPVEKPHQPRAPPIYATTSYVFNDSKHGAQLFGLETPGYIYSRIMNPTNDVFEQRIAALEGGIGALATSSGQSAQFLAIAGLAHAGDNIISTSYLYGGTYNQFKVAFKRLGIETKFVNGDAAEDFAKLIDDKTKAIYIETIGNPKYNVPDFEKITKLAHEHGIPVVVDNTFGAGGFLVNPIAHGADIVVHSATKWIGGHGTTIAGVIVDSGNFPWTEYPEKYPQFSKPSEGYHGLVLNDALGKAAYIGHLRIELLRDLGPALNPFGSFLLLQGLETLSLRVERQSENALKLAQWLEKNPNVESVSYLGLPSHESHELSKKYLNNDAKYFGGALAFTVKDITNTSSDPFNEASPKLVDNLEIASNLANVGDSKTLVIAPWFTTHQQLSDEEKLASGVTKGLIRVSTGTEYIDDIINDFEQAFKKVYNN

SEQ ID NO: 14094 - DNA, 1323 bp, Candida albicans
  CDS (1)..(1323): transl_table=12
atgccttctcactttgatacacttcaattacatgctggtcaaccagttgaaaaaccacaccaaccaagagccccaccaatttatgcaaccacctcctatgttttcaatgactctaaacacggtgctcaattatttggtttagaaaccccaggatacatttactccagaattatgaatccaacaaacgatgtgtttgaacaaagaattgctgccttggaaggtggtattggtgcattggccacttcttctggtcaatcagctcaattcttggccattgctgggttggctcatgctggtgataacattatcagtacatcctacttgtatggtggtacttataatcaattcaaagttgctttcaaacgtttgggcattgaaaccaaattcgttaatggtgacgccgctgaagattttgctaaattgattgacgacaagacaaaagctatttatattgaaaccattggaaaccctaaatataatgttccggactttgaaaaaatcaccaaattggcccatgaacacggtattcctgttgttgtcgacaacacttttggtgctggtggatttttagttaacccaattgcccacggtgctgatattgttgttcattctgctactaaatggattggtggtcacggtactacaattgctggtgttattgttgattccggtaacttcccatggaccgagtacccagaaaaatacccacaattctctaaaccatcagaaggttaccacgggttgatcttgaatgatgctttaggtaaggccgcatacattggtcacttgagaattgaattgttgagagacttgggtccagctttgaatccatttggaagttttttgttgttgcaaggtttagaaactttgtctttgagagttgaaagacaatctgaaaatgctttgaaattggcccaatggttggaaaagaacccaaatgttgagtctgtgtcctatttgggattgccatctcacgaatcccacgaattgagtaaaaaatacttgaacaatgacgctaagtactttggtggtgctttagcatttactgtcaaggacatcaccaacacctccagcgacccattcaatgaagcctcaccaaagttggttgacaatttggagattgcttcaaacttggctaatgtgggtgactctaagactttggttattgctccatggtttactacacatcaacaattgtctgatgaagaaaagttggcttctggtgttaccaagggcttaatcagagtttctactggtactgaatatattgatgatattattaacgactttgaacaagcattcaagaaggtttataacaactaa

SEQ ID NO: 14095 - protein, 440 aa, Candida albicans
MPSHFDTLQLHAGQPVEKPHQPRAPPIYATTSYVFNDSKHGAQLFGLETPGYIYSRIMNPTNDVFEQRIAALEGGIGALATSSGQSAQFLAIAGLAHAGDNIISTSYLYGGTYNQFKVAFKRLGIETKFVNGDAAEDFAKLIDDKTKAIYIETIGNPKYNVPDFEKITKLAHEHGIPVVVDNTFGAGGFLVNPIAHGADIVVHSATKWIGGHGTTIAGVIVDSGNFPWTEYPEKYPQFSKPSEGYHGLILNDALGKAAYIGHLRIELLRDLGPALNPFGSFLLLQGLETLSLRVERQSENALKLAQWLEKNPNVESVSYLGLPSHESHELSKKYLNNDAKYFGGALAFTVKDITNTSSDPFNEASPKLVDNLEIASNLANVGDSKTLVIAPWFTTHQQLSDEEKLASGVTKGLIRVSTGTEYIDDIINDFEQAFKKVYNN

SEQ ID NO: 14096 - DNA, 1611 bp, Glycine max
  CDS (1)..(1611)
atggccgtttcgagctcgcacatgcgtttcacctttgagtgccgctccgatcccgatttctcgccccccccgccgtccttcgacaacctccgccgccgaaacttccgctcctccgcagattccggcgcggcgtttcacggcatctcctccctcatcctccgcttccctcccaacttccagcgccagctaagcaccaaggcgcgccgcaactgcagcaacatcggcgtcgcgcaaatcgtcgccgcttcgtggtcgaacaacagcgacaactctccggccgccggggctccggcgccgcccgcggccaccgccacggacgccgctacggtgcctctccccgtcgtcgtcgccgccaacgaggacgtcgttgtctccgccgcggcagacgagaacggggctgtacagttaaacagtagttcttattcttcatttttgaaatccgatgcaagcaaaacgattcatgccgctgaaagactgggtaggggtattgagactgatggaattaccacccctgtggttaacacttctgcctacttttttaagaaaaccgctgatctcattgatttcaaggagaatcgtcaagtgagttatgaatacgggcgctatggaaacccaacgacggtggttctggaggagaagataagtgcattggagggggccgaatcaactgtgataatggcgtctgggatgtgtgctagcgtagtcctgtttatggcactggttccagctggtggacatcttgtgaccactacggattgttataggaagactagaatattcattgagacttttcttcctaagatggggatcacgaccactgtaattgatccagcagatgttggagccttggaatctgcattggagcagcacaatgtgtctctattcttcactgagtctcctaccaatccattcctgagatgtgttgatattaagctggtttcagagctttgccacaagaaggggactttgctctgtattgatggtacatttgcaactccattgaaccagaaggcccttgcccttggcgctgatctgattctgcactccttaacaaaatacatgggtggacatcatgatgtccttggtggttgcataagtggttcaattaaggtggtttcgcaaattcggactttgcaccatgttttgggtggtacacttaacccgaatgctgcatacctattcatcagaggcatgaaaacgctgcatctccgtgtacagcagcagaattcaacaggaatgaggatggccaaacttttagaggcacatcccaaggtgaagcgggtctactatccaggcttgccgagtcaccctgaacatgagcttgccaagaggcagatgactggtttcggtggtgttgtcagttttgagattgatggagatctacataccacaataaaatttattgattcattgaaaatcccatatattgcggcctcgtttggtggctgtgagagcattgtggatcaacctgctattttgtcttactgggatcttcctcagtcagaaagggccaagtacaagatttatgacaacctggttcgcttcagctttggagttgaagattttgaggatttgaaggctgatgtcctgcaagctctggaagctatatag

SEQ ID NO: 14097 - protein, 536 aa, Glycine max
MAVSSSHMRFTFECRSDPDFSPPPPSFDNLRRRNFRSSADSGAAFHGISSLILRFPPNFQRQLSTKARRNCSNIGVAQIVAASWSNNSDNSPAAGAPAPPAATATDAATVPLPVVVAANEDVVVSAAADENGAVQLNSSSYSSFLKSDASKTIHAAERLGRGIETDGITTPVVNTSAYFFKKTADLIDFKENRQVSYEYGRYGNPTTVVLEEKISALEGAESTVIMASGMCASVVLFMALVPAGGHLVTTTDCYRKTRIFIETFLPKMGITTTVIDPADVGALESALEQHNVSLFFTESPTNPFLRCVDIKLVSELCHKKGTLLCIDGTFATPLNQKALALGADLILHSLTKYMGGHHDVLGGCISGSIKVVSQIRTLHHVLGGTLNPNAAYLFIRGMKTLHLRVQQQNSTGMRMAKLLEAHPKVKRVYYPGLPSHPEHELAKRQMTGFGGVVSFEIDGDLHTTIKFIDSLKIPYIAASFGGCESIVDQPAILSYWDLPQSERAKYKIYDNLVRFSFGVEDFEDLKADVLQALEAI

SEQ ID NO: 14098 - DNA, 1185 bp, Rhizobium etli
  CDS (1)..(1185): transl_table=11
atgacgaagacctggcgcccggcaacccaactcgtccatggcggcacctggcgttccgaatatggcgaaacgtcggaggcaatctatctcacccagggtttcgtctatgacacgtcggagccggccgaagcccgcttcaagggcgaaacggacggcttcatctacgcccgctacggcagccccaccaatgacatgttcgaaaagcgcatgtgtgcattggaaggcgccgaagatgcccgtgccaccgcctccggcatggcggccgtcgccgccgccgttctctgccaggtgaaggcaggcgaccatatcgtcgccgcccgcgccctgttcggctcctgccgttgggtcgtggaaacgctggcgccgaaatacggcgtcgagtgcacgctggtcgacggccgggatctcgccaactgggaaaaggcgatccgcccgaataccaaggtgttcttcctggaaagcccgaccaacccgacgctcgaagtagtcgatatatcaggcgtcgccaagctcgccaatcaggtcggcgccaagctgatcgtcgacaatgtttttgcgacgccgctcttccagaagcccttggagctcggcgctcatatcgtcgtctattccgcaaccaagcatattgacggccagggcgcctgcctcggcggcgtggtgctcgccgacaaggcatggatcgacgagaacctgcacgactatttccgtcataccggcccagccatgtcgccgttcaatgcctggacgcttctgaagggcatcgagacactgccgctgcgcgtgcgccagcagaccgagaatgcagcgaagatcgccgatttcctggcggagcaaggcaaagtcgccaaggtgatctatcccggccgcaaggaccatccgcaggccgaaatcatcgccaagcagatgacgggtggctcgacgctcgtctgcttcgagctgaagggcggcaaggaggcggccttcgcgctgcagaacgcgcttgagatcatcaagatttccaacaatctcggcgacacgaagagcctgatcacccatccggcaacgaccacgcacaagaacctgacggaagaggcgcgcgccgaactcggcatctcgccgggcacggtgcggctttcggccggcatcgaggacacggacgacctgatcgaggatttcgcgcggggccttaccaaagtttcggcctga

SEQ ID NO: 14099 - protein, 394 aa, Rhizobium etli
MTKTWRPATQLVHGGTWRSEYGETSEAIYLTQGFVYDTSEPAEARFKGETDGFIYARYGSPTNDMFEKRMCALEGAEDARATASGMAAVAAAVLCQVKAGDHIVAARALFGSCRWVVETLAPKYGVECTLVDGRDLANWEKAIRPNTKVFFLESPTNPTLEVVDISGVAKLANQVGAKLIVDNVFATPLFQKPLELGAHIVVYSATKHIDGQGACLGGVVLADKAWIDENLHDYFRHTGPAMSPFNAWTLLKGIETLPLRVRQQTENAAKIADFLAEQGKVAKVIYPGRKDHPQAEIIAKQMTGGSTLVCFELKGGKEAAFALQNALEIIKISNNLGDTKSLITHPATTTHKNLTEEARAELGISPGTVRLSAGIEDTDDLIEDFARGLTKVSA

SEQ ID NO: 14100 - DNA, 1338 bp, Nicotiana tabacum
  CDS (1)..(1338)
atggctaaggccgtcgatgccgccgccgccgccgccgccgctattgctcctgttgataccacggtagttaacgaggacgtggcgttggtggaaaatgagacttgtaatgatcaaaatgtacagtttgacagtttgccaagtatgaaatacgcttcgtttttgaattctgatgggagtgtcgctattcatgccggtgaaagattgggacgtggcatcgttacggatgcaattactaccccagtagttaacacatctgcttatttcttcaacaagacttctgagctcattgattttaaggagaaaagacgcgcaagttttgaatatgggcgctatgggaacccaactactgttgttttagaggagaagataagcgcactggagggtgctgaatcaaccttgttaatggcatctggaatgtgcgccagtactgtaatgctgttggctttggttcctgctggaggccatattgttacaaccacagactgctataggaagacccggatctttattgaaactatacttcctaaaatggggattacggccacggtcattgacccagccgatgttggagctctggagttggctctaaatcagaagaaagtgaatcttttctttaccgagtctccaacaaatccattcctcagatgtgtagacattgagctggtttcaaagctttgtcatgaaaaaggagccttggtttgcatagatgggacttttgcaactcctcttaatcaaaaggcccttgcccttggggctgacctcgttctgcactctgcaacaaaattccttggtggacataatgatgttctcgcaggttgcattagtggtcctttaaagttagtttcagaaatacgtaacctgcatcacatcctgggtggtgctctcaatccgaatgccgcatatctgattatccgaggcatgaagacgttgcatcttcgtgtacagcaacaaaactcaactgcattgaggatggccgagattttagaggctcatcccaaggtgagacatgtctattatccaggcctgcaaagtcatccagaacatcacattgcaaagaaacaaatgacaggttttggtggtgcggtcagttttgaggttgacggagacctgcttacaaccgcaaaatttgtggatgctctgaaaattccgtatattgctccatcatttggaggttgtgagagcattgtggaccaaccagcaataatgtcttactgggatcttagccagtcagatagagccaagtatggcatcatggacaatttggttaggttcagctttggtgtggaagattttgatgacttgaaagctgatattcttcaggctttggactcaatatag

SEQ ID NO: 14101 - protein, 445 aa, Nicotiana tabacum
MAKAVDAAAAAAAAIAPVDTTVVNEDVALVENETCNDQNVQFDSLPSMKYASFLNSDGSVAIHAGERLGRGIVTDAITTPVVNTSAYFFNKTSELIDFKEKRRASFEYGRYGNPTTVVLEEKISALEGAESTLLMASGMCASTVMLLALVPAGGHIVTTTDCYRKTRIFIETILPKMGITATVIDPADVGALELALNQKKVNLFFTESPTNPFLRCVDIELVSKLCHEKGALVCIDGTFATPLNQKALALGADLVLHSATKFLGGHNDVLAGCISGPLKLVSEIRNLHHILGGALNPNAAYLIIRGMKTLHLRVQQQNSTALRMAEILEAHPKVRHVYYPGLQSHPEHHIAKKQMTGFGGAVSFEVDGDLLTTAKFVDALKIPYIAPSFGGCESIVDQPAIMSYWDLSQSDRAKYGIMDNLVRFSFGVEDFDDLKADILQALDSI

SEQ ID NO: 14102 - DNA, 1179 bp, Streptomyces coelicolor
  CDS (1)..(1179): transl_table=11
atgagcgattccgctaccaccgacagcgccggtacgggcggggagagatccgcttccgctcccggtgacggcacgcgcgcggtgcgggccgggctgcccgaaccggtcaagcacgaacccaccctgccgggcccggtgttcgccgcccacttccacctgccgggggatccgaccgggccgtacacctacggccgcgacgagaacccgacctggacccgcctcgagagcgccatcggcgagctggaggcgcccggagaggccggcgtggagacactcgtcttcgcctcgggcatggccgcgatctcctcggtgctcttctcgcagctgcgcgccggcgacacggccgtcctgcccgacgacggctatcaggcgctgccactggtccgggctcagctggaggcgtacggcatcgaggtgcgcaccgcgccgaccggccgggacgcgcagctcgacgtcctggacggggcgaagctgctgtggatcgagacgccgtcgaacccggggctcgacgtgtgcgacgtacggcggctcgtcgaggcggcgcacgcgggcggtgccctggtggccgtcgacaacaccctcgccaccccgctcgggcagcgcccgctggagctcggcgcggacttctcggtggccagcggaaccaagcagctcaccggccacggagacgtcctgctgggctacgtggccggccgcgacgccggggcgatggccgccgttcggcgctggcgcaagatcgtcggtgcgattcccggccccatggaggcctggctcgcgcaccgctcgatcgccaccctccagctgcgcgtggaccggcaggactccaccgcgctcaaggtggccgaagccctccgcacccggcccgagatcaccggcctgcggtaccccgggctgccggacgacccgtcccacaaggtcgcctcgcagcagatgctgcgctacggctgtgtcgtctccttcacgctgccctcgcgcgcgcgtgccgatcgttttctcgacgcgctgcgcctcgtcgagggcgcgacgagcttcggcggggtgcggtccacggcggagcggcgcgggcgctggggcggcgacgcggtgccggagggcttcatccggctctccgtcggcgcggaggaccccgacgacctggtggccgatctgctgcgcgcgctggacgaaacgacggaatga

SEQ ID NO: 14103 - protein, 392 aa, Streptomyces coelicolor
MSDSATTDSAGTGGERSASAPGDGTRAVRAGLPEPVKHEPTLPGPVFAAHFHLPGDPTGPYTYGRDENPTWTRLESAIGELEAPGEAGVETLVFASGMAAISSVLFSQLRAGDTAVLPDDGYQALPLVRAQLEAYGIEVRTAPTGRDAQLDVLDGAKLLWIETPSNPGLDVCDVRRLVEAAHAGGALVAVDNTLATPLGQRPLELGADFSVASGTKQLTGHGDVLLGYVAGRDAGAMAAVRRWRKIVGAIPGPMEAWLAHRSIATLQLRVDRQDSTALKVAEALRTRPEITGLRYPGLPDDPSHKVASQQMLRYGCVVSFTLPSRARADRFLDALRLVEGATSFGGVRSTAERRGRWGGDAVPEGFIRLSVGAEDPDDLVADLLRALDETTE

SEQ ID NO: 14104 - DNA, 1314 bp, Emericella nidulans
  CDS (1)..(1314)
atgtccgacccttcaccgaaacgtttcgagaccctccagctccatgcgggccaggagcctgaccctgcaactaattcccgggctgtcccaatctatgcgacaacgtcctacaccttcaatgactccgcacacggcgccaggctttttggcctcaaagagtttggcaatatttacagccgaattatgaatcccacagtcgatgtcttcgaaaaacgtattgctgcactcgagggaggtgtcgctgcggtggctgcctcatctggccaggcagcccagttcatggccatctctgctctagcccatgctggtgacaatatcgtttccacaagtaatttgtatggtggtacatacaatcagtttaaggtccttttcccacgactgggaattaccacaaaattcgtgcagggagacaaagcagaggacattgccgccgctatcgatgaccgtaccaaggccgtctacgtcgagacaataggaaaccctcgctacaatgtgcccgactttgaggtcattgcaaaagtagcccatgagaagggaattccccttgtggttgacaacaccttcggtgccggaggctactttgttcgacccattgaacatggcgccgacattgtcgtgcacagtgcaactaaatggattggaggtcatggcacaaccatcggaggcgttgtcgtggacagcggcaaattcgactggggcaagaacgccgcgcggtttcctcagttcacgcagccttctgaaggttaccacgggttgaacttctgggagaccttcggccccattgccttcgcgattcgtgtccgggtcgaaatcctgcgcgacctcgggtccgcgctgaaccctttcgccgcgcagcagctcatcctgggtctggaaaccctaagcttgcgcgctgagcgtcatgcttccaacgctctggccctcgccaactggctaaagaagaatgatcacgtcagctgggtttcttacgtgggcctagaagagcactccagccacgaagttgcaaagaagtacctcaagcgtgggttcggcggtgtcctatcctttggtgtcaagggtgaggcagccgtcggtagccaggttgtcgacaactttaagctcatctccaatctagcaaatgttggagactccaagaccctcgcgattcacccctggagcaccactcacgagcagttgaccgaccaggagcgaatcgattctggtgttacggaagatgccatccgcatctctgtcggcactgagcacatcgacgacatcatcgccgactttgaacagtcatttgcagcgaccttcaaagttgtccggagtgcttag

SEQ ID NO: 14105 - protein, 437 aa, Emericella nidulans
MSDPSPKRFETLQLHAGQEPDPATNSRAVPIYATTSYTFNDSAHGARLFGLKEFGNIYSRIMNPTVDVFEKRIAALEGGVAAVAASSGQAAQFMAISALAHAGDNIVSTSNLYGGTYNQFKVLFPRLGITTKFVQGDKAEDIAAAIDDRTKAVYVETIGNPRYNVPDFEVIAKVAHEKGIPLVVDNTFGAGGYFVRPIEHGADIVVHSATKWIGGHGTTIGGVVVDSGKFDWGKNAARFPQFTQPSEGYHGLNFWETFGPIAFAIRVRVEILRDLGSALNPFAAQQLILGLETLSLRAERHASNALALANWLKKNDHVSWVSYVGLEEHSSHEVAKKYLKRGFGGVLSFGVKGEAAVGSQVVDNFKLISNLANVGDSKTLAIHPWSTTHEQLTDQERIDSGVTEDAIRISVGTEHIDDIIADFEQSFAATFKVVRSA

SEQ ID NO: 14106 - DNA, 1290 bp, Schizosaccharomyces pombe
  CDS (1)..(1290)
atgccagtcgagagtgaacatttcgaaactttacaattacatgctggccaagagcctgatgctgctaccagctctcgtgccgttcccatctacgctactacttcctatgttttccgtgattgcgaccatggcggccgcttgttcggattacaggaaccaggttacatctactcgcgtatgatgaatcccaccgccgacgtttttgagaaacgtattgccgccttggagcatggcgctgctgcaatcgctactagttccggtacttccgctctcttcatggctttgaccacgttggctaaggccggtgataacattgtctccacttcttacctttatggtggtacttacaacctcttcaaggttaccctgcctagattgggaattactaccaagtttgtcaatggtgatgatcctaatgatcttgcagctcagattgatgaaaacacaaaggctgtttacgttgagtccatcggcaatcccatgtacaacgttcccgattttgagcgtatcgctgaggttgctcatgccgctggtgtgcctttaatggtcgataacacttttggcggcggtggttatttggttcgtcccattgaccacggtgccgatatcgttacccactctgccactaagtggatcggtggtcatggcactactattggcggtgtgattgttgatagtggtaagtttgactggaagaagaacagcaagcgtttccctgaattcaacgagcctcatcccggttaccatggcatggtctttactgaaacttttggtaacttggcatatgcttttgcttgccgtactcaaactctccgtgatgttggtggcaatgccaatccattcggtgtctttttgcttcttcaaggtcttgaaacgctttctcttcgtatggagcgtcacgttcaaaatgcatttgctcttgcaaaatatttggaaaagcaccccaaggttaactgggtttcttaccctggtcttgaatctcacgtctctcacaaacttgccaagaagtacttgaaaaatggttacggcgccgttctcagctttggcgctaaaggtggccctgatcaaagtcgtaaggtagtcaatgccttaaagcttgctagtcagttggccaatgttggtgatgccaaaactttggttatcgctcctgcctataccactcatttacaattaactgatgaggagcaaatttctgccggtgtcactaaggatcttattcgtgtggccgtcggtattgagcacatcgatgatattatcgccgactttgctcaagctttggaagttgcctaa

SEQ ID NO: 14107 - protein, 429 aa, Schizosaccharomyces pombe
MPVESEHFETLQLHAGQEPDAATSSRAVPIYATTSYVFRDCDHGGRLFGLQEPGYIYSRMMNPTADVFEKRIAALEHGAAAIATSSGTSALFMALTTLAKAGDNIVSTSYLYGGTYNLFKVTLPRLGITTKFVNGDDPNDLAAQIDENTKAVYVESIGNPMYNVPDFERIAEVAHAAGVPLMVDNTFGGGGYLVRPIDHGADIVTHSATKWIGGHGTTIGGVIVDSGKFDWKKNSKRFPEFNEPHPGYHGMVFTETFGNLAYAFACRTQTLRDVGGNANPFGVFLLLQGLETLSLRMERHVQNAFALAKYLEKHPKVNWVSYPGLESHVSHKLAKKYLKNGYGAVLSFGAKGGPDQSRKVVNALKLASQLANVGDAKTLVIAPAYTTHLQLTDEEQISAGVTKDLIRVAVGIEHIDDIIADFAQALEVA

SEQ ID NO: 14108 - DNA, 1197 bp, Pseudomonas putida
  CDS (1)..(1197): transl_table=11
atgcacggctccaacaagctcccaggatttgccacccgcgccattcaccatggctacgacccccaggaccacggcggcgcactggtgccaccggtctaccagaccgcgacgttcaccttccccaccgtggaatacggcgctgcgtgctttgccggcgagcaggccgggcatttctacagccgcatctccaaccccaccctcaacctgctggaagcacgcatggcctcgctggaaggcggcgaggccgggctggcgctggcctcgggcatgggggcgatcacgtccacgctatggacactgctgcgccccggtgacgaggtgctgctgggcaacaccctgtacggctgcacctttgccttcctgcaccacggcatcggcgagttcggggtcaagctgcgccatgtggacatggccgacctgcaggcactggaggcggccatgacgccggccacccgggtgatctatttcgagtcgccggccaaccccaacatgcacatggccgatatcgccggcgtggcgaagattgcacgcaagcacggcgcgaccgtggtggtcgacaacacctactgcacgccgtacctgcaacggccactggagctgggcgccgacctggtggtgcattcggccaccaagtacctgagcggccatggcgacatcactgctggcattgtggtgggcagccaggcactggtggaccgtatacgtctgcagggcctcaaggacatgaccggtgcggtgctctcgccccatgacgccgcactgttgatgcgcggcatcaagaccctcaacctgcgcatggaccgccactgcgccaacgctcaggtgctggccgagttcctcgcccggcagccgcaggtggagctgatccattacccgggcctggcgagcttcccgcagtacaccctggcccgccagcagatgagccagccgggcggcatgatcgccttcgaactcaagggcggcatcggtgccgggcggcggttcatgaacgccctgcaactgttcagccgcgcggtgagcctgggcgatgccgagtcgctggcgcagcacccggcaagcatgactcattccagctataccccagaggagcgtgcgcattacggcatctccgaggggctggtgcggttgtcggtggggctggaagacatcgacgacctgctggccgatgtgcaacaggcactcaaggcgagtgcctga

SEQ ID NO: 14109 - protein, 398 aa, Pseudomonas putida
MHGSNKLPGFATRAIHHGYDPQDHGGALVPPVYQTATFTFPTVEYGAACFAGEQAGHFYSRISNPTLNLLEARMASLEGGEAGLALASGMGAITSTLWTLLRPGDEVLLGNTLYGCTFAFLHHGIGEFGVKLRHVDMADLQALEAAMTPATRVIYFESPANPNMHMADIAGVAKIARKHGATVVVDNTYCTPYLQRPLELGADLVVHSATKYLSGHGDITAGIVVGSQALVDRIRLQGLKDMTGAVLSPHDAALLMRGIKTLNLRMDRHCANAQVLAEFLARQPQVELIHYPGLASFPQYTLARQQMSQPGGMIAFELKGGIGAGRRFMNALQLFSRAVSLGDAESLAQHPASMTHSSYTPEERAHYGISEGLVRLSVGLEDIDDLLADVQQALKASA

SEQ ID NO: 14110 - DNA, 1335 bp, Kluyveromyces lactis
  CDS (1)..(1335)
atgccatctcacttcgatactttgcaattgcacgctggtcaagaaaagactgctgatgctcataacccaagagccgtcccaatttacgctaccacttcttacgtcttcaacgactctaagcatggtgctcaattgttcggtttagaaactccaggttacatttactctcgtattatgaaccctactctagacgtcttggaaaagagattggcagccttagaaggtggtattgctgctttggctacttcttctggccaagctgctcaaaccttggctgtcactggtttggcccacactggtgacaatattgtctctacctctttcttatacggtggtacttataaccaattcaaggttgccttcaagagattaggaattgaagctagatttgtcgatggtgacaagccagaagacttcgaaaagttgttcgatgaaaagactaaggctctctatctggaatctatcggtaatcctaagtacaatgtcccagacttcgaaaagattgttgctgttgctcataagcatggtatcccagttgttgttgacaacactttcggtgccggtggtttcttctgccaacctatcaaatacggtgctgatatcgttactcactctgctaccaagtggatcggtggtcatggtgtcaccgttggtggtgtcatcattgactctggtaagttcccatggaaggattacccggaaaagttccctcaattctctcagccatctgaaggttatcatggtttgatcttcaatgatgcctttggtccagctgctttcattggtcatgtaagaaccgaattgctaagagatttaggtccagtgttgagtccattcgctggtttcttgttgttacagggtcttgaaactttgtctctaagaggtgaaagacacggttccaacgctttgaagttggctcaatacttggaaagttctccatacgtttcatgggtctcttacccaggtttgccatctcactctcaccacgaaaacgctaagaaatacttggaaaatggtttcggtggtgttttatccttcggtgtcaaagatttgcctaacgcttccgaggaatctgatccattcaaggcttctggtgcccaagttgttgacaacttgaagctggcttctaacttggcaaacgttggtgactccaagaccttggtcattgctccatacttcactacacatcaacaattgaccgacgaagaaaagttagcttctggtgttaccaaggacttgatccgtgtttctgttggtactgaattcattgacgacattattgctgactttgaagcatctttcgctactgtcttcaatggccaaaaacctgaataa

SEQ ID NO: 14111 - protein, 444 aa, Kluyveromyces lactis
MPSHFDTLQLHAGQEKTADAHNPRAVPIYATTSYVFNDSKHGAQLFGLETPGYIYSRIMNPTLDVLEKRLAALEGGIAALATSSGQAAQTLAVTGLAHTGDNIVSTSFLYGGTYNQFKVAFKRLGIEARFVDGDKPEDFEKLFDEKTKALYLESIGNPKYNVPDFEKIVAVAHKHGIPVVVDNTFGAGGFFCQPIKYGADIVTHSATKWIGGHGVTVGGVIIDSGKFPWKDYPEKFPQFSQPSEGYHGLIFNDAFGPAAFIGHVRTELLRDLGPVLSPFAGFLLLQGLETLSLRGERHGSNALKLAQYLESSPYVSWVSYPGLPSHSHHENAKKYLENGFGGVLSFGVKDLPNASEESDPFKASGAQVVDNLKLASNLANVGDSKTLVIAPYFTTHQQLTDEEKLASGVTKDLIRVSVGTEFIDDIIADFEASFATVFNGQKPE

SEQ ID NO: 14112 - DNA, 1335 bp, Saccharomyces cerevisiae
  CDS (1)..(1335)
atgccatctcatttcgatactgttcaactacacgccggccaagagaaccctggtgacaatgctcacagatccagagctgtaccaatttacgccaccacttcttatgttttcgaaaactctaagcatggttcgcaattgtttggtctagaagttccaggttacgtctattcccgtttccaaaacccaaccagtaatgttttggaagaaagaattgctgctttagaaggtggtgctgctgctttggctgtttcctccggtcaagccgctcaaacccttgccatccaaggtttggcacacactggtgacaacatcgtttccacttcttacttatacggtggtacttataaccagttcaaaatctcgttcaaaagatttggtatcgaggctagatttgttgaaggtgacaatccagaagaattcgaaaaggtctttgatgaaagaaccaaggctgtttatttggaaaccattggtaatccaaagtacaatgttccggattttgaaaaaattgttgcaattgctcacaaacacggtattccagttgtcgttgacaacacatttggtgccggtggttacttctgtcagccaattaaatacggtgctgatattgtaacacattctgctaccaaatggattggtggtcatggtactactatcggtggtattattgttgactctggtaagttcccatggaaggactacccagaaaagttccctcaattctctcaacctgccgaaggatatcacggtactatctacaatgaagcctacggtaacttggcatacatcgttcatgttagaactgaactattaagagatttgggtccattgatgaacccatttgcctctttcttgctactacaaggtgttgaaacattatctttgagagctgaaagacacggtgaaaatgcattgaagttagccaaatggttagaacaatccccatacgtatcttgggtttcataccctggtttagcatctcattctcatcatgaaaatgctaagaagtatctatctaacggtttcggtggtgtcttatctttcggtgtaaaagacttaccaaatgccgacaaggaaactgacccattcaaactttctggtgctcaagttgttgacaatttaaagcttgcctctaacttggccaatgttggtgatgccaagaccttagtcattgctccatacttcactacccacaaacaattaaatgacaaagaaaagttggcatctggtgttaccaaggacttaattcgtgtctctgttggtatcgaatttattgatgacattattgcagacttccagcaatcttttgaaactgttttcgctggccaaaaaccatga

SEQ ID NO: 14113 - protein, 444 aa, Saccharomyces cerevisiae
MPSHFDTVQLHAGQENPGDNAHRSRAVPIYATTSYVFENSKHGSQLFGLEVPGYVYSRFQNPTSNVLEERIAALEGGAAALAVSSGQAAQTLAIQGLAHTGDNIVSTSYLYGGTYNQFKISFKRFGIEARFVEGDNPEEFEKVFDERTKAVYLETIGNPKYNVPDFEKIVAIAHKHGIPVVVDNTFGAGGYFCQPIKYGADIVTHSATKWIGGHGTTIGGIIVDSGKFPWKDYPEKFPQFSQPAEGYHGTIYNEAYGNLAYIVHVRTELLRDLGPLMNPFASFLLLQGVETLSLRAERHGENALKLAKWLEQSPYVSWVSYPGLASHSHHENAKKYLSNGFGGVLSFGVKDLPNADKETDPFKLSGAQVVDNLKLASNLANVGDAKTLVIAPYFTTHKQLNDKEKLASGVTKDLIRVSVGIEFIDDIIADFQQSFETVFAGQKP

SEQ ID NO: 14114 - DNA, 1161 bp, Escherichia coli
  CDS (1)..(1161): transl_table=11
atgacgcgtaaacaggccaccatcgcagtgcgtagcgggttaaatgacgacgaacagtatggttgcgttgtcccaccgatccatctttccagcacctataactttaccggatttaatgaaccgcgcgcgcatgattactcgcgtcgcggcaacccaacgcgcgatgtggttcagcgtgcgctggcagaactggaaggtggtgctggtgcagtacttactaataccggcatgtccgcgattcacctggtaacgaccgtctttttgaaacctggcgatctgctggttgcgccgcacgactgctacggcggtagctatcgcctgttcgacagtctggcgaaacgcggttgctatcgcgtgttgtttgttgatcaaggcgatgaacaggcattacgggcagcgctggcagaaaaacccaaactggtactggtagaaagcccaagtaatccattgttacgcgtcgtggatattgcgaaaatctgccatctggcaagggaagtcggggcggtgagcgtggtggataacaccttcttaagcccggcattacaaaatccgctggcattaggtgccgatctggtgttgcattcatgcacgaaatatctgaacggtcactcagacgtagtggccggcgtggtgattgctaaagacccggacgttgtcactgaactggcctggtgggcaaacaatattggcgtgacgggcggcgcgtttgacagctatctgctgctacgtgggttgcgaacgctggtgccgcgtatggagctggcgcagcgcaacgcgcaggcgattgtgaaatacctgcaaacccagccgttggtgaaaaaactgtatcacccgtcgttgccggaaaatcaggggcatgaaattgccgcgcgccagcaaaaaggctttggcgcaatgttgagttttgaactggatggcgatgagcagacgctgcgtcgtttcctgggcgggctgtcgttgtttacgctggcggaatcattagggggagtggaaagtttaatctctcacgccgcaaccatgacacatgcaggcatggcaccagaagcgcgtgctgccgccgggatctccgagacgctgctgcgtatctccaccggtattgaagatggcgaagatttaattgccgacctggaaaatggcttccgggctgcaaacaaggggtaa

SEQ ID NO: 14115 - protein, 386 aa, Escherichia coli
MTRKQATIAVRSGLNDDEQYGCVVPPIHLSSTYNFTGFNEPRAHDYSRRGNPTRDVVQRALAELEGGAGAVLTNTGMSAIHLVTTVFLKPGDLLVAPHDCYGGSYRLFDSLAKRGCYRVLFVDQGDEQALRAALAEKPKLVLVESPSNPLLRVVDIAKICHLAREVGAVSVVDNTFLSPALQNPLALGADLVLHSCTKYLNGHSDVVAGVVIAKDPDVVTELAWWANNIGVTGGAFDSYLLLRGLRTLVPRMELAQRNAQAIVKYLQTQPLVKKLYHPSLPENQGHEIAARQQKGFGAMLSFELDGDEQTLRRFLGGLSLFTLAESLGGVESLISHAATMTHAGMAPEARAAAGISETLLRISTGIEDGEDLIADLENGFRAANKG

SEQ ID NO: 14116 - DNA, 1143 bp, Helicobacter pylori J99
  CDS (1)..(1143): transl_table=11
atgcgcatgcaaaccaaattaatccatgggggcattaatgaggacgcgacaacgggggcggtgagcgtgcctatttatcaaacttccacctaccgccaagacgccataggtcgccacaaaggctatgaatactctcgctcaggcaaccccacacgctttgctttagaagaactcatcgccgatttagaagggggggttaaggggttcgctttcgcttctggtttagccggaatccacgccgttttttccctcttgcaatcaggcgatcatgtgttattgggcgatgatgtttatggggggaatttccgcttgtttaataaggtgcttgtcaaaaacgggctttcttgcaccattatagacactagcgatctatcccaaattaaaaaggctatcaagcccaacaccaaagccctttatttagaaacccctagtaaccccttgcttaaaatcacggatttagcgcaatgcgctagtgtcgctaaagaacataatttgctcactatcgtggataacacctttgccaccccctattgccaaaacccgcttcttttgggaacggacattgtggcgcataacggcacaaaatacttaggcgggcatagcgatgtggttgctgggcttgtaaccaccaataatgaagcgctagcccaagagttcgattttttccaaaacgctatcggtggggtgttaggccttcaagacagctggctgttgcaaagagggattaaaacgctgggattgcgcatggaggcccatcaaaaaaacgccctttgcgtggctgagtttttagaaaaacaccctaaagtggaaagggtttattacccaggcctacccacccaccctaaccacgaactggccaaagcccaaatgcgtggctttagcgggatgttttctttcaccctcaaaaatgacagcgaagcggttgcttttgtagaaagccttaaattattcattttaggcgagagtttgggcggagtggaaagcttggtagggattccagcgctaatgacccatgcgtgtatccctaaagcgcaacgagaagccgccggaatcagagatggtttggtgcgcttgtctgtggggattgagcatgaacaggatctgttagaagatttagatcaagcgttcgctaaaataagctaa

SEQ ID NO: 14117 - protein, 380 aa, Helicobacter pylori J99
MRMQTKLIHGGINEDATTGAVSVPIYQTSTYRQDAIGRHKGYEYSRSGNPTRFALEELIADLEGGVKGFAFASGLAGIHAVFSLLQSGDHVLLGDDVYGGNFRLFNKVLVKNGLSCTIIDTSDLSQIKKAIKPNTKALYLETPSNPLLKITDLAQCASVAKEHNLLTIVDNTFATPYCQNPLLLGTDIVAHNGTKYLGGHSDVVAGLVTTNNEALAQEFDFFQNAIGGVLGLQDSWLLQRGIKTLGLRMEAHQKNALCVAEFLEKHPKVERVYYPGLPTHPNHELAKAQMRGFSGMFSFTLKNDSEAVAFVESLKLFILGESLGGVESLVGIPALMTHACIPKAQREAAGIRDGLVRLSVGIEHEQDLLEDLDQAFAKIS

SEQ ID NO: 14118 - DNA, 1143 bp, Helicobacter pylori
  CDS (1)..(1143): transl_table=11
atgcgcatgcaaaccaaattaatccatgggggcattagtgaggacgcaacaacgggggcggtgagcgtgcctatttatcaaacttccacctaccgccaagacgccataggccgccataagggctatgaatactctcgctcaggcaaccccacgcgctttgctttagaagaactcatcgctgatttagaagggggggttaaggggtttgcttttgcctctggattagctggaatccacgccgttttttccctcttgcaatcaggcgatcatgtgttattgggcgatgatgtttatggggggactttccgcttgtttaatcaagtgcttgtcaaaaacgggctttcttgcaccattatagacactagcgatatatcccaaattaaaaaggctatcaagcccaacaccaaagccctttatttagaaacccctagtaaccccttgcttaaaatcacggatttagcgcaatgcgctagtgtcgctaaagatcatggtttgctcactatcgtggataacacctttgccaccccctattatcaaaacccgcttcttttgggagcggacattgtggcacatagcggcaccaaatacttaggcgggcatagcgatgtggtcgccgggcttgtaaccactaataatgaagcgctagcccaagagatcgcttttttccaaaacgctatcggtggggttttaggccctcaagacagctggctgttgcaaagagggattaaaacgctgggattgcgcatggaagcccatcaaaaaaacgctctttgtgtggctgagtttttagaaaaacaccctaaagtggaaagggtttattacccgggccttcccactcaccctaattacgaactagctaaaaaacagatgcgtggctttagcgggatgctctctttcactctcaaaaatgatagcgaggcggttgcttttgtagaaagccttaaactattcattttaggcgagagtttgggcggggtggaaagtttggtggggattccggcatttatgacccatgcgtgcatccctaaaacgcaacgagaagctgctgggattagagatggcctggtgcgcttgtctgtagggattgagcatgaacaggatttgttagaagatttagagcaagcgttcgctaaaataggctaa

SEQ ID NO: 14119 - protein, 380 aa, Helicobacter pylori
MRMQTKLIHGGISEDATTGAVSVPIYQTSTYRQDAIGRHKGYEYSRSGNPTRFALEELIADLEGGVKGFAFASGLAGIHAVFSLLQSGDHVLLGDDVYGGTFRLFNQVLVKNGLSCTIIDTSDISQIKKAIKPNTKALYLETPSNPLLKITDLAQCASVAKDHGLLTIVDNTFATPYYQNPLLLGADIVAHSGTKYLGGHSDVVAGLVTTNNEALAQEIAFFQNAIGGVLGPQDSWLLQRGIKTLGLRMEAHQKNALCVAEFLEKHPKVERVYYPGLPTHPNYELAKKQMRGFSGMLSFTLKNDSEAVAFVESLKLFILGESLGGVESLVGIPAFMTHACIPKTQREAAGIRDGLVRLSVGIEHEQDLLEDLEQAFAKIG

SEQ ID NO: 14120 - DNA, 1167 bp, Mycobacterium bovis
  CDS (1)..(1167): transl_table=11
atgagcgaagaccgcacgggacaccagggaatcagcggaccggccacccgcgccatccacgctggctaccgcccggatccggcgaccggggcggtgaacgtgccgatctacgccagcagcaccttcgcccaagacggcgtcggcggtctgcgtggcggtttcgaatacgcacgcaccggcaaccccacccgggccgcattggaggcctcgctggcggcagtcgaggagggtgctttcgcgcgggcattcagttccgggatggccgcgaccgactgcgccctgcgggcgatgttacggcccggagaccacgtcgtcattcccgatgacgcctacggcggcacattccggttgatagacaaggtgttcacccggtgggatgtccagtacacgccggtgcggcttgccgatctggatgcggtgggtgccgcgattactccgcgcacccggctgatttgggtggagacgcccaccaatccgctactgtcgatcgccgatatcacggccattgccgagctgggcacagacagatcggcaaaagtattggtggacaatacctttgcctcacccgcgttgcagcagccgttgcggctgggcgccgatgtggtgttgcactcgactaccaagtacatcggcggccattccgacgtggtgggaggtgcgctggtcaccaacgacgaagagctggacgaggagttcgctttcttgcagaacggcgccggcgcggtgcccggaccattcgacgcctacctgaccatgcgcggcctgaagaccttggtgctgcggatgcagcggcacagtgaaaatgcctgtgcggtagcggaattcctcgctgatcatccgtcggtgagttctgtgttgtatccgggtttgcccagtcatcccgggcatgagattgccgcgcgacagatgcgcggcttcggcggcatggtttcggtgcggatgcgggccggtcggcgtgcggcgcaggacctgtgtgccaagacccgcgtcttcatcctggccgagtcgctgggtggggtggagtcgctgatcgaacatcccagcgccatgacccatgcgtcgacggccggttcgcaattggaggtgcccgacgatctggtgcggctttcggtcggtatcgaagacattgccgacctgctcggcgatctcgaacaggccctgggttaa

SEQ ID NO: 14121 - protein, 388 aa, Mycobacterium bovis
MSEDRTGHQGISGPATRAIHAGYRPDPATGAVNVPIYASSTFAQDGVGGLRGGFEYARTGNPTRAALEASLAAVEEGAFARAFSSGMAATDCALRAMLRPGDHVVIPDDAYGGTFRLIDKVFTRWDVQYTPVRLADLDAVGAAITPRTRLIWVETPTNPLLSIADITAIAELGTDRSAKVLVDNTFASPALQQPLRLGADVVLHSTTKYIGGHSDVVGGALVTNDEELDEEFAFLQNGAGAVPGPFDAYLTMRGLKTLVLRMQRHSENACAVAEFLADHPSVSSVLYPGLPSHPGHEIAARQMRGFGGMVSVRMRAGRRAAQDLCAKTRVFILAESLGGVESLIEHPSAMTHASTAGSQLEVPDDLVRLSVGIEDIADLLGDLEQALG

SEQ ID NO: 14122 - DNA, 1167 bp, Mycobacterium leprae
  CDS (1)..(1167): transl_table=11
atgagcgaagattaccggggacaccacggcattaccggactagccaccaaagccatccatgctggctatcgtccggatccggcaacaggggcagtgaatgtcccgatttatgccagtagtacttttgcccaagatggcgtcggtgagttgcgtggcggattcgaatacgcgcgtaccggcaaccccatgcgcgccgctttagaggcatccttggccacggtcgaagagggcgtttttgcgcgagccttcagttccggaatggctgctagcgactgtgccttgcgggtcatgctgcggccgggggaccacgtgatcatcccggatgacgtctacggcggcaccttccggctgatagacaaggtctttactcaatggaacgttgactacacgccggtaccgctgtctgatttggacgcggtccgcgccgcgatcacatcacggacccggctgatatgggtggaaacaccgaccaatccgctgctgtccatcgcagatatcaccagcatcggcgaactaggcaaaaagcactcagtaaaggtgttggtggacaacacctttgcttcacccgcgctgcaacagccgctgatgctgggggcagacgtcgtgttgcactcgaccacaaagtacatcggcggccactctgatgtggtgggcggcgcgctagtcaccaacgacgaagagctggaccaggctttcggcttcttgcagaacggagccggtgcggtgccgagcccgttcgacgcgtacctaacgatgcgcggattgaagactttagtgctgcggatgcagcggcacaacgaaaatgccattactgtagcggaattcctggctgggcatccgtcggtgagcgccgtgctgtatccgggcttgcccagccatcccgggcatgaggtcgctgcacggcagatgcgcggcttcggcggcatggtttcgttgcggatgcgagccggccgactagccgcccaggatctgtgtgcccgcaccaaggtgtttaccttggctgaatccttgggtggagtggagtcgctgattgagcagcccagtgccatgacgcacgcgtcgacaaccgggtcgcaattggaagtacccgacgacctggtgcggctttcggtcggtattgaagacgtcggcgacctgctgtgcgacctcaagcaggcgttaaactaa

SEQ ID NO: 14123 - protein, 388 aa, Mycobacterium leprae
MSEDYRGHHGITGLATKAIHAGYRPDPATGAVNVPIYASSTFAQDGVGELRGGFEYARTGNPMRAALEASLATVEEGVFARAFSSGMAASDCALRVMLRPGDHVIIPDDVYGGTFRLIDKVFTQWNVDYTPVPLSDLDAVRAAITSRTRLIWVETPTNPLLSIADITSIGELGKKHSVKVLVDNTFASPALQQPLMLGADVVLHSTTKYIGGHSDVVGGALVTNDEELDQAFGFLQNGAGAVPSPFDAYLTMRGLKTLVLRMQRHNENAITVAEFLAGHPSVSAVLYPGLPSHPGHEVAARQMRGFGGMVSLRMRAGRLAAQDLCARTKVFTLAESLGGVESLIEQPSAMTHASTTGSQLEVPDDLVRLSVGIEDVGDLLCDLKQALN

SEQ ID NO: 14124 - DNA, 1395 bp, Arabidopsis thaliana
  CDS (1)..(1395)
atgacatcttctctgtcacttcactcctccttcgtaccttccttcgctgatctctccgaccgaggtttgatcagtaagaactctccgaccagtgtttccatttccaaggttccaacttgggagaagaagcagatctcaaatcggaactctttcaagctgaattgcgtgatggagaaaagtgtcgatggtcaaactcattctaccgttaacaataccactgatagcttaaatactatgaatatcaaagaagaagctagcgtctctacattattggtgaacttggataataaatttgatccctttgatgcaatgagcactccgctttaccaaactgctacttttaagcagccttctgctattgaaaatggaccttatgattatacaagaagtggcaatcctacacgggatgcattggaaagcctccttgcgaagcttgacaaggcagatagagcattttgctttactagcggaatggctgctcttagtgctgttacacatcttatcaaaaatggcgaagaaattgttgctggagatgatgtatatggtggctctgacagattactatcccaagttgttccaagatctggcgttgtggtaaaacgagtaaacacaactaagttagacgaggttgctgctgcaattggtccccaaacaaagcttgtgtggcttgagtctccaacaaacccaagacaacaaatttctgatatacgaaaaatatctgagatggctcatgctcaaggtgctcttgtgttggtggacaacagtattatgtcaccagtgctctctcggccattagaacttggagctgacatcgtgatgcactcggctactaagtttatagccggacacagtgacgtgatggcaggtgtgcttgctgtaaaaggcgaaaaattggcaaaggaggtgtatttcctccaaaactcagaaggttctggattagctcctttcgactgttggctttgccttcgaggaatcaagacaatggctttacggatagaaaagcaacaggaaaacgcacggaaaattgcaatgtacttgtcttctcatccaagagtaaagaaagtgtactatgctggtctaccagatcatcctggtcaccatctccacttctctcaggcgaagggtgcaggatcagtttttagctttataactggatcagttgcgctttcaaagcatctcgtagaaaccaccaaatacttcagcatagctgtcagttttgggagtgttaagtcactgataagcatgccatgcttcatgtcacatgcaagcatacctgcagaagttcgtgaggccagaggtttgacggaagatcttgtccgtatatctgcaggaattgaagatgttgatgatttgatatctgatcttgacattgccttcaaaaccttccctctctag

SEQ ID NO: 14125 - protein, 464 aa, Arabidopsis thaliana
MTSSLSLHSSFVPSFADLSDRGLISKNSPTSVSISKVPTWEKKQISNRNSFKLNCVMEKSVDGQTHSTVNNTTDSLNTMNIKEEASVSTLLVNLDNKFDPFDAMSTPLYQTATFKQPSAIENGPYDYTRSGNPTRDALESLLAKLDKADRAFCFTSGMAALSAVTHLIKNGEEIVAGDDVYGGSDRLLSQVVPRSGVVVKRVNTTKLDEVAAAIGPQTKLVWLESPTNPRQQISDIRKISEMAHAQGALVLVDNSIMSPVLSRPLELGADIVMHSATKFIAGHSDVMAGVLAVKGEKLAKEVYFLQNSEGSGLAPFDCWLCLRGIKTMALRIEKQQENARKIAMYLSSHPRVKKVYYAGLPDHPGHHLHFSQAKGAGSVFSFITGSVALSKHLVETTKYFSIAVSFGSVKSLISMPCFMSHASIPAEVREARGLTEDLVRISAGIEDVDDLISDLDIAFKTFPL

SEQ ID NO: 14126 - DNA, 1188 bp, Escherichia coli
  CDS (1)..(1188): transl_table=11
atggcggacaaaaagcttgatactcaactggtgaatgcaggacgcagcaaaaaatacactctcggcgcggtaaatagcgtgattcagcgcgcttcttcgctggtctttgacagtgtagaagccaaaaaacacgcgacacgtaatcgcgccaatggagagttgttctatggacggcgcggaacgttaacccatttctccttacaacaagcgatgtgtgaactggaaggtggcgcaggctgcgtgctatttccctgcggggcggcagcggttgctaattccattcttgcttttatcgaacagggcgatcatgtgttgatgaccaacaccgcctatgaaccgagtcaggatttctgtagcaaaatcctcagcaaactgggcgtaacgacatcatggtttgatccgctgattggtgccgatatcgttaagcatctgcagccaaacactaaaatcgtgtttctggaatcgccaggctccatcaccatggaagtccacgacgttccggcgattgttgccgccgtacgcagtgtggtgccggatgccatcattatgatcgacaacacctgggcagccggtgtgctgtttaaggcgctggattttggcatcgatgtttctattcaagccgccaccaaatatctggttgggcattcagatgcgatgattggcactgccgtgtgcaatgcccgttgctgggagcagctacgggaaaatgcctatctgatgggccagatggtcgatgccgataccgcctatataaccagccgtggcctgcgcacattaggtgtgcgtttgcgtcaacatcatgaaagcagtctgaaagtggctgaatggctggcagaacatccgcaagttgcgcgagttaaccaccctgctctgcctggcagtaaaggtcacgaattctggaaacgagactttacaggcagcagcgggctattttcctttgtgcttaagaaaaaactcaataatgaagagctggcgaactatctggataacttcagtttattcagcatggcctactcgtggggcgggtatgaatcgttgatcctggcaaatcaaccagaacatatcgccgccattcgcccacaaggcgagatcgattttagcgggaccttgattcgcctgcatattggtctggaagatgtcgacgatctgattgccgatctggacgccggttttgcgcgaattgtataa

SEQ ID NO: 14127 - protein, 395 aa, Escherichia coli
MADKKLDTQLVNAGRSKKYTLGAVNSVIQRASSLVFDSVEAKKHATRNRANGELFYGRRGTLTHFSLQQAMCELEGGAGCVLFPCGAAAVANSILAFIEQGDHVLMTNTAYEPSQDFCSKILSKLGVTTSWFDPLIGADIVKHLQPNTKIVFLESPGSITMEVHDVPAIVAAVRSVVPDAIIMIDNTWAAGVLFKALDFGIDVSIQAATKYLVGHSDAMIGTAVCNARCWEQLRENAYLMGQMVDADTAYITSRGLRTLGVRLRQHHESSLKVAEWLAEHPQVARVNHPALPGSKGHEFWKRDFTGSSGLFSFVLKKKLNNEELANYLDNFSLFSMAYSWGGYESLILANQPEHIAAIRPQGEIDFSGTLIRLHIGLEDVDDLIADLDAGFARIV

SEQ ID NO: 14128 - DNA, 1143 bp, Lactococcus lactis subsp
  CDS (1)..(1143): transl_table=11
atgacaagtataaaaacgaaagtaattcatggtggtatttcaacagacaagacaacaggagcagtatctgttccgatttatcaaacgtcaacttataaacaaaacggacttggacaacctaaagaatacgaatattcacgttctggaaatccaacgcgtcatgccttggaagaattaattgcagatttagaaggtggtgttcaaggatttgcatttagttcaggacttgctggaattcatgcggttctttcgctattttctgcaggagatcatatcattttagctgatgatgtttatggtggaactttccgtttgatggataaagtgctgacaaagacagggattatttatgatttagttgatttgagtaatcttgatgacttgaaagcggcttttaaagaagaaacgaaagctatttattttgaaactccttcaaatcctttattaaaagttttggacattaaggaaatttcagcaattgctaaagctcatgatgccttaacactggtggataatacctttgcgacaccgtatttacaacaaccaattgctttaggagctgatattgttttgcattccgcaacgaaatatttaggtggacattcagatgtagtggcaggactagttacaaccaattcaaaagaactcgccagcgaaattggctttttacaaaattcaattggggcggttcttggaccacaagacagctggttagtgcaaagaggtattaaaacacttgcgcttcggatggaggctcattcggcaaatgctcaaaaaattgctgagtttttagaaacttctaaagccgtctcaaaagtttattatccaggtcttaatagccatccggggcatgaaattgctaaaaaacaaatgtctgcctttggagggatgatttcatttgaattaacggatgaaaatgccgtcaaagattttgttgaaaacttgagctattttacgttggctgaatcactaggtggcgttgaatctttaattgaagtgccagcagtgatgactcatgcttctattccaaaagaacttcgtgaagaaattgggattaaggatggcctaattcgtctatcagtaggggttgaagcaattgaagatttactgacagatatcaaagaagcacttgaaaaaaaataa

SEQ ID NO: 14129 - protein, 380 aa, Lactococcus lactis subsp
MTSIKTKVIHGGISTDKTTGAVSVPIYQTSTYKQNGLGQPKEYEYSRSGNPTRHALEELIADLEGGVQGFAFSSGLAGIHAVLSLFSAGDHIILADDVYGGTFRLMDKVLTKTGIIYDLVDLSNLDDLKAAFKEETKAIYFETPSNPLLKVLDIKEISAIAKAHDALTLVDNTFATPYLQQPIALGADIVLHSATKYLGGHSDVVAGLVTTNSKELASEIGFLQNSIGAVLGPQDSWLVQRGIKTLALRMEAHSANAQKIAEFLETSKAVSKVYYPGLNSHPGHEIAKKQMSAFGGMISFELTDENAVKDFVENLSYFTLAESLGGVESLIEVPAVMTHASIPKELREEIGIKDGLIRLSVGVEAIEDLLTDIKEALEKK

SEQ ID NO: 14130 - DNA, 1143 bp, Lactococcus lactis subsp
  CDS (1)..(1143): transl_table=11
atgacaagtttaaaaacaaaagtaattcacggtggaatttcaacagatagaacaacaggagctgtttctgttccaatttatcaaacatcaacttataaacaaaatggacttggacaacctaaagaatatgaatattcacgttcaggtaatccgacacgacatgctttggaagaattaattgcagatttagagggtggggttcaaggttttgcttttagttcaggcttggctggaattcacgcggtactatctttattttctgcgggcgatcatatcatcttagctgatgatgtttatggcggaacttttcgattggtggacaaggtgctgacaaagacaggaataatctatgatttagtagatttgagcaatcttgaagatttaaaggcagcttttaaagcagaaaccaaagcagtctactttgaaactccctcaaatcccctgctaaaagtcttggatatcaaagaaatttcaagcattgctaaagctcataatgctctaacattagttgataatacctttgcgacgccttatttacaacaaccaatcgctctaggagcggatattgtcctgcattctgcaacgaaatatttaggaggacactcagatgtagtggctggtttggtaacgacaaattcaaatgaactcgctattgaaattggctttttacaaaattctattggagcggttcttggtccacaagatagctggttagtccaaagaggaatcaaaacacttgcaccccggatggaggcccattcagcaaatgctcaaaaaattgctgagtttttagaagcatcacaagctgtttcaaaagtctattatccaggtctcgtcaatcatgaaggacatgagattgctaaaaaacaaatgactgcttttggtggaatgatttcatttgaattgactgacgaaaatgcggttaaaaattttgttgaaaacttgcgctattttacactagccgaatcactcggcggagtcgaatctttgattgaagtgccagcagtaatgactcatgcctcaattcctaaagaacttcgggaagaaattgggataaaagatggattgattcgcttatcagtcggtgttgaagctcttgaagatttactgacggaccttaaagaagcactcgaaaaagaataa

SEQ ID NO: 14131 - protein, 380 aa, Lactococcus lactis subsp
MTSLKTKVIHGGISTDRTTGAVSVPIYQTSTYKQNGLGQPKEYEYSRSGNPTRHALEELIADLEGGVQGFAFSSGLAGIHAVLSLFSAGDHIILADDVYGGTFRLVDKVLTKTGIIYDLVDLSNLEDLKAAFKAETKAVYFETPSNPLLKVLDIKEISSIAKAHNALTLVDNTFATPYLQQPIALGADIVLHSATKYLGGHSDVVAGLVTTNSNELAIEIGFLQNSIGAVLGPQDSWLVQRGIKTLAPRMEAHSANAQKIAEFLEASQAVSKVYYPGLVNHEGHEIAKKQMTAFGGMISFELTDENAVKNFVENLRYFTLAESLGGVESLIEVPAVMTHASIPKELREEIGIKDGLIRLSVGVEALEDLLTDLKEALEKE

SEQ ID NO: 14132 - DNA, 1188 bp, Salmonella typhimurium
  CDS (1)..(1188): transl_table=11
atgacggataaacagttggataccaaactggtaaacgcaggacgcagcaaaaaatacacgcttggctcagtgaatagtgtgattcaacgcgcttcttcactggtgtttgacaccgtcgaggccaaaaaacacgctacccgcaatctcgccaacggcgaattattttacggacgccggggaacgctgacccacttttcgctccaggaagccatgtgtgaactggaaggcggcgccggatgcgcgctcttcccgtgcggcgcggcggcggtcgccaacaccattctggcattcgttgagcagggcgaccacatcctgatgaccaacacagcttatgaacccagccaggatttctgcagcaaaattctcggcaaactgggcgtgacgacaagctggttcgacccgctcatcggcgctgatatcacgcaacatattcagccgaacacgaaagtcgtatttctggaatcccccggttctattaccatggaagtacatgatattccgagcattgttagtgcggtcagacgcgtcgcgccagaagccgtcatcatgattgataatacctgggcggctggcgttctgttcaaagctctggaattcgatattgatatctctatccaggcgggcactaagtatctgattggtcattctgatgcgatggtcgggactgccgttgcaaatgcgcgctgctgggaacaattgcgggaaaacgcctatctgatggggcaaatgctcgacgccgacacggcttatatgaccagccgcggtctgcgcacactcggtgtccgactgcgccagcatcaagaaagcagcctcaaaatcgccgcatggctggcgaaccatcctcaggtcgcgcgcgttaatcatccggccctgccgggtagcaaaggtcatgcgttctggaaacgagactttacaggtagcagcggcctgttctcctttgtgctcaataaaaagctgaccgaggcagaattatcagcctatctggataacttttcgctgttcagtatggcctactcctggggaggctacgaatcgctgattattgctaatcagccggaacagatcgccgcgattcgtcccgcaggcggcgtagattttaccggtacgctggttcgggtgcatattggtttagagagtgttgatgatttgatcgctgatttagccgccggcttcgccagaattgtgtaa

SEQ ID NO: 14133 - protein, 395 aa, Salmonella typhimurium
MTDKQLDTKLVNAGRSKKYTLGSVNSVIQRASSLVFDTVEAKKHATRNLANGELFYGRRGTLTHFSLQEAMCELEGGAGCALFPCGAAAVANTILAFVEQGDHILMTNTAYEPSQDFCSKILGKLGVTTSWFDPLIGADITQHIQPNTKVVFLESPGSITMEVHDIPSIVSAVRRVAPEAVIMIDNTWAAGVLFKALEFDIDISIQAGTKYLIGHSDAMVGTAVANARCWEQLRENAYLMGQMLDADTAYMTSRGLRTLGVRLRQHQESSLKIAAWLANHPQVARVNHPALPGSKGHAFWKRDFTGSSGLFSFVLNKKLTEAELSAYLDNFSLFSMAYSWGGYESLIIANQPEQIAAIRPAGGVDFTGTLVRVHIGLESVDDLIADLAAGFARIV

SEQ ID NO: 14134 - DNA, 1212 bp, Pseudomonas aeruginosa
  CDS (1)..(1212): transl_table=11
atgactcaggactgggatgccgggcgtctcgacagcgacctggaaggcgcggccttcgacaccctggcggttcgcgccgggcaacggcggacgccggagggcgagcacggcgaggcgctgttcaccacttccagctacgtcttccgcaccgccgccgacgcggccgcgcggttcgccggcgaagtgccgggcaacgtctattcgcgctacaccaaccccacggtacgcaccttcgaggagcgcatcgccgccctcgaaggagccgagcaggcggtggccacggcgtcgggcatgtcggcgatcctcgccctggtgatgagcctgtgcagctccggcgaccacgtgctggtctcgcgcagcgtgttcggctcgaccatcagcctgttcgacaagtacttcaagcgcttcggtatccaggtcgactatccgccgttgagcgatctcgcggcctgggaggcggcgtgcaagccgaataccaagctgttcttcgtcgagtcgccatccaacccgctggccgagctggtggatatcgccgcgctggccgagatcgcccacgccaagggtgcgctgctggcggtggacaactgcttctgcacgccggccctgcaacagccgctgaagctcggtgcggacgtggtgatccactccgcgaccaagtacatcgacggccagggccggggcatgggcggggtggtcgccggtcgcggcgagcagatgaaggaagtggtcggcttcctccgcaccgccggaccgaccctcagcccgttcaacgcctggctgttcctcaagggcctggaaaccctgcgtatccgcatgcaggcgcacagcgccagtgccctggccctggccgaatggctggagcgccagccgggcatcgagcgggtctactacgcgggcctgccgagccatcctcagcatgagttggcccggcgccagcagagcggcttcggcgcggtcgtcagcttcgacgtgaagggcgggcgcgatgccgcctggcgcttcatcgacgctacccggatggtctcgatcaccaccaacctgggcgacaccaagaccaccatcgcccacccggcgaccacctcccacggtcgactgtcccccgaggaccgcgcgcgcgccgggatcggcgacagcctgatccgggtcgcggtcggcctggaagacctcgacgacctcaaggccgacatggctcgggggctggccgcgctgtga

SEQ ID NO: 14135 - protein, 403 aa, Pseudomonas aeruginosa
MTQDWDAGRLDSDLEGAAFDTLAVRAGQRRTPEGEHGEALFTTSSYVFRTAADAAARFAGEVPGNVYSRYTNPTVRTFEERIAALEGAEQAVATASGMSAILALVMSLCSSGDHVLVSRSVFGSTISLFDKYFKRFGIQVDYPPLSDLAAWEAACKPNTKLFFVESPSNPLAELVDIAALAEIAHAKGALLAVDNCFCTPALQQPLKLGADVVIHSATKYIDGQGRGMGGVVAGRGEQMKEVVGFLRTAGPTLSPFNAWLFLKGLETLRIRMQAHSASALALAEWLERQPGIERVYYAGLPSHPQHELARRQQSGFGAVVSFDVKGGRDAAWRFIDATRMVSITTNLGDTKTTIAHPATTSHGRLSPEDRARAGIGDSLIRVAVGLEDLDDLKADMARGLAAL

SEQ ID NO: 14136 - DNA, 1398 bp, Saccharomyces cerevisiae
  CDS (1)..(1398)
atgccgatcaagagattagatacagttgtggtaaataccggctctcaaaatgaccaacattcagcctccgtgccaccggtgtatttgtcgactaccttcaaagtggacttgaataatgaagatgcacagaactacgattattccagatcgggaaacccgaccagaagtgtccttcaacaccagattggtaagctttatcgtgtcccacaggaaaacgtattagctgtgagcagtggtatgacggcgctagacgtcatcctgcgtgggctcgtcttacttaacggcactgacaaccatacgccaacaataatagccggcgatgatctttatggaggcacccaaaggctgctgaattttttcaagcaacagagtcatgcagtctctgttcatgtggacacttccgattttgaaaagttcaaaaccgttttccagtctttagataaagttgattgtgttcttctagagtctccgaccaatccgctttgcaaggttgtagatatccctagaatattacgttttgtgaaatgcatatctcccgacactacagttgtcgttgataatactatgatgagtggactcaattgtaatcctcttcaactgaatccaggctgcgatgtcgtatacgaatctgctaccaagtacttgaatggtcatcacgatttgatggggggtgttattatcagcaaaacaccagaaatagcctcgaagctttactttgtcattaattctacaggagctggattatccccaatggattcttggctacttgtgaggggcctaaaaactctaggagttagattatatcaacagcagagaaatgctatgatattggctcattggctagaaaattcatgcggattcaaacctaccagaacaaacaaggctacgaaaactagatttgttggattacgctccaacccggatttcaagctgcataaatcgttcaataatggcccaggtgccgtgttatccttcgaaacggggtccttcgaacattcaaagagactggtcagttccaaaaaactgagtatatgggctgtgacggtatctttcgggtgtgtaaattcgcttctatctatgccttgcaaaatgtcccatgcttccattgatcccgaattaaggaaagagagagattttcctgaagatttggttcgtctttgctgcggtatcgaaaatatagtagatttgaagaaagatttattagcggcgatggttgacgctgatattatagaagtaagagaaaatggcaaatatcttttcaacaaattgaataagaacctagctgtgaacactaccatcgatgacctgcataagcctttaagtatttacgaagaattttacaatcaagatctcatcagaaaggactcagaattgaatattaagagttcgaaattgtaa

SEQ ID NO: 14137 - protein, 465 aa, Saccharomyces cerevisiae
MPIKRLDTVVVNTGSQNDQHSASVPPVYLSTTFKVDLNNEDAQNYDYSRSGNPTRSVLQHQIGKLYRVPQENVLAVSSGMTALDVILRGLVLLNGTDNHTPTIIAGDDLYGGTQRLLNFFKQQSHAVSVHVDTSDFEKFKTVFQSLDKVDCVLLESPTNPLCKVVDIPRILRFVKCISPDTTVVVDNTMMSGLNCNPLQLNPGCDVVYESATKYLNGHHDLMGGVIISKTPEIASKLYFVINSTGAGLSPMDSWLLVRGLKTLGVRLYQQQRNAMILAHWLENSCGFKPTRTNKATKTRFVGLRSNPDFKLHKSFNNGPGAVLSFETGSFEHSKRLVSSKKLSIWAVTVSFGCVNSLLSMPCKMSHASIDPELRKERDFPEDLVRLCCGIENIVDLKKDLLAAMVDADIIEVRENGKYLFNKLNKNLAVNTTIDDLHKPLSIYEEFYNQDLIRKDSELNIKSSKL

SEQ ID NO: 14138 - DNA, 1197 bp, Schizosaccharomyces pombe
  CDS (1)..(1197)
atgactcacactccttcgttcgatctctctgacatcaagtccacattaagtactaatgtactgcatgccgatgatgcttatgcattagaaaatgatgtggctcctcccatccatatttctactacttatacttatcccggtactcctgacactcttcagcctttcaccaaactagcggaggaagactttccatactatgcccgtatcagcggcaacaatgttgatcgagctgaagcttcgttgagcagtgttcttggtgcaccttctgttgtttactcatctggtttggctgctatttacggactgttgtcgtatttaaatcccaaacacatcgccgttcataaacccggtttcggtggttattcaggcacaatccaaattattgcacgcatcaatcgtctaaccggtttagaaacctcatttattgatggcaaatgcgatgccatcggtgaaggtgatgttatatggttggaaactcctttgaatcctttaggtattgcctttgacattcctttttacaaggaactggcaaaaaagaagggtgccatacttgttgtggattctacttttgcaccaccccctatccaggatgcacttgttttaggtgctgattatgtagttcactcggcgactaaatatctagccggccacagcgatgttttggctggagtcacagcctcgaaagatagatccaagatccttgatttgaaagcagatcgtgcttatcttggcacaattttacatcctcagcaagcattcttactcttgcgctctcttcgtacctttcctcttcgcatcgcaaaacacagtgaaaacggatttttggttgcccaacatttgaacaagttggctaccgatgagcaatttgctactagcctaggaattgatagtagcctgattttggaggtttaccataactccttgcagaccaaggaatttgtcgctaaaaatttgactggcggtcatgcatcttgcttttctgttctacttaaatctgacacagttgctaagcatttgtgctgcgagttgaaatatttccatcacgctacttcgttgggtagtgtggaaagtttgattgaatggcgaagaatgacggattccaagattgatcctagacttgttcgcttgtccattggtattgaagacgctgctgacttgattgccgatttgaatcgtgtctttgcatctttaagttaa

SEQ ID NO: 14139 - protein, 398 aa, Schizosaccharomyces pombe
MTHTPSFDLSDIKSTLSTNVLHADDAYALENDVAPPIHISTTYTYPGTPDTLQPFTKLAEEDFPYYARISGNNVDRAEASLSSVLGAPSVVYSSGLAAIYGLLSYLNPKHIAVHKPGFGGYSGTIQIIARINRLTGLETSFIDGKCDAIGEGDVIWLETPLNPLGIAFDIPFYKELAKKKGAILVVDSTFAPPPIQDALVLGADYVVHSATKYLAGHSDVLAGVTASKDRSKILDLKADRAYLGTILHPQQAFLLLRSLRTFPLRIAKHSENGFLVAQHLNKLATDEQFATSLGIDSSLILEVYHNSLQTKEFVAKNLTGGHASCFSVLLKSDTVAKHLCCELKYFHHATSLGSVESLIEWRRMTDSKIDPRLVRLSIGIEDAADLIADLNRVFASLS

SEQ ID NO: 14140 - DNA, 1137 bp, Saccharomyces cerevisiae
  CDS (1)..(1137)
atggtggacttgtcaacagctttgattcatggcgatgataaagataacagggttactgacgtggcgcccccaattaatgtctctacaaccttccgttacgacgatgacgacctaattccatggacagagcgtgaaaacttggactttatggagaagaagcccgtatattcacggctagcgcatccaaatagcaccagattagagagtatcttctcagagatcctcgatggttatgctgtcatttattcttcagggttagctgcgttctatgcggcaatggtacattacaaccctaagaagatctttatcggacagagctaccatggtgttcgagcaattgctaacatattgacccgtaattacggcattgagcaacaccccttggaagatattgaaaaatgtgcttctgaaggtgacattgtccatctggaatctcctgtaaacccatatggtacctcttctgatatcgagagtttggcccgcagagctcatgcaaaaggcgccctgcttatagtggattccacattcgcatctcctccattgcaatacgcatggaatttcggagccgatattgtcctatactctgctactaagtactttggtggtcattctgacttgttaagtggcgtccttgtagtcaaagaggaagcaacttcccgacaactaaaagacgacagaatctacttgggtacaaacgtggcaaatttggaaagtttcatgttgttgcgatccctgagaacctacgaaatgagaataaccaaacaatcagaaaatgctacgaaattagttagatttttgtcagatcaccaatctgaatttgacaaagtattgaagacgatttaccactcttctttacaaacagaagagttcgttaaaaagcaactggtaggaggatatggtcccgtttttgctatcactttgtacaccaaagagcagtgtaaacaattacccctcaagctgaaatatttccatcatgcgacctcactgggtggaattgaatcccttgtggaatggagagcaatgactgacccatatatcgaccaaactttaataagagtatctgtgggctgtgaatccgctaatgatttgattaaggatttggcttcggccttgaaagaattgcaggatgcagcctga

SEQ ID NO: 14141 - protein, 378 aa, Saccharomyces cerevisiae
MVDLSTALIHGDDKDNRVTDVAPPINVSTTFRYDDDDLIPWTERENLDFMEKKPVYSRLAHPNSTRLESIFSEILDGYAVIYSSGLAAFYAAMVHYNPKKIFIGQSYHGVRAIANILTRNYGIEQHPLEDIEKCASEGDIVHLESPVNPYGTSSDIESLARRAHAKGALLIVDSTFASPPLQYAWNFGADIVLYSATKYFGGHSDLLSGVLVVKEEATSRQLKDDRIYLGTNVANLESFMLLRSLRTYEMRITKQSENATKLVRFLSDHQSEFDKVLKTIYHSSLQTEEFVKKQLVGGYGPVFAITLYTKEQCKQLPLKLKYFHHATSLGGIESLVEWRAMTDPYIDQTLIRVSVGCESANDLIKDLASALKELQDAA

SEQ ID NO: 14142 - DNA, 1509 bp, Oryza sativa
  CDS (1)..(1509)
atggccaccgtctcctccctcccgtccccggcgttcctggccgccgacccggccgccgcgctcccctccgccaccatcctccgcttcccgccaaacttcgtccgccagctcagcaccaaggcccgccgcaactgcagcaacatcggcgtcgcgcagatcgccacggccgaggttggcgccatccccaacgccaagctcggccagccgtccgccgccgcattggccgagcaggccctgctcggttcagacgccagcctcgccgtccacgcgggtaatcacgatcaatcccctctcagatctatcgccttccccccgctgcttcggtttttttctgatccatttcgtgcttttgatatacctatcgaaggcgagaggctgggcagaaggatcgccacagacgcgatcaccacgccagtagtgaacacctcggcctactggttcaacaactcgcaggagctcattgacttcaaggaggggaggcatgctagcttcgagtatgggaggtatggtaacccgaccactgaggcattggagaagaagatgagtgcactggagaaagccgagtccactgtctttgtggcatccgggatgtatgcaagtgtggctatgctcagcgcgcttgttccagcaggtgggcacgttgtgaccaccactgattgttaccgcaagacgagaatttacatggagactgaactacctaagaggggaattacgatgaccgttattagacctgctgacatggatgctctccaaaatgcactggataataataatgtatccctattcttcaccgagactcctactaatccatttctgagatgcatcgacattgatcttgtctcaaaaatgtgccatagcaagggagcattgctttgtattgatagtacctttgcatccccaatcaatcagaaggcactaactctaggtgctgacttagttatccattcagcaacaaagtacattgctgggcacaatgatgttattggaggctgcatcagtggcagagatgagctagtttccaaagtccgcatctatcaccatgtagttggtggtgttctaaatccgaatgctgcctacttgattcttcgaggcatgaagacactgcatctccgtgtacaatgtcagaataatactgcaatgcggatggcccaatttttagaggaacatccaaagattgcacgtgtctactatcctggtctgccaagtcacccagaacatcacattgccaagagtcagatgaccggctttggtggtgtcattagttttgaggttgctggagactttgatgctactaggagatttattgattctgttaagataccctatcatgccccatcatttgggggctgtgagagcattattgatcagcctgccatcatgtcttactgggattcaaaggagcagagagaaatctatggaatcaaggacaacttgatcaggttcagcattggagtggaggattttgaggatttgaagaatgacgttgttcaggcgcttgacaagatctaa

SEQ ID NO: 14143 - protein, 502 aa, Oryza sativa
MATVSSLPSPAFLAADPAAALPSATILRFPPNFVRQLSTKARRNCSNIGVAQIATAEVGAIPNAKLGQPSAAALAEQALLGSDASLAVHAGNHDQSPLRSIAFPPLLRFFSDPFRAFDIPIEGERLGRRIATDAITTPVVNTSAYWFNNSQELIDFKEGRHASFEYGRYGNPTTEALEKKMSALEKAESTVFVASGMYASVAMLSALVPAGGHVVTTTDCYRKTRIYMETELPKRGITMTVIRPADMDALQNALDNNNVSLFFTETPTNPFLRCIDIDLVSKMCHSKGALLCIDSTFASPINQKALTLGADLVIHSATKYIAGHNDVIGGCISGRDELVSKVRIYHHVVGGVLNPNAAYLILRGMKTLHLRVQCQNNTAMRMAQFLEEHPKIARVYYPGLPSHPEHHIAKSQMTGFGGVISFEVAGDFDATRRFIDSVKIPYHAPSFGGCESIIDQPAIMSYWDSKEQREIYGIKDNLIRFSIGVEDFEDLKNDVVQALDKI

SEQ ID NO: 14144 - DNA, 1428 bp, Oryza sativa
  CDS (1)..(1428)
atgagcgccgccgccgccgccgccgccgccgccgcaatccccacctctctcggccgcctcttccacctccgccccaccccgaacccctcccggaaccttagcggcagctcagcgcaacccctcctccgcctcagctaccacccacgcctcacgctctctcgccgcatggaggcgccggcggcgatcgccgactcccacggcggcggcgacctgagcgcgtccgcggtcggcgcggaggcgctgggcgccgtcgccgctccggatttcgatgtggagatgaaggagcctagcgtggcgacgatactgacgagcttcgagaactcgttcgatgggttcgggtctatgagcacgccgctgtaccagacggccacgtttaagcagccttcagcaaccgataatggaccttatgattacactagaagtggtaaccctacacgtgatgttctccaaagccttatggctaagcttgagaaggcggatcaggcattctgcttcaccagtgggatggcagcactagctgcagtaacacacctccttaagtctggacaagaaatagttgctggagaggacatatatggtggctcagaccgtctgctctcacaagttgccccgagacatgggattgtagtaaaacgaattgatacaaccaaaattagtgaggtaacttctgcaattgggcccttgactaaactagtatggcttgaaagtcccaccaatccccgtctacaaattactgatataaagaaaatagcagagatagctcattaccatggtgctcttgttttagtagacaacagcatcatgtctcctgtgctctcccgtcctctagaacttggagcagatattgttatgcactcagcaaccaaatttatagctggacatagcgatcttatggctggaattcttgcggtgaagggtgaaagcttggctaaagagattgcatttctacaaaatgctgaaggatcaggtttggcaccatttgattgctggctttgtttgagaggaatcaaaaccatggctttgcgggtggagaagcagcaggctaatgctcagaagattgctgaatttctagcttctcatccaagagtaaagaaagtgaactatgcaggacttcctgatcatcctggacgatctctacactattcccaggcaaagggagcgggttcagttctcagtttcctaactggttcattagctctctcaaaacatgttgttgagaccacaaagtacttcaatgtaacagttagctttggaagtgtgaaatcgctcattagcctgccatgcttcatgtcacacgccagcatcccttctgcggttcgcgaggagcgcggcctgacagacgatctagtcaggatatcggttggaattgaggatgccgacgacctcatagcggatcttgatcatgctctccggtctggtccagcttag

SEQ ID NO: 14145 - protein, 475 aa, Oryza sativa
MSAAAAAAAAAAIPTSLGRLFHLRPTPNPSRNLSGSSAQPLLRLSYHPRLTLSRRMEAPAAIADSHGGGDLSASAVGAEALGAVAAPDFDVEMKEPSVATILTSFENSFDGFGSMSTPLYQTATFKQPSATDNGPYDYTRSGNPTRDVLQSLMAKLEKADQAFCFTSGMAALAAVTHLLKSGQEIVAGEDIYGGSDRLLSQVAPRHGIVVKRIDTTKISEVTSAIGPLTKLVWLESPTNPRLQITDIKKIAEIAHYHGALVLVDNSIMSPVLSRPLELGADIVMHSATKFIAGHSDLMAGILAVKGESLAKEIAFLQNAEGSGLAPFDCWLCLRGIKTMALRVEKQQANAQKIAEFLASHPRVKKVNYAGLPDHPGRSLHYSQAKGAGSVLSFLTGSLALSKHVVETTKYFNVTVSFGSVKSLISLPCFMSHASIPSAVREERGLTDDLVRISVGIEDADDLIADLDHALRSGPA

SEQ ID NO: 14146 - DNA, 1170 bp, Oryza sativa
  CDS (1)..(1170)
atggaacttgatgtggagatgaaggagcctagcgtggcgacgatactgacgagcttcgagaactcgttcgatgggttcgggtctatgagcacgccgctgtaccagacggccacgtttaagcagccttcagcaaccgataatggaccttatgattacactagaagtggtaaccctacacgtgatgttctccaaagccttatggctaagcttgagaaggcggatcaggcattctgcttcaccagtgggatggcagcactagctgcagtaacacacctccttaagtctggacaagaaatagttgctggagaggacatatatggtggctcagaccgtctgctctcacaagttgccccgagacatgggattgtagtaaaacgaattgatacaaccaaaattagtgaggtaacttctgcaattgggcccttgactaaactagtatggcttgaaagtcccaccaatccccgtctacaaattactgatataaagaaaatagcagagatagctcattaccatggtgctcttgttttagtagacaacagcatcatgtctcctgtgctctcccgtcctctagaacttggagcagatattgttatgcactcagcaaccaaatttatagctggacatagcgatcttatggctggaattcttgcggtgaagggtgaaagcttggctaaagagattgcatttctacaaaatgctgaaggatcaggtttggcaccatttgattgctggctttgtttgagaggaatcaaaaccatggctttgcgggtggagaagcagcaggctaatgctcagaagattgctgaatttctagcttctcatccaagagtaaagaaagtgaactatgcaggacttcctgatcatcctggacgatctctacactattcccaggcaaagggagcgggttcagttctcagtttcctaactggttcattagctctctcaaaacatgttgttgagaccacaaagtacttcaatgtaacagttagctttggaagtgtgaaatcgctcattagcctgccatgcttcatgtcacacgccagcatcccttctgcggttcgcgaggagcgcggcctgacagacgatctagtcaggatatcggttggaattgaggatgccgacgacctcatagcggatcttgatcatgctctccggtctggtccagcttag

SEQ ID NO: 14147 - protein, 389 aa, Oryza sativa
MELDVEMKEPSVATILTSFENSFDGFGSMSTPLYQTATFKQPSATDNGPYDYTRSGNPTRDVLQSLMAKLEKADQAFCFTSGMAALAAVTHLLKSGQEIVAGEDIYGGSDRLLSQVAPRHGIVVKRIDTTKISEVTSAIGPLTKLVWLESPTNPRLQITDIKKIAEIAHYHGALVLVDNSIMSPVLSRPLELGADIVMHSATKFIAGHSDLMAGILAVKGESLAKEIAFLQNAEGSGLAPFDCWLCLRGIKTMALRVEKQQANAQKIAEFLASHPRVKKVNYAGLPDHPGRSLHYSQAKGAGSVLSFLTGSLALSKHVVETTKYFNVTVSFGSVKSLISLPCFMSHASIPSAVREERGLTDDLVRISVGIEDADDLIADLDHALRSGPA

SEQ ID NO: 14148 - DNA, 1224 bp, Oryza sativa
  CDS (1)..(1224)
atgacgctccgacgccgcagcggcgccggcggcacacctccgacgacacgctcgtcgtccacgccggggagcggcggcgcgcgcgcgatcggcggcgtcgcggcggaggtgacggactactcgatcgcgacgccgatcgtgaccggcacggcgcgctggttccgcgactcggccgacctcgtcgccttcagggaaggcggcgggcggcggcggcggcggcggcacagcttcgagtacgcccgttacggcaaccccaccgtggaggtcctggaggacaagatcagcgccatggagaaggccgaggcgacgatcgtcacctcctccggcatgaacgcgatcgttgcgacgctgctggccgtcgtcccgccgggcggccacgtcgtcgccaccaccgactgctacagcgaggcgcgtgccttcatacgtgacaggctctccaaaatgggcattaggacgacgttcgtcgatctggacgacatggaggcgttgcaatccgttcttgatcagggcaatgtaacgatgttctacgcggactcgctgacgaaccctcacctcaagtgcgtggacgtgcggcgcgtcgcggagctgtgccaccagcggggcgctctggtgtgcatcgacagcacgctggcgtcgcccatcaaccagaagccgctcaccctcggcgccgacgtcgtcctccactcccatcaccaagtgattggtgccggttgggaaaccccatgggtgacggattttacaaccggtatgggtgttggatttcttaactggcacccgaatgcagcgtacatgatcattcgcggtctaaagacgatggcgctgcgggtggaggcgcagaaccggacggcgctgcgggtggcacggctgctggagaggcaccccaaggtggagcgtgtcaactacccgtggctggagagcagcccgtggcacggcgtcgcgaggaagcagatgaccggcgccggcggcgtgatcagcttcgaggtggcgtcggacatgcgcggggcgatgaggttcgtcgacgcgctggagttgcccttcatcgcgacttcgctcggcgggtgcgagagcctagtgcagcagccggccatcatgtcctactggggcaagagtgaagcggagaagaccgagaatgggatcaaggataaccttgtgaggtttagttttgggatcgaaaagtttgaggacctcaaggacgacatactacaagccctagagaagatttaa

SEQ ID NO: 14149 - protein, 407 aa, Oryza sativa
MTLRRRSGAGGTPPTTRSSSTPGSGGARAIGGVAAEVTDYSIATPIVTGTARWFRDSADLVAFREGGGRRRRRRHSFEYARYGNPTVEVLEDKISAMEKAEATIVTSSGMNAIVATLLAVVPPGGHVVATTDCYSEARAFIRDRLSKMGIRTTFVDLDDMEALQSVLDQGNVTMFYADSLTNPHLKCVDVRRVAELCHQRGALVCIDSTLASPINQKPLTLGADVVLHSHHQVIGAGWETPWVTDFTTGMGVGFLNWHPNAAYMIIRGLKTMALRVEAQNRTALRVARLLERHPKVERVNYPWLESSPWHGVARKQMTGAGGVISFEVASDMRGAMRFVDALELPFIATSLGGCESLVQQPAIMSYWGKSEAEKTENGIKDNLVRFSFGIEKFEDLKDDILQALEKI

SEQ ID NO: 14150 - DNA, 1419 bp, Oryza sativa
  CDS (1)..(1419)
atggcgaagtcatcgtctctcgtgacgaaggttttggtgcagcggcggcggcgcgttcaccgttctcgccgttctcccaccaagccggagcgcgctgccgccgccgacacgttcggttccctcgcgggttgtccctcgtcgccggagtatccggtggtgccggacttggacgactgcgtcgtcgacaccgccgtggatgacgctcccgtggtggcggcggaggcggcaggccgacgcgcgtcggacgagacgctggcggtgcacgccggggagaagctcgggagcggcgccgctgagacggactcgatcgcgacgccgatcgtgagcggcacgacgcactggttcagggactcggcggacctcatcgccttccgggaaggctggcggcggagcttcgagtacgggcggtacggaaacccgacggtgaaggtgctggaggagaagatcagcgcgctggagagggcggaggcgacgctggtgacctcctccggcatgaacgccatcgtcgccacgctgctcgccctcgtcccccccggcggccacgtcgtcgtcaccgccgactgctacagcgaggcccgcgccttcatccacgacaagctatccaagatgggcatcacgtcgacgttcgtggatcttgacgacgacatggaggcgctggaatccgttcttgatgaggacgaggtgacgatgttctacgccgactcgatgacgaacccacacctgaaggtcgtcgacgtggcacgcgtggcggagctgtgccaccggaggggcgcgctggtgtgcatcgacagcacgctggcgtcgcccatcaaccagaagccgctcgccctcggagccgacgtggtcctccactccgccaccaagtacatcgccggccaccatgacgtcatcgccggctgtgtcagcggctcagaggccctcatctcgaggatacgcgcgtggcaccacgacctcggcggcgccatcagtccgaacgcggcgtacatgatcattcggggattgaagacgttggcgctgcgggtggaggcgcagaacaggacggcgctgcggatggcgcggctgctggagaagcaccccaagatcgagcgcgtctactaccctgggctggagagcagcccgtggcacggcgtcgcgacgaggcagatggccggcgccggcggcgtggtcagcttcgaggtggcgtcggacatgcgcggcgtgatgaggttcgtggacgcgctggagttgccgctcatcgcgacgtcgctcggcggctgcgagagccttgtccagcagccggccgtcatgtcctactggggtaagagtgaggaggagaaggcgaagaatgggatcaaggacaactttgtgaggttcagttttgggatcgagaagtttgaggatctcagggatgatatactccaagccctagagaagatttaa

SEQ ID NO: 14151 - protein, 472 aa, Oryza sativa
MAKSSSLVTKVLVQRRRRVHRSRRSPTKPERAAAADTFGSLAGCPSSPEYPVVPDLDDCVVDTAVDDAPVVAAEAAGRRASDETLAVHAGEKLGSGAAETDSIATPIVSGTTHWFRDSADLIAFREGWRRSFEYGRYGNPTVKVLEEKISALERAEATLVTSSGMNAIVATLLALVPPGGHVVVTADCYSEARAFIHDKLSKMGITSTFVDLDDDMEALESVLDEDEVTMFYADSMTNPHLKVVDVARVAELCHRRGALVCIDSTLASPINQKPLALGADVVLHSATKYIAGHHDVIAGCVSGSEALISRIRAWHHDLGGAISPNAAYMIIRGLKTLALRVEAQNRTALRMARLLEKHPKIERVYYPGLESSPWHGVATRQMAGAGGVVSFEVASDMRGVMRFVDALELPLIATSLGGCESLVQQPAVMSYWGKSEEEKAKNGIKDNFVRFSFGIEKFEDLRDDILQALEKI

SEQ ID NO: 14152 - DNA, 1461 bp, Oryza sativa
  CDS (1)..(1461)
atggcgaagtcatcgtccctcgtgacgaaggtttcggcgcagcggcggcggcgagtgcaccgtcctcgccgttctccgaccaagccggagcgctctgccgccgccgtggcgctgagccacgagaagattcttctcgccggcgttgatgcagccgccgacatgttcggttccctcgcgggttgtccctcgtcgccggagtatccggtggtgccggacatggacgaccgctacgtcgacggcgccgtggatgacgctccggcggcggcggcgggccgacgcgcgtcggacgagacgctggcggtgcacgccggggagaagctcgggagcggcgccgctgagacggactcgatcgcgacgccgatcgtgagcggcacgacgcactggttcagggactcggcggacctcatcgcgttccgggaaggccggcggcggagcttcgagtacgggcggtacggcaacccgacggtgaaggtgctggaggagaagatcagcgcgctggagagggcggaggcgacgctggtgacctcctccggtatgaacgccatcgtcgccacgctgctcgccctcgtccctcccggcggccacgtcgtcgccaccgccgactgctacagcgaggcccgcgcattcatccgcgacaagctctccaacatgggcatcacgtcgacgttcgtcgatcttgacgacgacatggaggcgctggaatgtgttcttgatgagagcgaggtgacgatgttctacgccgactcgatgacgaaccctcacctgaaggtcgtcgacgtgacacgcgtggcggagctgtgccaccggagaggcgcgctggtgtgcatcgacagcacgctggcatcgcccatcaaccagaagccgctcgccctcggcgccgacgtggtcctccactccgccaccaagtacatcgccggccaccacgacgtcatcgccggctgcgtcagcggctcggaggccctcatctcgcggatccgcgcgtggcaccacgacctcggcggcgccatcagtccgaacgcggcgtacatgatcattcggggattgaagacgattgcgctgcgggtggaggcgcagaacaggacggcgctgcggatggcgcggctgctggagaagcaccccaagatcgagcgcgtctactaccctgggctggagagcagcctgtggcacggcgtcgcgacgaggcagatggccggcgccggcggcgtggtcagcttcgatgtggcgtcggacttgcgcggcgtgatgaggttcgtggatgcgctggagttgcctctcatcgcaacgtcgctcggtggatgtgaaagccttgtgcagcaaccggccgtcatgtcctactggggtaagagtgaggaggagaaggcgaagaatgggatcaaggataattttgtgaggttcagttttgggattgagaagtttgaggatctcagggacgacatactccaggccctagagaagatttag

SEQ ID NO: 14153 - protein, 486 aa, Oryza sativa
MAKSSSLVTKVSAQRRRRVHRPRRSPTKPERSAAAVALSHEKILLAGVDAAADMFGSLAGCPSSPEYPVVPDMDDRYVDGAVDDAPAAAAGRRASDETLAVHAGEKLGSGAAETDSIATPIVSGTTHWFRDSADLIAFREGRRRSFEYGRYGNPTVKVLEEKISALERAEATLVTSSGMNAIVATLLALVPPGGHVVATADCYSEARAFIRDKLSNMGITSTFVDLDDDMEALECVLDESEVTMFYADSMTNPHLKVVDVTRVAELCHRRGALVCIDSTLASPINQKPLALGADVVLHSATKYIAGHHDVIAGCVSGSEALISRIRAWHHDLGGAISPNAAYMIIRGLKTIALRVEAQNRTALRMARLLEKHPKIERVYYPGLESSLWHGVATRQMAGAGGVVSFDVASDLRGVMRFVDALELPLIATSLGGCESLVQQPAVMSYWGKSEEEKAKNGIKDNFVRFSFGIEKFEDLRDDILQALEKI

SEQ ID NO: 14154 - DNA, 1395 bp, Oryza sativa
  CDS (1)..(1395)
atggcccacgtcatggccgcctccgagctcgtcaccgccaccatcaagcgccccttccagaacgacgacgacaacagcagcaacggcaacggcaacgccgacgggaagcccaaggcgcggcgccgggaggccgacccggcggcggcgctggccgcggcgcgccacgagttcggcgagcacggcggggtgaacatgtccatcgaggcgtcggcgacgttcacggtgatggagccggacaccatgcgccgcctcttctccggggagctcggcccggagcgcggcgacctgtacatctacagccgccacttcaacccgacggtgctggcgctggggcggcagatggcggcgctggagggcaccgaggccgcgtactgcacggcgtccgggatgtccgccatctcctccgtgctgatgcagctcgtcggcgcgggggggcacgtggtggcgtcgcggtgcctgtacggcggcacgcacgcgctgctgtcccggttcctgccgcgcgcgtccggggtgcgcgcaacgttcgtggacgctgacgacgaggcggcggtgcgcgccgcggtgcgcccgggggagacgcgggtggtgtacgtggagacgatgtcgaacccgacgctggccgtggccgacatcccgatgctggcccgcgtcgcgcacgacgccggcgccaagctggtggtggacaacacgttcacgcccatggtcgtctcgccggcccgcctcggcgccgacgtcgtcgtccacagcgtctccaagttcatcagcggcggcgccgacatcatcgcaggggcgatctgtgggccggcgagcctggtgaacgcgatgatggacctgcaggagggggccctgatgctgctgggcccgacgatgaacgccaaggtggccttcgagctctcggagcgcctcccgcacctcccgctccggatgcaggagcactcgcggcgcgccgccgagtacgcgtcccggatgcgccgcctcggcctccgcgtcgcctacccgggcctccccgaccacccgcaccacgcccgcctcctcgccatcgccaacccgggctacggcgccggcggcatgctctgcgtcgacatgggcaccgaggaccgcgccaaccgcctcatgcaccacctccagaacaccacccgcttcggcctcatggccgtcagcctcggctactacgagaccctcatgtcgtgctccggcagcagcaccagcagcgagatgccgcccgaggaccgcgctcgcgccggcatctcccccggcctcgtccgcatgtccgtcgggtacaacggcacgctcgagcagcggtgggcgcagttcgagcgcgcgctctcgctcatgcagcagcagcagcagcagcatcccgaccgcgacgccgccgccaagtactgcaaggtgtga

SEQ ID NO: 14155 - protein, 464 aa, Oryza sativa
MAHVMAASELVTATIKRPFQNDDDNSSNGNGNADGKPKARRREADPAAALAAARHEFGEHGGVNMSIEASATFTVMEPDTMRRLFSGELGPERGDLYIYSRHFNPTVLALGRQMAALEGTEAAYCTASGMSAISSVLMQLVGAGGHVVASRCLYGGTHALLSRFLPRASGVRATFVDADDEAAVRAAVRPGETRVVYVETMSNPTLAVADIPMLARVAHDAGAKLVVDNTFTPMVVSPARLGADVVVHSVSKFISGGADIIAGAICGPASLVNAMMDLQEGALMLLGPTMNAKVAFELSERLPHLPLRMQEHSRRAAEYASRMRRLGLRVAYPGLPDHPHHARLLAIANPGYGAGGMLCVDMGTEDRANRLMHHLQNTTRFGLMAVSLGYYETLMSCSGSSTSSEMPPEDRARAGISPGLVRMSVGYNGTLEQRWAQFERALSLMQQQQQQHPDRDAAAKYCKV

SEQ ID NO: 14156 - DNA, 1329 bp, Glycine max
  CDS (1)..(1329)
atgggggacacttacgttttggccacaccgaagcgcaaccgttccgatgacgtggacggcggcgaggcgaagaagctgctgttgcagcagggcgaggcggacccggcggcggcgctggcgagcgcgcggcacgagttcggggagcacggcggggtgaacatgtcgatcgaggcgtcggcgacgttcacggtgatggagccggagacgatgcggcgcatgttcgccggagaactcggccccgaccgcgacttcttcatctacagccgccacttcaacccgacggtgctgagcctcagtcgcctcatggccgccctcgaaggcaccgaggccgcctactgcaccgccagcggcatgtccgccatctccgccgtcctcctccagctctgcagccacggcgaacacgtggtcgcctccagaactctctacggtgggacccacgcgctcctctcacactttctcccgcgcacgtgcggaatatccactagcttcgtggaggtgacggatcttgacatggttgatgctgccatagtagaagggaaaacaaaagtgctttacttcgaatctgtttccaaccccacccttacggttgcgaacatacctgaactgtgccacatggcacaccggaagggagtgacggtggtggtggacaacacgttcgcgcccatggtgctttcgccagcgcgtcttggtgctgatgttgtcgttcacagtatctccaagttcatcagcggtggggccgatatcattgcaggagcggtgtgcggacccgcaagactggtgaacgcaatgatggatctgcaacaagggtcactaatgctgctgggtccaacaatgaatgcgaaagtggcattcgaactctcggagagaataccgcacctagggctaagaatgaaggagcatagcaaccgcgcactagagttcgcaacgaggctcaaaaggctaggaatgagggtaatatacccgggcctggaggagcacccacagcaccagcttctgaaatcaatgcacaacaaggactatggctacggcgggctcatgtgcgtggacatggaaacggaggagagggccaaccgcttcatgagccacttgcagaactacggccagttcggcttcatggctgtgagcttgggctactacgagaccctcatgtcctgctccggcagcagcaccagcagtgaactcagcactgaggagaaggagctcgccggaatctcgccggggctcgtgaggatgtcgattgggtacattggaaccttggagcagaagtggagccagctccaaaaggcgctcactagactaaacgactctggatacaacaagatcgcttga

SEQ ID NO: 14157 - protein, 442 aa, Glycine max
MGDTYVLATPKRNRSDDVDGGEAKKLLLQQGEADPAAALASARHEFGEHGGVNMSIEASATFTVMEPETMRRMFAGELGPDRDFFIYSRHFNPTVLSLSRLMAALEGTEAAYCTASGMSAISAVLLQLCSHGEHVVASRTLYGGTHALLSHFLPRTCGISTSFVEVTDLDMVDAAIVEGKTKVLYFESVSNPTLTVANIPELCHMAHRKGVTVVVDNTFAPMVLSPARLGADVVVHSISKFISGGADIIAGAVCGPARLVNAMMDLQQGSLMLLGPTMNAKVAFELSERIPHLGLRMKEHSNRALEFATRLKRLGMRVIYPGLEEHPQHQLLKSMHNKDYGYGGLMCVDMETEERANRFMSHLQNYGQFGFMAVSLGYYETLMSCSGSSTSSELSTEEKELAGISPGLVRMSIGYIGTLEQKWSQLQKALTRLNDSGYNKIA

SEQ ID NO: 14158 - DNA, 1326 bp, Brassica napus
  CDS (1)..(1326)
atggcccatatcctcaacacccaacatctcctcacaacctccgggaaaaaacgaaacgaccgcgatgacgaagacggagtctccaccgttgcaaagaaatcttcacttatggcatgtgaagctgaccccgctgtggcgctggcaagcatccgacacgaattcggggagcacggcggagtgaacatgtccatcgaggcctccgccacctttacggtcatggaaccggacaccatgaggcggatgttcgccggagaacttggaccggaaaatgacttcttcgtatatagccgacacttcaaccccaccgtgctcaacctcagccgtcagatggctgctctcgaaggcacccaagccgcctattgtacctcaagcggtatggcggcgatttcgtcggtgctgctgcaactatgcagcagtgggggacacgtggtggcttcaaagacgctctacggaggaacacacgctttgctctctcatttcttgccacggacctgcaacataaccacgtccttcgtggacataacggaccatggcgcggtggcagacgcgatcgtcgagggtagaacacaagtcctctattttgagtcgatggccaacccgacgttgactgtggccgacacacctgagttgagccgtatagcacacgagaagggcgtgatggtggtggtggacaatacctttacccccatggtactgtctccggcgaagtttggagcagatgtggtggttcacagtatctccaagtttattagtggtggggccgacatcatcgcaggggccgtgtgtgggagcgagaagctggtgaaagggatgatggatctgcgtggcgggtctctgatgctgctgggtcctaccatgaacgccaaggtggcctttgagctctctgagcgaatccctcacttgggcctccgcatgaaagagcacagccgcagggcccaagtgtatgcagagagaatgagggagctggggatgaaagttatatacccgggcctcacggaccacccgcagcacaaggtggctacagaaatggtgaaccgagagtacggatacggagggttgttgtcaattgacatggagacggaggaaagagccaacaagctcatgacgtatctccaaaacgccacccagtttggactcatggccgtcagtttgggttactacgaaactctcatgtcttgctccggtagcagcaccagcagcgagctcgacccctcccagaaagcagccgcaggtatctctcctggccttatacgaatgtctgtggggtatgcgggtacactggagcagaagtggacacaattcgagaaggctttcatcagaatgtaa

SEQ ID NO: 14159 - protein, 441 aa, Brassica napus
MAHILNTQHLLTTSGKKRNDRDDEDGVSTVAKKSSLMACEADPAVALASIRHEFGEHGGVNMSIEASATFTVMEPDTMRRMFAGELGPENDFFVYSRHFNPTVLNLSRQMAALEGTQAAYCTSSGMAAISSVLLQLCSSGGHVVASKTLYGGTHALLSHFLPRTCNITTSFVDITDHGAVADAIVEGRTQVLYFESMANPTLTVADTPELSRIAHEKGVMVVVDNTFTPMVLSPAKFGADVVVHSISKFISGGADIIAGAVCGSEKLVKGMMDLRGGSLMLLGPTMNAKVAFELSERIPHLGLRMKEHSRRAQVYAERMRELGMKVIYPGLTDHPQHKVATEMVNREYGYGGLLSIDMETEERANKLMTYLQNATQFGLMAVSLGYYETLMSCSGSSTSSELDPSQKAAAGISPGLIRMSVGYAGTLEQKWTQFEKAFIRM

SEQ ID NO: 14160 - DNA, 1611 bp, Glycine max
  CDS (1)..(1611)
atggccgtttcgagctcgcacatgcgtttcacctttgagtgccgctccgatcccgatttctcgccccccccgccgtccttcgacaacctccgccgccgaaacttccgctcctccgcaggatccggcgcggcgtttcacggcatctcctccctcatcctccgcttccctcccaacttccagcgccagctaagcaccaaggcgcgccgcaactgcagcaacatcggcgtcgcgcaaatcgtcgccgcttcgtggtcgaacaacagcgacaactctccggccgccggggctccggcgccgcccgcggccaccgccacggacgccgctacggtgcctctccccgtcgtcgtcgccgccaacgaggacgtcgttgtctccgccgcggcagacgagaacggggctgtacagttaaacagtagttcttattcttcatttttgaaatccgatgcaagcaaaacgattcatgccgctgaaagactgggtaggggtattgagactgatggaattaccacccctgtggttaacacttctgcctacttttttaagaaaaccgctgatctcattgatttcaaggagaatcgtcaagtgagttatgaatacgggcgctatggaaacccaacgacggtggttctggaggagaagataagtacattggagggggccgaatcaactgtgataatggcatctggaatgtgtgctagcgtagtcctatttatggcactggttccagctggtggacatcttgtgaccactacggattgttacaggaagactagaatattcattgagacttttcttccaaagatggggatcacgaccactgtaattgatccagcagatgttggagccttggaatctgcattggagcagcacaatgtgtctctattcttcactgagtctcctaccaatccattcctgagatgtgttgatattaagctggtttcagagctttgccacaagaaggggactttgctctgtattgatggtacatttgcaacaccattgaaccagaaggcccttgcccttggcgctgatctgattctgcactccttaacaaaatacatgggtggacatcatgatgcccttggtggttgcataagtggttcaactaaggtggtttcgcaaattcggactttgcaccatgttttgggtggtacacttaacccgaatgctgcatacctattcatcagaggcatgaaaacgctgcatctccgtgtacagcagcagaattcaacaggaatgaggatggccgaacttttagaggcacatcccaaggtgaagcgggtctactatccaggcttgccgagtcatcctgaacatgagcttgccaagaggcagatgactggtttcggtggtgttgtcagttttgagattgatggagatctacataccacaataaagtttattgattcactgaaaatcccttatattgcggcctcgtttggtggctgtgagagcattgtggatcaacctgctattttgtcttactgggatcttcctcagtcagaaagggccaagtataagatttatgacaacctggttcgcttcagctttggagttgaagattttgaggatttgaaggctgatgtcctgcaagctctggaagctatatag

SEQ ID NO: 14161 - protein, 536 aa, Glycine max
MAVSSSHMRFTFECRSDPDFSPPPPSFDNLRRRNFRSSAGSGAAFHGISSLILRFPPNFQRQLSTKARRNCSNIGVAQIVAASWSNNSDNSPAAGAPAPPAATATDAATVPLPVVVAANEDVVVSAAADENGAVQLNSSSYSSFLKSDASKTIHAAERLGRGIETDGITTPVVNTSAYFFKKTADLIDFKENRQVSYEYGRYGNPTTVVLEEKISTLEGAESTVIMASGMCASVVLFMALVPAGGHLVTTTDCYRKTRIFIETFLPKMGITTTVIDPADVGALESALEQHNVSLFFTESPTNPFLRCVDIKLVSELCHKKGTLLCIDGTFATPLNQKALALGADLILHSLTKYMGGHHDALGGCISGSTKVVSQIRTLHHVLGGTLNPNAAYLFIRGMKTLHLRVQQQNSTGMRMAELLEAHPKVKRVYYPGLPSHPEHELAKRQMTGFGGVVSFEIDGDLHTTIKFIDSLKIPYIAASFGGCESIVDQPAILSYWDLPQSERAKYKIYDNLVRFSFGVEDFEDLKADVLQALEAI

SEQ ID NO: 14162 - DNA, 1611 bp, Glycine max
  CDS (1)..(1611)
atggccgtttcgagctcgcacatgcgtttcacctttgagtgccgctccgatcccgatttctcgccccccccgccgtccttcgacaacctccgccgccgaaacttccgctcctccgcaggatccggcgcggcgtttcacggcatctcctccctcatcctccgcttccctcccaacttccagcgccagctaagcaccaaggcgcgccgcaactgcagcaacatcggcgtcgcgcaaatcgtcgccgcttcgtggtcgaacaacagcgacaactctccggccgccggggctccggcgccgcccgcggccaccgccacggacgccgctacggtgcctctccccgtcgtcgtcgccgccaacgaggacgtcgttgtctccgccgcggcagacgagaacggggctgtacagttaaacagtagttcttattcttcatttttgaaatccgatgcaagcaaaacgattcatgccgctgaaagactgggtaggggtattgagactgatggaattaccacccctgtgctgaacacttctgcctacttttttaagaaaaccgctgatctcattgatttcaaggagaatcgtcaagtgagttatgaatacgggcgctatggaaacccaacgactgtggttctggaggagaagataagtatattggagggggctgaatcaactgtgataatggcatctggaatgtgtgctagcgtagtcctatttatggcactggttccagctggtggacatcttgtgaccactacggattgttacaggaagactagaatattcattgagacttttcttccaaagatggggatcacgaccactgtaattgatccagcagatgttggagccttggaatctgcattggagcagcacaatgtgtctctattcttcactgagtctcctaccaatccattcctgagatgtgttgatattaagctggtttcagagctttgccacaagaaggggactttgctctgtattgatggtacatttgcaactccattgaaccagaaggcccttgcccttggcgctgatctgattctgcactccttaacaaaatacatgggtggacatcatgatgtccttggtggttgcataagtggttcaattaaggtggtttcgcaaattcggactttgcaccatgttttgggtggtacacttaacccgaatgctgcatacctattcatcagaggcatgaaaacgctgcatctccgtgtacagcagcagaattcaacaggaatgaggatggccgaacttttagaggcacatcccaaggtgaagcgggtctactatccaggcttgccgagtcatcctgaacatgagcttgccaagaggcagatgactggtttcggtggtgttgtcagttttgagattgatggagatctacataccacaataaaatttattgattcattgaaaatcccatatattgcggcctcgtttggtggctgtgagagcattgtggatcaacctgctattttgtcttactgggatcttcctcagtcagaaagggccaagtacaagatttatgacaacctggttcgcttcagctttggagttgaagattttgaggatttgaaggctgatgtcctgcaagctctggaagctatatag

SEQ ID NO: 14163 - protein, 536 aa, Glycine max
MAVSSSHMRFTFECRSDPDFSPPPPSFDNLRRRNFRSSAGSGAAFHGISSLILRFPPNFQRQLSTKARRNCSNIGVAQIVAASWSNNSDNSPAAGAPAPPAATATDAATVPLPVVVAANEDVVVSAAADENGAVQLNSSSYSSFLKSDASKTIHAAERLGRGIETDGITTPVLNTSAYFFKKTADLIDFKENRQVSYEYGRYGNPTTVVLEEKISILEGAESTVIMASGMCASVVLFMALVPAGGHLVTTTDCYRKTRIFIETFLPKMGITTTVIDPADVGALESALEQHNVSLFFTESPTNPFLRCVDIKLVSELCHKKGTLLCIDGTFATPLNQKALALGADLILHSLTKYMGGHHDVLGGCISGSIKVVSQIRTLHHVLGGTLNPNAAYLFIRGMKTLHLRVQQQNSTGMRMAELLEAHPKVKRVYYPGLPSHPEHELAKRQMTGFGGVVSFEIDGDLHTTIKFIDSLKIPYIAASFGGCESIVDQPAILSYWDLPQSERAKYKIYDNLVRFSFGVEDFEDLKADVLQALEAI

SEQ ID NO: 14164 - DNA, 1413 bp, Zea mays
  CDS (1)..(1413)
atggccgtcgccgtccccaacgctcccggccgcctcttccttctccaatccaccccgttcccgaaccctagcagctcggcatccgccgctcgagcccaatccttccgcgtaccacccctccgcctctcgctattccgacgcatggctgggcgctcgctgacggtgatcgcaggcgcctccggcggctccgaacgagatctcagcgcctccgcagtctccgtggaggccctggactccgtcgcctccgattctgacttagagacgaaggagcccagtgtgtcgacgatgctgacgagcttcgagaactcgttcgacaagtatggggctctgagcacaccgctgtaccagaccgccacctttaagcagccttcagctacagattatggaacttatgattacactagaagtggtaaccctactcgtgatgttctccagagcctcatggctaagcttgagaaagcagatcaagcattctgcttcaccagcgggatggcggcattagctgcagtaacacacctccttcaggctggacaagaaatagttgctggtgaggacatatatggtggttctgatcgtctactctcgcaagttgtgccaagaaatggaatagttgtaaaacgagtagatacaacgaaaattagtgatgtggtgtctgcaattggaccctccactagactggtttggctcgaaagtcccacgaaccctcgtcagcaaattactgacattaagacaatctcagagatagcacattctcatggtgctcttgttttggttgacaacagcatcatgtctccagtgctctcccgtcctatagaactgggagctgatatcgtgatgcactcggctaccaaatttatagcgggacatagtgatcttatggctggaattcttgcagtgaagggtgagagtttggctaaagaggtagggtttctgcaaaatgctgaagggtcgggtctggcaccttttgactgctggctttgcttgaggggaatcaaaaccatggctctgcgggtggagaaacaacaggctaatgcccagaagattgctgaattcctggcgtctcacccgagggtcaagcaagtaaactacgctgggcttcctgaccatcctgggcgagctttacactattcccaggcaaagggagcgggctctgttctcagttttctcaccggctcactggccctctcaaagcacgtcgtggagaccaccaagtacttcagcgtaacagtcagcttcgggagcgtgaagtccctcatcagcctgccgtgcttcatgtcccacgcatcaatccctgcctcggtccgcgaggagcgtggcctaaccgacgacctcgtccggatatcggtcggcatcgaggatgtcgaggacctcatcgccgatctggaccgcgcgctcagaactggcccggtgtag

SEQ ID NO: 14165 - protein, 470 aa, Zea mays
MAVAVPNAPGRLFLLQSTPFPNPSSSASAARAQSFRVPPLRLSLFRRMAGRSLTVIAGASGGSERDLSASAVSVEALDSVASDSDLETKEPSVSTMLTSFENSFDKYGALSTPLYQTATFKQPSATDYGTYDYTRSGNPTRDVLQSLMAKLEKADQAFCFTSGMAALAAVTHLLQAGQEIVAGEDIYGGSDRLLSQVVPRNGIVVKRVDTTKISDVVSAIGPSTRLVWLESPTNPRQQITDIKTISEIAHSHGALVLVDNSIMSPVLSRPIELGADIVMHSATKFIAGHSDLMAGILAVKGESLAKEVGFLQNAEGSGLAPFDCWLCLRGIKTMALRVEKQQANAQKIAEFLASHPRVKQVNYAGLPDHPGRALHYSQAKGAGSVLSFLTGSLALSKHVVETTKYFSVTVSFGSVKSLISLPCFMSHASIPASVREERGLTDDLVRISVGIEDVEDLIADLDRALRTGPV

SEQ ID NO: 14166 - DNA, 27 bp, Artificial sequence
  primer
atgactctacaagaatctgataaattt

SEQ ID NO: 14167 - DNA, 24 bp, Artificial sequence
  primer
ttagttggtggcttgtttcaaggc

SEQ ID NO: 14168 - protein, 527 aa, Artificial sequence
  consensus sequence
  Variant (2)..(12): Xaa in position 2 to 12 is any amino acid
  Variant (13)..(53): Xaa in position 13 to 53 is any or no amino acid
  Variant (55)..(55): Xaa in position 55 is any amino acid
  Variant (57)..(58): Xaa in position 57 to 58 is any amino acid
  Variant (59)..(60): Xaa in position 59 to 60 is any or no amino acid
  Variant (64)..(67): Xaa in position 64 to 67 is any amino acid
  Variant (69)..(74): Xaa in position 69 to 74 is any amino acid
  Variant (76)..(83): Xaa in position 76 to 83 is any amino acid
  Variant (84)..(88): Xaa in position 84 to 88 is any or no amino acid
  Variant (91)..(92): Xaa in position 91 to 92 is any amino acid
  Variant (94)..(103): Xaa in position 94 to 103 is any amino acid
  Variant (104)..(106): Xaa in position 104 to 106 is any or no amino acid
  Variant (108)..(114): Xaa in position 108 to 114 is any amino acid
  Variant (115)..(120): Xaa in position 115 to 120 is any or no amino acid
  Variant (123)..(127): Xaa in position 123 to 127 is any amino acid
  Variant (128)..(200): Xaa in position 128 to 200 is any or no amino acid
  Variant (202)..(202): Xaa in position 202 is any amino acid
  Variant (204)..(204): Xaa in position 204 is any amino acid
  Variant (207)..(211): Xaa in position 207 to 211 is any amino acid
  Variant (213)..(227): Xaa in position 213 to 227 is any amino acid
  Variant (228)..(237): Xaa in position 228 to 237 is any or no amino acid
  Variant (242)..(242): Xaa in position 242 is any amino acid
  Variant (243)..(244): Xaa in position 243 to 244 is any or no amino acid
  Variant (246)..(249): Xaa in position 246 to 249 is any amino acid
  Variant (251)..(253): Xaa in position 251 to 253 is any amino acid
  Variant (254)..(255): Xaa in position 254 to 255 is any or no amino acid
  Variant (259)..(259): Xaa in position 259 is any amino acid
  Variant (261)..(262): Xaa in position 261 to 262 is any amino acid
  Variant (264)..(264): Xaa in position 264 is any amino acid
  Variant (267)..(269): Xaa in position 267 to 269 is any amino acid
  Variant (271)..(272): Xaa in position 271 to 272 is any amino acid
  Variant (274)..(278): Xaa in position 274 to 278 is any amino acid
  Variant (280)..(294): Xaa in position 280 to 294 is any amino acid
  Variant (295)..(338): Xaa in position 295 to 338 is any or no amino acid
  Variant (340)..(342): Xaa in position 340 to 342 is any amino acid
  Variant (343)..(343): Xaa in position 343 is any or no amino acid
  Variant (345)..(351): Xaa in position 345 to 351 is any amino acid
  Variant (352)..(354): Xaa in position 352 to 354 is any or no amino acid
  Variant (356)..(357): Xaa in position 356 to 357 is any amino acid
  Variant (360)..(361): Xaa in position 360 to 361 is any amino acid
  Variant (363)..(369): Xaa in position 363 to 369 is any amino acid
  Variant (371)..(373): Xaa in position 371 to 373 is any amino acid
  Variant (375)..(376): Xaa in position 375 to 376 is any amino acid
  Variant (378)..(383): Xaa in position 378 to 383 is any amino acid
  Variant (384)..(401): Xaa in position 384 to 401 is any or no amino acid
  Variant (403)..(403): Xaa in position 403 is any amino acid
  Variant (406)..(406): Xaa in position 406 is any amino acid
  Variant (408)..(436): Xaa in position 408 to 436 is any amino acid
  Variant (437)..(472): Xaa in position 437 to 472 is any or no amino acid
  Variant (474)..(481): Xaa in position 474 to 481 is any amino acid
  Variant (483)..(485): Xaa in position 483 to 485 is any amino acid
  Variant (486)..(486): Xaa in position 486 is any or no amino acid
  Variant (488)..(488): Xaa in position 488 is any amino acid
  Variant (489)..(504): Xaa in position 489 to 504 is any or no amino acid
  Variant (506)..(507): Xaa in position 506 to 507 is any amino acid
  Variant (508)..(509): Xaa in position 508 to 509 is any or no amino acid
  Variant (511)..(511): Xaa in position 511 is any amino acid
  Variant (513)..(513): Xaa in position 513 is any amino acid
  Variant (515)..(515): Xaa in position 515 is any amino acid
  Variant (517)..(517): Xaa in position 517 is any amino acid
  Variant (519)..(521): Xaa in position 519 to 521 is any amino acid
  Variant (522)..(522): Xaa in position 522 is any or no amino acid
  Variant (524)..(526): Xaa in position 524 to 526 is any amino acid
PXXXXXXXXXXXXXXXXXXXXXXXXXXXXXXXXXXXXXXXXXXXXXXXXXXXXYXRXXXXNPTXXXXEXXXXXXEXXXXXXXXXXXXXSGXXAXXXXXXXXXXXXXGXXXXXXXXXXXXXYGXXXXXXXXXXXXXXXXXXXXXXXXXXXXXXXXXXXXXXXXXXXXXXXXXXXXXXXXXXXXXXXXXXXXXXXXXXXXXXEXPXNPXXXXXDXXXXXXXXXXXXXXXXXXXXXXXXXDNTFXXXPXXXXPXXXXXGADXVXXSXTKXXXGXXHXXXXXGXXXXXXXXXXXXXXXXXXXXXXXXXXXXXXXXXXXXXXXXXXXXXXXXXXXXXXXXXXXGXXXXPXXXXXXXXXXGXXTLXXRXXXXXXXAXXXAXXLXXXXXXXXXXXXXXXXXXXXXXXXVXYPXLXXXXXXXXXXXXXXXXXXXXXXXXXXXXXXXXXXXXXXXXXXXXXXXXXXXXXXXXXXXXXXXXXGXXXXXXXXPXXXXHXXXXXXXXXXXXXXXXXGXXXXLXRXSXGXEXXXXDXXXD

SEQ ID NO: 14169 - protein, 22 aa, Artificial sequence
  protein pattern
  Variant (2)..(2): Xaa in position 2 is any amino acid
  Variant (4)..(4): Xaa in position 4 is Phe, Ile, Leu or Val
  Variant (5)..(7): Xaa in position 5 to 7 is any amino acid
  Variant (9)..(9): Xaa in position 9 is any amino acid
  Variant (12)..(12): Xaa in position 12 is any amino acid
  Variant (13)..(13): Xaa in position 13 is Phe, Ile, Leu, Met or Val
  Variant (14)..(14): Xaa in position 14 is Ala, Cys, Asp, Gly, Asn or Ser
  Variant (16)..(21): Xaa in position 16 to 21 is any amino acid
GXDXXXXSXTKXXXGXXXXXXG

SEQ ID NO: 14170 - protein, 15 aa, Artificial sequence
  protein pattern
  Variant (2)..(2): Xaa in position 2 is Phe, Ile, Leu or Val
  Variant (4)..(4): Xaa in position 4 is any amino acid
  Variant (6)..(6): Xaa in position 6 is any amino acid
  Variant (8)..(10): Xaa in position 8 to 10 is any amino acid
  Variant (12)..(12): Xaa in position 12 is Ile or Leu
  Variant (13)..(14): Xaa in position 13 to 14 is any amino acid
RXSXGXEXXXDXXXD

SEQ ID NO: 14171 - DNA, 1284 bp, Saccharomyces cerevisiae
  CDS (1)..(1284)
atgcatcataactcacagtctttgagctctggacacatcaggagccccgaggatgaaaatgtggcacctataggtaatcttaaacacaggactggatccctcagtcatatttcatctgcgcacccgagggtcgcacttagcgacgttaccaatatagttgcgacaaactctagcaacaacagcataagtaagccaaaagtcgccccaattaaagaaagattggattcagctgcgataattgaggaagaaaggctggatgcgaatagtgttgcacagagaaaagaagctgatcataacgatttgttaacggacagggaacaagaggaacccgttgaagacgacggagaaagcgaagaggatgaagaagaagaccaggagcctctactgttgcaacattatgctagtgatacattggtctgggagcatgcatttagaacttactatagaactacattagatcccaatgatgatgacgtgtacgatgtggtcatggttgccgaattatctaatgagatattcgagtatatgaggaaattggaagacctgtataaacccaacccgtactacatggataaacaaccagagttaagatggtcgtttcgaagcacactgattgattggatcgtccaagtacatgaaaaatttcaacttttacctgaaactctatatctctgcattaatataatagacagatatctgtgcaaagaagttgttcctgtaaataagttccaacttgtgggtgcagcctcactcttcattgctgctaaatatgaggaaatcaactgtcctacaatcaaggatttcgtatacatgtcagaaaactgctactcaaggaacgacctgctggacgcagaaagaactattttgaacggcttagaatttgaattgggttggcctggtccgatgtcatttttacgaagaatcagtaaggcagacgattacgagcatgatacgagaacactggccaaatatctattggaatccacaataatggaccatcgactggtttccgctcaacctagttggttagctgccggtgcatactttctaagtaagattattctgggccaaaatcagtggtctctggcgcacgtctactattccaattatacacaagaacaaattcttccgttggccaccattattttagaaaattgcagatatgcctctaaacgtcataacgccatatggagaaaatattcttcacgtcgttatttgcattcttcacagatcgtagcgaagtggatagcattagctgaacacagagtagaaagatctaactaa

SEQ ID NO: 14172 - protein, 427 aa, Saccharomyces cerevisiae
MHHNSQSLSSGHIRSPEDENVAPIGNLKHRTGSLSHISSAHPRVALSDVTNIVATNSSNNSISKPKVAPIKERLDSAAIIEEERLDANSVAQRKEADHNDLLTDREQEEPVEDDGESEEDEEEDQEPLLLQHYASDTLVWEHAFRTYYRTTLDPNDDDVYDVVMVAELSNEIFEYMRKLEDLYKPNPYYMDKQPELRWSFRSTLIDWIVQVHEKFQLLPETLYLCINIIDRYLCKEVVPVNKFQLVGAASLFIAAKYEEINCPTIKDFVYMSENCYSRNDLLDAERTILNGLEFELGWPGPMSFLRRISKADDYEHDTRTLAKYLLESTIMDHRLVSAQPSWLAAGAYFLSKIILGQNQWSLAHVYYSNYTQEQILPLATIILENCRYASKRHNAIWRKYSSRRYLHSSQIVAKWIALAEHRVERSN

SEQ ID NO: 14173 - DNA, 1578 bp, Bombyx mori
  CDS (1)..(1578)
atggaaattcaactaaggcggcatagatcggcacagattcaagaccaagaaaatctgtatgctggtgtccgcgggaaaggtaatggagccgtccctacaaaaaggctgggattaacagtacgtggggcgttaggtgatttgaacacaaatgtgcaagttcaacgcgaagctctcggcaaagttgccgttacaactgctgaatttgagaaaaaagccaccctaaaccgtggcgtagtacgaagcaactatagtcatgtaacatcaaaagtagacacaggattagctgtcaaaaatgttattcagccatcttcaaggcccccactccgccgtgaagagagcactgctggattgaccgccagagctgtaactcgtaccagggtcgctttaaaagataatcagaacaagccaaatgaaataaaagaatcaattaacatctacatacaaactaagaaatgtcaagacacaaaaaagacaaagctgcccatgctaaaggaaaataaagaattaagaacatccaaatcacatctaaaagatggaactgactctttacggaaaacaaaactagcattaaaagacccaatcgaatcattaggaaagttaaaactagctgaaacataccctgagaagggaatgggcttaatagataaagccaaggtagaaaagcaagctgaattctttgaaactgtgtttgatattacacctccactgcctgaggatattgaagatattgatgccggagacaacaacagccctttgctaatgtctatgtatatcaaggacatttacaaatacttgactgaattggaagagaaatattctattgagcctgatcatttaaaaaagcagactgttataactggcaaaatgagagcaacactcattgattggcttgtggaagttcaacgccaattctcattagtattggagacattccatctcactgttggcattattgacagatatttgcaggttgttccaaatgtccagcgcaatcaattacaattagtcggtgtgacggctatgttcatagcaagcaagtatgaagagatctacgctccagatgttggcgattttgtttatgtcactgataatgcctacaccaagtctgatgtattccgctgtgagagagacattatgtgcaaactgggcttctgtcttgcgagaccgatacctttgagttttcttagaagatttgtaaaagccgcacgtggtacatcgaggaatcatcatttggccaaatactttgttgatctctgtctagtcgaatatactatggcccattatcgaccgtcagaactagcagcggcagcaatctgcctctcacttcatttgctatcgagcaagacactctccgaagtatggacgtctaccttgtcttactactctgggtacgatcttgaccacatagatccgattataaggaaaatcgcaaagattgttattaacattgaaaattccaaatataaagccgtatataacaaatatttggacacgacgttggctaaagtttccagtcttccgcagttgaaaagcgaagcgatttatgaactcgcaaagatatcaagcccaagcccttag

SEQ ID NO: 14174 - protein, 525 aa, Bombyx mori
MEIQLRRHRSAQIQDQENLYAGVRGKGNGAVPTKRLGLTVRGALGDLNTNVQVQREALGKVAVTTAEFEKKATLNRGVVRSNYSHVTSKVDTGLAVKNVIQPSSRPPLRREESTAGLTARAVTRTRVALKDNQNKPNEIKESINIYIQTKKCQDTKKTKLPMLKENKELRTSKSHLKDGTDSLRKTKLALKDPIESLGKLKLAETYPEKGMGLIDKAKVEKQAEFFETVFDITPPLPEDIEDIDAGDNNSPLLMSMYIKDIYKYLTELEEKYSIEPDHLKKQTVITGKMRATLIDWLVEVQRQFSLVLETFHLTVGIIDRYLQVVPNVQRNQLQLVGVTAMFIASKYEEIYAPDVGDFVYVTDNAYTKSDVFRCERDIMCKLGFCLARPIPLSFLRRFVKAARGTSRNHHLAKYFVDLCLVEYTMAHYRPSELAAAAICLSLHLLSSKTLSEVWTSTLSYYSGYDLDHIDPIIRKIAKIVINIENSKYKAVYNKYLDTTLAKVSSLPQLKSEAIYELAKISSPSP

SEQ ID NO: 14175 - DNA, 1329 bp, Arabidopsis thaliana
  CDS (1)..(1329)
atgtcttcttcgtcgagaaatctatctcaggagaatccgattcctcgtccgaacttagccaagactcgaacctcactccgcgatgttggaaaccgtcgtgctcccctcggcgacatcacaaatcagaagaatggatctagaaatccttcaccgtcgtctactctggtgaattgttcaaataagatcggccaatctaagaaagcaccaaaacctgctttatctcgtaattggaatttgggaattctcgattccggtttacctcccaagccaaatgcgaaatcaaacataatcgttccttacgaagacaccgaattgctccaaagcgatgatagtcttctatgttcttcacctgcattatccttggatgcctctcctactcaatctgacccgtcaatttccactcatgactctttgacgaaccacgttgtagattacatggtcgagagcactactgatgatggaaatgatgatgatgatgatgagattgttaacattgatagtgacttgatggatccacagctttgtgcttcttttgcttgtgatatctacgagcatttgcgtgtatctgaggtgaacaaaagaccggctctagattacatggaaagaactcagtcaagcatcaatgctagcatgcgttctatactgattgactggcttgtggaggttgctgaagagtataggctttcgcccgagacgttgtatttggcagtaaactacgttgatcggtatcttacaggaaatgcaatcaacaagcaaaatctgcagctacttggtgttacctgcatgatgatagcagcaaaatatgaagaagtgtgtgtgccgcaagtggaggatttctgttacatcactgataacacatacttaagaaatgagcttttggagatggagtcttctgttctgaactacttgaagttcgaattaacaactccaacagcaaaatgtttcttgaggcgctttcttcgtgctgctcaaggcagaaaggaggtaccatcactgctgtctgagtgtctggcctgctatctcaccgaattatcgctgttagattacgctatgcttcgatacgctccatcacttgttgcagcctctgcagttttcttggcacaatacactctacacccttcaagaaaaccatggaatgctacgctagagcattacacatcgtacagggctaaacatatggaagcatgcgttaagaatcttcttcagctgtgtaatgagaaactctcatctgatgtggttgcaatcagaaagaagtacagtcaacacaaatacaagtttgcagcaaagaagctttgtcccacgtcactaccgcaagagcttttcctctga

SEQ ID NO: 14176 - protein, 442 aa, Arabidopsis thaliana
MSSSSRNLSQENPIPRPNLAKTRTSLRDVGNRRAPLGDITNQKNGSRNPSPSSTLVNCSNKIGQSKKAPKPALSRNWNLGILDSGLPPKPNAKSNIIVPYEDTELLQSDDSLLCSSPALSLDASPTQSDPSISTHDSLTNHVVDYMVESTTDDGNDDDDDEIVNIDSDLMDPQLCASFACDIYEHLRVSEVNKRPALDYMERTQSSINASMRSILIDWLVEVAEEYRLSPETLYLAVNYVDRYLTGNAINKQNLQLLGVTCMMIAAKYEEVCVPQVEDFCYITDNTYLRNELLEMESSVLNYLKFELTTPTAKCFLRRFLRAAQGRKEVPSLLSECLACYLTELSLLDYAMLRYAPSLVAASAVFLAQYTLHPSRKPWNATLEHYTSYRAKHMEACVKNLLQLCNEKLSSDVVAIRKKYSQHKYKFAAKKLCPTSLPQELFL

SEQ ID NO: 14177 - DNA, 1314 bp, Arabidopsis thaliana
  CDS (1)..(1314)
atgcatagagcttcttctaagcacactaatgcgaagaaagaagcaatctctacttcgaaaattcgagataataatgtgagagtcactagatcaagagctaaggccttaggagtgtcgaattctccatcaaaacccgcttttaaacatgaaacgaagcgtgttgctagaccgagtaataaacgaatggcatcggataatatcacagtttgtaatcagaaaagacgagcggtgctcaaggatgtgactaacactttggcagaaagtataatttctacagaaggcaatgttaaggcttgcaagcgaggtggtaaagaaactaagcaaatagaagaagatggtttggtagatgtggatggcgaaaaatctaaactagcagaagatttgtcaaagattagaatggttgaatctttagatgcatctgcttcaaagcaaaaagaagacagatctgatgtcacagattgtgttcagattgtagatatagattcaggtgtccaagatcctcagttttgtagcttatatgctgcaagtatatatgacagcattaatgttgcagagcttgaacaaagaccttcaactagctatatggtgcaagtgcagcgagatatcgatccaacgatgcgcggaattctgattgattggctcgtggaggtctctgaagagtacaagttggtttcagatacactttaccttaccgtgaatctaattgatcggttcatgtctcataattacattgaaaagcagaagctccagctacttggtatcacttgcatgttaatagcctccaaatacgaagagattagtgcaccgcggttggaggagttttgcttcattacagacaatacatacacaagactagaagtactaagtatggagattaaagttttaaactctcttcattttcggttatcagttcccaccaccaaaacgtttctcaggcggttcattcgcgccgctcaagcgtctgataaggttcctctcattgaaatggagtacttagccaactatttcgcggaactaactctcacagaatatactttcctaaggttccttccatccctaattgccgcttcagcggttttcttagcaagatggacactcgaccaatctaaccatccttggaaccaaactctacaacactatacaagatatgaaacatccgctctaaaaaacacggtacttgcaatggaggagttgcagctcaacaccagtggaagcactcttatcgctatacacaccaaatacaaccaacaaaagtttaaaagagtggcaacattaacatctcctgaacgtgtgaacacactcttctcaagatga

SEQ ID NO: 14178 - protein, 437 aa, Arabidopsis thaliana
MHRASSKHTNAKKEAISTSKIRDNNVRVTRSRAKALGVSNSPSKPAFKHETKRVARPSNKRMASDNITVCNQKRRAVLKDVTNTLAESIISTEGNVKACKRGGKETKQIEEDGLVDVDGEKSKLAEDLSKIRMVESLDASASKQKEDRSDVTDCVQIVDIDSGVQDPQFCSLYAASIYDSINVAELEQRPSTSYMVQVQRDIDPTMRGILIDWLVEVSEEYKLVSDTLYLTVNLIDRFMSHNYIEKQKLQLLGITCMLIASKYEEISAPRLEEFCFITDNTYTRLEVLSMEIKVLNSLHFRLSVPTTKTFLRRFIRAAQASDKVPLIEMEYLANYFAELTLTEYTFLRFLPSLIAASAVFLARWTLDQSNHPWNQTLQHYTRYETSALKNTVLAMEELQLNTSGSTLIAIHTKYNQQKFKRVATLTSPERVNTLFSR

SEQ ID NO: 14179 - DNA, 1290 bp, Nasonia vitripennis
  CDS (1)..(1290)
atgaccgttaacgatcagaatgttgctaatcaagagaatgtcaagaatgtcaagtctatggcattggctccagggcagacaaggagagctgctttgggcgaaattggcaataaagtcattattcaaaggaccaatgatttgacaggcaaatctagtcaagcaggaaaggacaaagttttgctgaaaaaaccattggtaaccaagcagcctcaagttaaggttgacagaatcgagaagattgaaaaagttgtccaaaaacctcatgtgcaaatagttaagccagtagttaaaactgatatacatgttgataatcgcccgctgcccgaggccaagaaaaatgagactgataatattaataagaaagactctgagttgaatgaagccaaaaaagatacggattcattttcttcagatctgataacaatcgaagatattgacgaagaggatagaaaaaatcccattcttgtttctgtatatagtaacgacatttacaggcatctgagaaatttggagacccagtttcctatactaaaagggtacttgcatgggcaagaggtaactcccaagatgagatgtgtacttgttgattggttaattgaagtccatgaacagtttcatctgatgcaggagacactgtatcttaccattgcaatcattgatcgattcttacaggactttcgactgattacccgaaagaggctgcagttagtaggtgtaacagctatgtttatagctagcaaatatgaagaaatgtactccccagacataagcgattttgtgtatattacggataatgcttacacaaaggcagaaattttacaaatggaaatgctcatgattaaaacactcgaattttcatttggacggccgctaccgttgcatttcctcaggagatacagcaaagctggaaaggctctgccagttcatcacacattggcaaaatactttttggagcaatgcctggttcattacgaagtttgccatcatccacctagcttgattgcagcggctgctctctatctttcattccttttgctagggaatgactctcctcaagaatcagagagcgatctcatttggactaaaactttggtacattacagtacatacaagttaagggacgtattgcccgtagtaaaagaaatttcctcaataatggttacagcggaaaagagcaagtatcaggctgcgcggagaaagtacacgaacccgaagcacatgaagatcagtctccgtcctgagttgaagtctccgactttagccgccttggcgaatcacaaggacgaataa

SEQ ID NO: 14180 - protein, 429 aa, Nasonia vitripennis
MTVNDQNVANQENVKNVKSMALAPGQTRRAALGEIGNKVIIQRTNDLTGKSSQAGKDKVLLKKPLVTKQPQVKVDRIEKIEKVVQKPHVQIVKPVVKTDIHVDNRPLPEAKKNETDNINKKDSELNEAKKDTDSFSSDLITIEDIDEEDRKNPILVSVYSNDIYRHLRNLETQFPILKGYLHGQEVTPKMRCVLVDWLIEVHEQFHLMQETLYLTIAIIDRFLQDFRLITRKRLQLVGVTAMFIASKYEEMYSPDISDFVYITDNAYTKAEILQMEMLMIKTLEFSFGRPLPLHFLRRYSKAGKALPVHHTLAKYFLEQCLVHYEVCHHPPSLIAAAALYLSFLLLGNDSPQESESDLIWTKTLVHYSTYKLRDVLPVVKEISSIMVTAEKSKYQAARRKYTNPKHMKISLRPELKSPTLAALANHKDE

SEQ ID NO: 14181 - DNA, 1422 bp, Gibberella zeae PH-1
  CDS (1)..(1422)
atgcctacagttcgggccactcgtacgcgcaacgagaacgacgagaatagcggcacgacgcgtctcacaagagcccaggctgctgctctcaaggttgacgagctatcaatgcctgccaaggctgccctgcaaacgaagaagtccacagcaaacggtactgccgctgccaacacgcggaaacgcgctgcattgggcgatgtcagcaatgttggaaaggccgatggggttgctggaaagaaggcgaaaggattagtctccaaggctgctcagcccaccggtattgagaagaagaccgcgcgacccacaagacctgctctcgcatcccagaccgccaactccaaacctgcccagtccgggtctggtactatcaacaacaagcgaaaggtcctgacagacaccaagcccaaggcccctgtcaagaaaactgagcccacatccaaggaacccgagttgactgaagagaatgagcggtcagagacacccgaagaggctgaggttgagaagcctgaagtctctgttgagaagcccgaagttcaggacgcgcccttcaagtaccctcccggtgtcaataacctggacgaagaggatcttgaagaccctctcatggttgctgaatacgccaacgaaattttcgaatacctccgcgacctcgagtgcaagtcgattcccaaccctcaatatatgtctcaccaagacgacctcgaatggaagacgcgtggtatcctggttgactggctgattgaagtccacacgcgtttccacctgctccccgagaccctcttcctcgccatcaacgttatcgatcgattcctgtcggagaaggttgtccagcttgaccgtttccaactcgtgggcatcactgccatgtttatcgcgtccaagtacgaagaggtcctctctcctcatgtcgagaacttcaagcgcattgccgatgatggtttcagcgaggctgagatcctcagcgccgagcgatttgtactcagcacactcaactatgatctcagctaccccaaccccatgaacttcctccgccgagtctccaaggccgacaactatgacattcagtctcgcaccatcggaaagtacttgatggagatcagcctcttggaccaccgatttatggcctaccgacccagtcacgttgctgctggtgccatgtacttggcgcgacttatgcttgaccgcggtgaatgggatgccactctatcttactatgcgggttacaccgaggatgaggtcgagcctgtcgtccacctcatggtcgactacctcgctcgccctgtcgtccatgaggcctttgacaagaagtatgctgccaagaagttcttgagggcttcgctcctcgctcgccaatgggccaagaagaatgctgttctcttcggcattaccgatattgaactgggtctcgaccaaatatcatag

SEQ ID NO: 14182 - protein, 473 aa, Gibberella zeae PH-1
MPTVRATRTRNENDENSGTTRLTRAQAAALKVDELSMPAKAALQTKKSTANGTAAANTRKRAALGDVSNVGKADGVAGKKAKGLVSKAAQPTGIEKKTARPTRPALASQTANSKPAQSGSGTINNKRKVLTDTKPKAPVKKTEPTSKEPELTEENERSETPEEAEVEKPEVSVEKPEVQDAPFKYPPGVNNLDEEDLEDPLMVAEYANEIFEYLRDLECKSIPNPQYMSHQDDLEWKTRGILVDWLIEVHTRFHLLPETLFLAINVIDRFLSEKVVQLDRFQLVGITAMFIASKYEEVLSPHVENFKRIADDGFSEAEILSAERFVLSTLNYDLSYPNPMNFLRRVSKADNYDIQSRTIGKYLMEISLLDHRFMAYRPSHVAAGAMYLARLMLDRGEWDATLSYYAGYTEDEVEPVVHLMVDYLARPVVHEAFDKKYAAKKFLRASLLARQWAKKNAVLFGITDIELGLDQIS

SEQ ID NO: 14183 - DNA, 1431 bp, Candida glabrata CBS 138
  CDS (1)..(1431)
atgtcactatctgggaataactttgagaacccccagaacaatggaacttctagacttttaaaaaatgtacaaagacttgctttgaacaatgtcacaaatacaacagcaggccctcatgttggctttcttggttcacaatctcaagataactctgcattaagaagcttcaagtcatcgattgcaaacttaaagggtgactcagtacctacttataaagttaacccattgtctagaccagccttggttaacaatgaaagagatttaacaaagacaaaattgggtatacaagaagaaaaggaaacaagaaactatgaagaaaacaaggagaatcatggaccccagaaaggacatttcacacagtatgatgagagggtagaagataaaaatcagtcagaatcgacagtttcatcacaaaccacaacagaatcgacgcaaataacaacgagtaatggtgatgatgaccaaactgaggaagaaaatagcgaggatgctgactcaaaaaagaaacgcccaatttctactattgtggaacaagatatacccaaaaagttcaagtcatgcaatcgttttggaacagaagagtacgaatgggaagatctagatgctgaggatgccaatgaccctttcatggtaagtgaagacgtaaacgatatttttgagtatcttcatcagttggaaattgtaactttaccaagaaaggaggatctatacaagcatagaaatatttgccagaatagggatatattagtgaattggctggtaaagatacataataaatttggtttgcttccagaaacactatatctagcggtaaatttgatggatcgttttctttgcaaagaattagttcaacttgataaattgcaattagtaggaacatcgtgtctctttattgcatcaaaatatgaagaagtttattctccaagtattaagcactttgcttcggaaactgacggagcatgcacagaagatgagattaaagaaggtgaaaaatttattctgaagacactagaatttaacctcaactatcctaatccaatgaactttttaagaagaatatcaaaagctgatgattatgacatccaatcaagaacgttagccaaatttctactagaaatatcactagttgacttcagattcattggtgtattaccatcattatgcgcagctgcagccatgttcttatccagaaaaatgttaggtaaaggccaatgggatgggaatttaatacactatagcggtggatacacaaaaaatcaattggctcctgtttgtgagatgattatggactatttagttagccctgttgttcatgatgaattccatagaaaataccaatcaagaagattcatgaaagcatccataatatctgttcagtgggctttaaaggtcaggaaaaatggatacgatataatgtcactacatgagtaa

SEQ ID NO: 14184 - protein, 476 aa, Candida glabrata CBS 138
MSLSGNNFENPQNNGTSRLLKNVQRLALNNVTNTTAGPHVGFLGSQSQDNSALRSFKSSIANLKGDSVPTYKVNPLSRPALVNNERDLTKTKLGIQEEKETRNYEENKENHGPQKGHFTQYDERVEDKNQSESTVSSQTTTESTQITTSNGDDDQTEEENSEDADSKKKRPISTIVEQDIPKKFKSCNRFGTEEYEWEDLDAEDANDPFMVSEDVNDIFEYLHQLEIVTLPRKEDLYKHRNICQNRDILVNWLVKIHNKFGLLPETLYLAVNLMDRFLCKELVQLDKLQLVGTSCLFIASKYEEVYSPSIKHFASETDGACTEDEIKEGEKFILKTLEFNLNYPNPMNFLRRISKADDYDIQSRTLAKFLLEISLVDFRFIGVLPSLCAAAAMFLSRKMLGKGQWDGNLIHYSGGYTKNQLAPVCEMIMDYLVSPVVHDEFHRKYQSRRFMKASIISVQWALKVRKNGYDIMSLHE

SEQ ID NO: 14185 - DNA, 1401 bp, Candida glabrata CBS 138
  CDS (1)..(1401)
atgcagactggaaatgaggagaatgctgttccctcatggtattcagtgcctggtaaggaggtgcatagcgataaggctcatgagcaccgggtggctttgagcgatgtaactgggttggccaacagtaatttcatgcatgaaaagcttcattctaacagatgcagtggtgaaccgtctagcacggcacgtaatagtctcgagataaatctgaatcatgcggtggagtcggatcaggaaaacatggtgtccatatatgcttcgaacactctggacacacccaatagcaacgatgtgagcagccttcttgaagatcaacagctggaaagtatacgaagagtcacccagcacatgtcaaatacatcaaatggcgatgactcggactcaacaacggtggccaataaggactctcaccagggtgataacagtaacaatacaagtgatgatgctctcaggaatgagtattcagaaccaccagtgaatgatgatatacgaaggacattgatgaaagcataccagacatataagttggcatacttggatgattctgacgaggacaactacgatcctgtaatggtggtagaattagcctctgggatatttgattatatgaaacaactggagatcaaataccgtcctgacccttattacatggatttgcaatccgaactaaaaccatcatacagaagtacattactggattggatcgttcaagtagatgagagattccagctactgccagagactttattcctcacgattaacataatagacagatttttgtccaaagccgctataaaactcaacaagtttcaattggtcggtgctgtttcaatgtttatcgctgcaaaatatgaagaaataaactgtccaacaatgaaggactttctttacatgcttgataatgcatatacaaaagaagaaatgatagatgctgaacgatttatactaaacacattggatttttcaataggatggcctggcccaatgtctttcctgcgtcgtataagcaaagctgatgattatgattataacattagaacgttggctaaatacctattagaaacaacaatcatggacgctagactaataggaactccacctagctggctggcatcgggtgcctatttcctaagtaaaaccatcttgagctatggaaatgaagaaagagatgctgaagaaagatcagtttatgagactggctggaccctaaaacatgtcttttattctggctatacccaagagcaagtttttcctttatctagtctgattctcgagaactgtaggcatgcacaagaacgtcatagtgcaatttggacaaagtattccgacaggcgctatcaccgttcctcagtgatggtggataagtggatcgaggttgcagaaagcaaaatgaatagttaa

SEQ ID NO: 14186 - protein, 466 aa, Candida glabrata CBS 138
MQTGNEENAVPSWYSVPGKEVHSDKAHEHRVALSDVTGLANSNFMHEKLHSNRCSGEPSSTARNSLEINLNHAVESDQENMVSIYASNTLDTPNSNDVSSLLEDQQLESIRRVTQHMSNTSNGDDSDSTTVANKDSHQGDNSNNTSDDALRNEYSEPPVNDDIRRTLMKAYQTYKLAYLDDSDEDNYDPVMVVELASGIFDYMKQLEIKYRPDPYYMDLQSELKPSYRSTLLDWIVQVDERFQLLPETLFLTINIIDRFLSKAAIKLNKFQLVGAVSMFIAAKYEEINCPTMKDFLYMLDNAYTKEEMIDAERFILNTLDFSIGWPGPMSFLRRISKADDYDYNIRTLAKYLLETTIMDARLIGTPPSWLASGAYFLSKTILSYGNEERDAEERSVYETGWTLKHVFYSGYTQEQVFPLSSLILENCRHAQERHSAIWTKYSDRRYHRSSVMVDKWIEVAESKMNS

SEQ ID NO: 14187 - DNA, 1332 bp, Candida glabrata CBS 138
  CDS (1)..(1332)
atgaataatactgaagatatgtttagggacgttgaaaatgcaagccaaaatatggcttcaacagtgaacacttcaagaatggaccaaagacaaagaagggctttgactgatttgacatcacaaaaagtgaacagaattcatacttcaaaaacaattaaggatattccagcatatttatcaaattacactgccgatggagagaataaaaacattgaccaagcttttaatcatagtaatgaccaagatatcggtttagtaaatcaaatcaactcaggatatgccaatgttgaaaacgaaccaggaaaagaaactgatcacatatttatagatcaggatgatctgtcagatttagatattgtacaagaggactccttgagggagcaactagaagaatttgaacacgactttgagaattttgtggagccactctcaccaatatttaatgatgaaatacaagatactcttgatagagcatttaaagaatactatagagcaactccagatatggaggatgatgatacatttgatgctgttatggtaacggagtatggtagtgatatttttcgttacatgagaaagcttgaattaaaatatagaccaaatccgtactacatggcaggccaaccggaattgaaatgggaatatagaaagactgtgattgactggattgtgcaggttcacgagaggttccaattacttcctgaaacactatatctaactattaacatcatcgacagatttttatcaagaaagaatattacacttaacagattccaactagttagtgctactgcattactgatagcatccaaatacgaggaaatcaattgccctactataaaggatatagtctatatggtagacaatacttattccagggatgacatcatagaagctgaaaaatatatgattgatgcactagacttcgaagttagctggccaggtcctatgtcgttcttgcggagaataagtaaagcagatgattatgaataccgaactagaaatctagctaagtatttgctagaaaccacactaatggaatcctctttaatcagtgcactaccaagctggcttgcagctggtgcctactttttaagtagaataatattaggttacgaagagtggacccttaaacatgtctactattcgggctatactcacgaacagctttatcctctggctacacttatcttagacaactgccagaattatgaagaaagccaccaagcaatttggacgaagtatagtcaaccacaatatcatcaagtttcaatactggttacgaagttcttaggtagagtttcttcagacgatatgtcagaaatttattaa

SEQ ID NO: 14188 - protein, 443 aa, Candida glabrata CBS 138
MNNTEDMFRDVENASQNMASTVNTSRMDQRQRRALTDLTSQKVNRIHTSKTIKDIPAYLSNYTADGENKNIDQAFNHSNDQDIGLVNQINSGYANVENEPGKETDHIFIDQDDLSDLDIVQEDSLREQLEEFEHDFENFVEPLSPIFNDEIQDTLDRAFKEYYRATPDMEDDDTFDAVMVTEYGSDIFRYMRKLELKYRPNPYYMAGQPELKWEYRKTVIDWIVQVHERFQLLPETLYLTINIIDRFLSRKNITLNRFQLVSATALLIASKYEEINCPTIKDIVYMVDNTYSRDDIIEAEKYMIDALDFEVSWPGPMSFLRRISKADDYEYRTRNLAKYLLETTLMESSLISALPSWLAAGAYFLSRIILGYEEWTLKHVYYSGYTHEQLYPLATLILDNCQNYEESHQAIWTKYSQPQYHQVSILVTKFLGRVSSDDMSEIY

SEQ ID NO: 14189 - DNA, 1335 bp, Kluyveromyces lactis NRRL Y-1140
  CDS (1)..(1335)
atgatgcaaatgcagcaaagggtagcacttggtgatgttacttcacagattaacaatagggccaatcggtttagtgttgacggtgacagcaagaaagcgtttgttgatgctggattcttgaaggagaaaagggtaaagaatgcgaaggagaatgatttgtttagtggtcatgacgatgatttagtagtagcacgggctcaaaaactacgagaacagactcttgtttcttctgtgagtactgagagtatacggtcgcaacaattgtctagcaatagtaacgaaacagtacaacaccatttgattgaggttgaagcagatgatgaggatgatgcggagactgatagtgaggcactagcttttaaagaagatgaagaagcagaaacaggcggagatataagtgaggaaatggaagacgtagatgaaagttttacgccgttagtgccggtggtaacggaacattcagagaggttatatcaatatgtgtatgagaggttacaccgtgaggagcctgaccctaacgatgaggacacatgggaccctgttatggtatcggaatataccattgaaatttttgaacatttgaagtttttggagaggaaattttcgccgaatcccaggtatatcgaacatcaaccggaactaacgtggaaatacagatcaacgttgatcgattggattgttcaagtccacgataggttccagttgttacctgagacgttatttttaacggtaaacattatcgataggtttttatcaaagaaacaagtcactttgaacaggttgcaattagtcggtgcagcagctctattcattgcttccaaatacgaggagatcaactgtccaactttgaaagatatgctgtatatgctggacaatgcatacactagagaagagattctaagggcagaaagattcatgatcaatacgttaaatttcgaatttggatggccaggtccaatgtcatttttaagaagagttagtaaagcggatgattatgaatacgatacaagaaccgtggctaaatatttattggaaacttccataatggagccagaaataatagcagcgccaccatcttggcttgctgcaggtgcatattacttgagtaaaatcattatcggactcacaggttggtctgacgaacacatatattattccggttacacagaagagcaattaataccgttggcaacaatgattttggattcatgcagacatgcaacagaacgtcacaaagcaatattcgataagtactcgaggagtcgccataggaaatctgcttttgtagtagcgaagtggatttcaatggccgagagtcggttggaacagaaataa

SEQ ID NO: 14190 - protein, 444 aa, Kluyveromyces lactis NRRL Y-1140
MMQMQQRVALGDVTSQINNRANRFSVDGDSKKAFVDAGFLKEKRVKNAKENDLFSGHDDDLVVARAQKLREQTLVSSVSTESIRSQQLSSNSNETVQHHLIEVEADDEDDAETDSEALAFKEDEEAETGGDISEEMEDVDESFTPLVPVVTEHSERLYQYVYERLHREEPDPNDEDTWDPVMVSEYTIEIFEHLKFLERKFSPNPRYIEHQPELTWKYRSTLIDWIVQVHDRFQLLPETLFLTVNIIDRFLSKKQVTLNRLQLVGAAALFIASKYEEINCPTLKDMLYMLDNAYTREEILRAERFMINTLNFEFGWPGPMSFLRRVSKADDYEYDTRTVAKYLLETSIMEPEIIAAPPSWLAAGAYYLSKIIIGLTGWSDEHIYYSGYTEEQLIPLATMILDSCRHATERHKAIFDKYSRSRHRKSAFVVAKWISMAESRLEQK

SEQ ID NO: 14191 - DNA, 1422 bp, Debaryomyces hansenii CBS767
  CDS (1)..(1422)
atgaaatcctttaaacaccaaaccaagtcgtttgatgaaaacgcccggatcaagtccaaaagtaacaccagtgcaaaattgatctccaaaaattcaaataataacaatgctaataacatcacctcgagtattgataaaagagaagcacttggcgacttaacgcagcttaatgagaaccggaaaattgatttgaatctgaaaacttctcttcaaaaagttcatatttacaaacaaaaacaccaaaaaagaccacatgaagaattaggtacaaagacagaacttggcacaaacgaacattatgataatagccagaactctgatgatgtacttaagttccattttgatcgtttagggggtagttcagatgtgtccaatcttgaagatattggatttgagtttgctaaccaaaatagaattgtagagcaatttgatgatgacgaagaagagatagttcaggtagatccagaggtggacgaggaagaagaagaagaagaagaagaagaagaagaggaagaggaagattacagcaagccaatggaaccaaaatggaacaaagctatattcaatgaattacaatatgtcatgaagaaattctctaaaaatacgttggatgaaaccgatgaggatacatttgatgttactatggtagcagaatatgcaccagagatttttaactacatgcatgaactagaatacagattggttccagatctgaattatatgagtaaccaggacgaattgaaatgggaaatgagaagtgttttaatcgattgggtggtccaggttcacaatagattcaatttattaccggaaacattattcttaacggtaaattatatcgatagatttttaagtaagcgtaaggtctcgttatcgagatttcaattggtcggagctgttgcattgttcattgctgcaaagtatgaagaaattaactgtccaactgttcaagaagttgcatacatggctgataatgcgtatacagtagatgaattcttaaaagcagagagattcatgattgatgtcttagagtttgatatgggttggcctggtccaatgtcttttttaagaagaactagtaaagctgatgactatgattatgaaactagaacattggctaaatactttttagaaatcacaataatggattcaagatttgtcgcttcacagccaagttggttggcagctggggcacattacttatcaagaaagttacttaatagaggtcactggacagaagctcatgtgtattattctggctataccgaatctcaattaagaccattagcagaaatcttattgcaaaattgtcgtaatgctgaatccaaccataaagccatttttgaaaagtaccaagaacgtcgctacagaagatcctcagcattcgttcaagaatacttcgaagctcttgaacagttataa

SEQ ID NO: 14192 - protein, 473 aa, Debaryomyces hansenii CBS767
MKSFKHQTKSFDENARIKSKSNTSAKLISKNSNNNNANNITSSIDKREALGDLTQLNENRKIDLNLKTSLQKVHIYKQKHQKRPHEELGTKTELGTNEHYDNSQNSDDVLKFHFDRLGGSSDVSNLEDIGFEFANQNRIVEQFDDDEEEIVQVDPEVDEEEEEEEEEEEEEEEDYSKPMEPKWNKAIFNELQYVMKKFSKNTLDETDEDTFDVTMVAEYAPEIFNYMHELEYRLVPDLNYMSNQDELKWEMRSVLIDWVVQVHNRFNLLPETLFLTVNYIDRFLSKRKVSLSRFQLVGAVALFIAAKYEEINCPTVQEVAYMADNAYTVDEFLKAERFMIDVLEFDMGWPGPMSFLRRTSKADDYDYETRTLAKYFLEITIMDSRFVASQPSWLAAGAHYLSRKLLNRGHWTEAHVYYSGYTESQLRPLAEILLQNCRNAESNHKAIFEKYQERRYRRSSAFVQEYFEALEQL

SEQ ID NO: 14193 - DNA, 1293 bp, Yarrowia lipolytica CLIB122
  CDS (1)..(1293)
atggacagaacacgaacccacgacgaaaactcgctacatgagtacagaaagccgactgcggccggaggagcccccaccaaacgagtggcactcggaacagtgaccaacaccgcctcggtggctaccaaggccaaggttgccatctccaagccaccccaaagaatcacccgacaaccattagtcgcacagaaccaaaacattcccccattagcagcacaaacgtcaactacctcgcttgtgcagccgtgccctggttctgacgacaccgtggacgaggaggtggacacacagacggccgatgttgagccaacacagatagaagacgacttctacgagtccgacgaggaaggccccacccaacgatttgctgtgtcggagtccaacccccaggcgctgtaccccgtggtcgacaaggagtccatggccgagctcaaccgagtggccacctactttagcacaaacaacggcgtggatctggatgagaacgacgacgacacttacgacattagcatggtggcagaatatgcggaggagatcttcacatacatgaaggagctggaggtgcggttccagcccaaccccggatacatggactcgcagacggagatccactgggccatgcggtccattctggtggactggctggtgcaggtgcaccaccggttctcgctgctacccgagactctctttctcaccatcaactacattgaccggtttctgaccatcaagacagtgagtctcagcaagctgcagttggttggcgcggtggctctgtttgtggccgccaagtacgaggaaatcaactgccccagcgtgcaggaaatcgcatacatggttgataatggctaccatgtagacgagattctcaaggccgagcgatacatgatcgacttgctggattttaatctagggtggcccggccccatgtcgtttctgcgacgaacttccaaggccgacgactacgacctggaaacccggactctcgccaagtatttattggaggtgaccatcatggagaagacctttgttggcgccccaccatcgtggcttgctgccgcagcacactttctgtcgcggcgcatgcttaaccgtggccattggaccgatggccacacttattactctggctataccgaaaagcagctgctgcccgccgtcatgcggatcatccagtgctgccgggacccgcttacccaccacaaggccattttcgagaagtacaaggaccgcaagttcaagcgtgcatcggtctatgtgcaggagtggatggaccatgaggaaaacaaccactaa

SEQ ID NO: 14194 - protein, 430 aa, Yarrowia lipolytica CLIB122
MDRTRTHDENSLHEYRKPTAAGGAPTKRVALGTVTNTASVATKAKVAISKPPQRITRQPLVAQNQNIPPLAAQTSTTSLVQPCPGSDDTVDEEVDTQTADVEPTQIEDDFYESDEEGPTQRFAVSESNPQALYPVVDKESMAELNRVATYFSTNNGVDLDENDDDTYDISMVAEYAEEIFTYMKELEVRFQPNPGYMDSQTEIHWAMRSILVDWLVQVHHRFSLLPETLFLTINYIDRFLTIKTVSLSKLQLVGAVALFVAAKYEEINCPSVQEIAYMVDNGYHVDEILKAERYMIDLLDFNLGWPGPMSFLRRTSKADDYDLETRTLAKYLLEVTIMEKTFVGAPPSWLAAAAHFLSRRMLNRGHWTDGHTYYSGYTEKQLLPAVMRIIQCCRDPLTHHKAIFEKYKDRKFKRASVYVQEWMDHEENNH

SEQ ID NO: 14195 - DNA, 1212 bp, Apis mellifera
  CDS (1)..(1212)
atggctttaagaaatcggactgcacttacgaatattgtaaatcaagaaaatgttaagaaccttaagtcctcagtgactacaatacctggaaagactaaaagagctgctttgggtgaaataggtaacaaagtgaataccttaagaggtgtggagcccattgatagaactagcttgctgacaaaagatagtaaaaaaatcacagtttcaaaacaaattattaaaacatcagaaaaaggaattgagaaactacctatccaaatagttaaacctgtaaaaaagattacagtttcttatgaaaataatgtggtgtcactacctcctaaggaagttcagtcattctcctcagatctgttagcagttgaggatattgatgaagaagataaaggaaatcctagtctagtttctatttatagtaatgacatttatggatatttaagaaccttagaaaatatgtttcctatctcaaaaggatatttagatggacaagaagttacaccaaaaatgagaagtgtacttatagattggttagtagaagtacatcaacaattccatctaatgcaagagacattatatctgactgttgctactattgatagatttttacaggtttatagaaaaagattacaattagttggtgtgacagctatgtttatagctagtaagtacgaagagatgtattctccagatgtaaatgactttgtatatatcacagataatgcatattcaaggatagaaatattacaaatggaaatgcttattgtgaaaacattagattattcttttggtagaccattacctttacattttttgagaagatacagcaaagctggaaaggctcttccaatacatcatacaatggctaaatattttctagaacaaagtttagtgcattatgaaatgtgtcattatccaccaagtcttattgcagctgcagcaatatatttagctttcctaattattgataataatgacgaggacgagcataaaattgtttggaccaataccttggcacattacagcacttattctaaggacgacgtgtttcccgtggtacgggaaacagcgagtattatagttaatgcggataagatcaaatatcaagctgtaagaaagaagtacgcccaatcgaaatgcatgaagattagcacacgaccggaacttaaatcagcaacgatatttgctatatccactgcggataataaagcaatataa

SEQ ID NO: 14196 - protein, 403 aa, Apis mellifera
MALRNRTALTNIVNQENVKNLKSSVTTIPGKTKRAALGEIGNKVNTLRGVEPIDRTSLLTKDSKKITVSKQIIKTSEKGIEKLPIQIVKPVKKITVSYENNVVSLPPKEVQSFSSDLLAVEDIDEEDKGNPSLVSIYSNDIYGYLRTLENMFPISKGYLDGQEVTPKMRSVLIDWLVEVHQQFHLMQETLYLTVATIDRFLQVYRKRLQLVGVTAMFIASKYEEMYSPDVNDFVYITDNAYSRIEILQMEMLIVKTLDYSFGRPLPLHFLRRYSKAGKALPIHHTMAKYFLEQSLVHYEMCHYPPSLIAAAAIYLAFLIIDNNDEDEHKIVWTNTLAHYSTYSKDDVFPVVRETASIIVNADKIKYQAVRKKYAQSKCMKISTRPELKSATIFAISTADNKAI

SEQ ID NO: 14197 - DNA, 1890 bp, Aspergillus nidulans FGSC A4
  CDS (1)..(1890)
atggacgcgaagccccaacgcatccgtgtccgtggtgacgagaatgctccctttcccctcgccgcgaccaagacacttcaccaacgaacgaagtctactactgcattgtccgcaaccttccagaacggtgccagtaagaatggagcccgcagagccgcctttggagatgtcagcaacaccgccagcctagttcacggcaaccgagacgatgcctcccttgctggcaggaaaccatccaaattgctggagaagggatctatggctacggaaaagaagtcgaccgcgctgtcacagcccgcccaacgtcccgtttccatgtcgggtttcaagggcctgctgaacaatgtgaccaaccccaagccccttgaggtcacgaagcaggcagctgggcagcagcaaagcacaaactcccgtaagaccttgaacaagcgcgctacggttttcaaagatcacctagaaccattgacggagagcaaagaacttacatccaaggaatcgaaacccgaacctaaggaaggcaacatgaagggccattcaaaaccaagcttgggggaacatctgcagaaggacggcaaagtggagggtactgtctctttgaatgaaaaattagagagcgaaatgtgcaaactcgaggttctgttgtcccagcctggagccgaagaagacgagaaggagttcccggatcttgaggacgacgattgcaaagtgcaacctatgccgaagcaaaccggcgaagctcatatcgcagcggactccaacggacccgctattagctcgagggtcacttgcaaatccaccacagtctcccgtgcttcacaggatgacttacctcatcagtcggaacctgaagaatactgggacgatgacgatgaggagaacgaggaagacgactatatcactgcccgatcataccgctcccgtagcgagaataccaccggcggagcaacgaccctactgtttcccagatataaccagcaggtcaaacgtgagctggctctcgcaaagcagatagtcgaggctacccgcaccgtggaagatatcgaggacgactattgtgatacaagtatggtggctgaatacagcgaggagattttcgagtacatcagagagcaagagatcaagatgctgccaaatgcacattatatggacaaccaagccgagatccaatggtccatgcggtctgttctcatggactggcttgtgcaggtccaccatcggttctcactgctccctgaaactctttttctttgcgtcaactatatcgaccgtttcctctcatgcaagattgtttcgcttggcaagctgcagcttgttggtgcgactgctatttttatcgccgcgaaatatgaagagatcaactgtccgtctgtccaggagattgtttacatggttgacggcggttacactgtcgatgaaattctgaaagcagagcggttcatgctaagcatgctccagttcgagcttgggtttccaggacctatgagcttccttcgcagaatcagcaaagctgacgattacgacctcgaaactcgcacacttgcgaaatatttcctggaggttactatcatggatgagcgattcgttggtagtcctgctagtttccttgctgccggcgctcattgcttggcgaggttaatgctcaagaaaggcacctggtctcctgctcatgtgcattacgccggttatacttactctcagctatacccgctcgtctctctcattgttgagtgctgtgagatgccccgcaagcatcattcagctatttacgataagtacaacgatagacgattcaagcttgcttctgcttacgtggaagccgaaatgaggaagaacttccgtcttccagagccggctatcgaccgcaaaacaacacttggtcaaggacattag

SEQ ID NO: 14198 - protein, 629 aa, Aspergillus nidulans FGSC A4
MDAKPQRIRVRGDENAPFPLAATKTLHQRTKSTTALSATFQNGASKNGARRAAFGDVSNTASLVHGNRDDASLAGRKPSKLLEKGSMATEKKSTALSQPAQRPVSMSGFKGLLNNVTNPKPLEVTKQAAGQQQSTNSRKTLNKRATVFKDHLEPLTESKELTSKESKPEPKEGNMKGHSKPSLGEHLQKDGKVEGTVSLNEKLESEMCKLEVLLSQPGAEEDEKEFPDLEDDDCKVQPMPKQTGEAHIAADSNGPAISSRVTCKSTTVSRASQDDLPHQSEPEEYWDDDDEENEEDDYITARSYRSRSENTTGGATTLLFPRYNQQVKRELALAKQIVEATRTVEDIEDDYCDTSMVAEYSEEIFEYIREQEIKMLPNAHYMDNQAEIQWSMRSVLMDWLVQVHHRFSLLPETLFLCVNYIDRFLSCKIVSLGKLQLVGATAIFIAAKYEEINCPSVQEIVYMVDGGYTVDEILKAERFMLSMLQFELGFPGPMSFLRRISKADDYDLETRTLAKYFLEVTIMDERFVGSPASFLAAGAHCLARLMLKKGTWSPAHVHYAGYTYSQLYPLVSLIVECCEMPRKHHSAIYDKYNDRRFKLASAYVEAEMRKNFRLPEPAIDRKTTLGQGH

SEQ ID NO: 14199 - DNA, 1461 bp, Candida albicans SC5314
  CDS (1)..(1461): transl_table=12
atgcgatcttataaatcatccataacggatgaaaatgagttgacaaaacaaagacttagagccaaaagtattgccaatttgagcagcaatcacacaacagctgggcaaccatcaacaagctctcaacatagagaggcattgactgatttgacctcacaggagaataaaaatcacccaagagtgaaactaacacaaacaaacaccaatcatcacagaaacagctcaagtagttcgaacaaaatacaaatatatcaacaaatagagcaaaagaaaaccgatatccatcagttcaaaaaaccaagattggagaaggtattactaaatgacgacgacgatgaaaccgatgacgaatttgacgacgaagaagataaagaaaacagatatcatgatctagagttgaatgaagatgacagtaaacatcaactaataagtgaagcatttgaaacaattgatgatcggggaataagtgagggtgaaaatgatacagcgcaagaagcacgtgaaagattagaggaagaaacacaatcacatacacaggatatgagatcaatatatggggttcatgtgcccatgcaaccaatgtggaataatgcgataataaacgagctcaaatacgttatacaaaagtactctcgtaatacgttggacgaaaatgacgaagatacttatgatactaccatggtggcagaatattcaccggaaattttcaattacttgcatgaacttgaaaataagtttacacctgatccaaattatatggatttccaagacgatctaaagtgggagatgcgtgcagtgcttattgattgggtcgtccaagtgcatgctcgattcaacttgttttcagaaaccttgtacttgactgtaaattacattgacagattcttatccaagagaagggtgtcattatccagatttcagttagttggagcagtagcattgtttattgctgccaaatacgaagaaatcaattgtcctacagtccaagaaattgcatacatggcagacaatgcctattcaatcgacgagtttttaaaagccgagagatttatgattgatgtattggaatttgatttgggatggccagggccaatgtcgtttttgagaagaatatcaaaagctgacgattatgattatgaaactagaacacttgccaaatattttcttgaaataactataatggactcaaaatttgttgcttctccaccaagttggttggccgctggagcacattacatatcaagaatactattgggaagaggtgaatggacagaattgcatgttttttatagtggctataccgaaaagcaattgcagccattggcagacgttttgttagagaactgtcgccatgctgaaataaaccataaagccattttcgaaaaatacaaggaaagaaggtatagaaaaagttcactttttgttcaagaatattttcgtcacataatgtcccagagttga

SEQ ID NO: 14200 - protein, 486 aa, Candida albicans SC5314
MRSYKSSITDENELTKQRLRAKSIANLSSNHTTAGQPSTSSQHREALTDLTSQENKNHPRVKLTQTNTNHHRNSSSSSNKIQIYQQIEQKKTDIHQFKKPRLEKVLLNDDDDETDDEFDDEEDKENRYHDLELNEDDSKHQLISEAFETIDDRGISEGENDTAQEARERLEEETQSHTQDMRSIYGVHVPMQPMWNNAIINELKYVIQKYSRNTLDENDEDTYDTTMVAEYSPEIFNYLHELENKFTPDPNYMDFQDDLKWEMRAVLIDWVVQVHARFNLFSETLYLTVNYIDRFLSKRRVSLSRFQLVGAVALFIAAKYEEINCPTVQEIAYMADNAYSIDEFLKAERFMIDVLEFDLGWPGPMSFLRRISKADDYDYETRTLAKYFLEITIMDSKFVASPPSWLAAGAHYISRILLGRGEWTELHVFYSGYTEKQLQPLADVLLENCRHAEINHKAIFEKYKERRYRKSSLFVQEYFRHIMSQS

SEQ ID NO: 14201 - DNA, 1479 bp, Candida albicans SC5314
  CDS (1)..(1479): transl_table=12
atgccacaagtcactaaaactaataatgaaaatgagtttagacttactagatcaaaagtacagcatcaagagtcgataagtaccatcaaaaataccaccatatccaattctcagcataaacaacaaacacaacaacaaatttcatcaccacctcaagtctctgtaacatcatctgaaggagtttcacatgtcaatacacgtcaatatttgggtgatgtttcaaatcaatacataacaaatgccaaaccaacaaataaaagaaaaccattgggtggagacaatgcccctctacaaaaacaacagcatagaccatctagaccaatacccattgccagtgataacaacaataatggtagtaccagtagcagtagtaacagtagcaacaacaataacaacgacgcaaatagactagcatctttggcagttccatctcgattaccccaaaaacgacaagctactgaatcgtcgacaaatttagtagagaaattaagagtaccacaaccagaagtaggggaaagaagtcagtcataccataagaaatcacgtttaattgattatgaatggcaggatttggatgaagaagatagtgacgaccaattaatggttagtgaatatgttaacgaaatattttcgtactattacgaattagaaacacgaatgttacctgatccgcaatatcttttcaaacaaacattgttaaaaccaagaatgagatcgatattggttgattggcttgttgaaatgcatttaaaattcaagttattacctgaatcactttttttggcagtcaatgtaatggatagattcatgtctgttgaagtggttcaaatagataaattacaattattggctacagcagctttatttactgctgccaaatatgaagaagtattttctcccctggttaaaaattatgcatatttcactgatggttcatatactccagaagaagtggtacaagcagaaaaatacatgcttaccattcttaactttgatttgaattaccccaatccaatgaatttcttgaggagaatttctaaagctgatgattatgatgtccaatcaagaacgctaggaaaatatcttttggaaatcactatagttgattacaaatttattggtatgagaccatctttatgttgtgccctggccatgtatttagcaagactaatattgggcaaattgccagtttggaatgggaatttgattcattatagtggaggttatagaatcagtgatatgagagaatgtatcgaattaatgtttcaatatcttattgctccaatagaacatgatgaatttttcaaaaaatatgccatgagaaaatttatgagagcaagtactctttgtcgaaattgggctaaaaaattccaagcatcaggaagagatttgtttgatgaacgattatcgacccataggctaacattagaagatgatgacgaagaagaagaaatagtggtagcagaagcagaagagtaa

SEQ ID NO: 14202 - protein, 492 aa, Candida albicans SC5314
MPQVTKTNNENEFRLTRSKVQHQESISTIKNTTISNSQHKQQTQQQISSPPQVSVTSSEGVSHVNTRQYLGDVSNQYITNAKPTNKRKPLGGDNAPLQKQQHRPSRPIPIASDNNNNGSTSSSSNSSNNNNNDANRLASLAVPSRLPQKRQATESSTNLVEKLRVPQPEVGERSQSYHKKSRLIDYEWQDLDEEDSDDQLMVSEYVNEIFSYYYELETRMLPDPQYLFKQTLLKPRMRSILVDWLVEMHLKFKLLPESLFLAVNVMDRFMSVEVVQIDKLQLLATAALFTAAKYEEVFSPSVKNYAYFTDGSYTPEEVVQAEKYMLTILNFDLNYPNPMNFLRRISKADDYDVQSRTLGKYLLEITIVDYKFIGMRPSLCCASAMYLARLILGKLPVWNGNLIHYSGGYRISDMRECIELMFQYLIAPIEHDEFFKKYAMRKFMRASTLCRNWAKKFQASGRDLFDERLSTHRLTLEDDDEEEEIVVAEAEE

SEQ ID NO: 14203 - DNA, 2223 bp, Ustilago maydis 521
  CDS (1)..(2223)
atggctcaacctgccgtcagacaacctaccgtgacaaggtcacgcatcagccgaccaggaggcatcccagcttctcgtagcggcgaccgcatccatctcacagaagctgcctccacaagtcatctggcaaaagccaagtcaacaaaattggtcggcccctctaccgcaggtaaactccgagccgattccagatccatgccacaacgcgctgccctttctgacgtcagtaatcgtgctggcgtcgccagagccaatgcactagcagatggcgccgtcaagctggcgcccggccacaatggcctgcgctctcaacacacaaaaagcatgacccgtctccgcgacgcccgttcgcgatccacgtccgagcagagactctctggcccaacacgctctgtctcggaacaacgtgactgtgcaccagccgctgccgagtctatgcatgtggaggcgtcacaactcctcccacccttccagagctccgcttcagtcaaggtgggcatcagcgacgaagcaggaagcagcaggctgcacgaagacgcagacatccgcgacctcgccggctcgcagcacagtgaccatgtcgaagaggacgagatgtcagatgtcgcctctacttcgagcagcgacgacgataccgcagaggacatcggcgtagacaaggccaactggctcgattcggaacgactcgatgccgagggtttggtctcgttacatccggagctggaggaggccgcgcgacgcaaggtggccttgatcaagtctcgctaccaggaggaagtcattcagcctcgtgcggcgcgcgcgcaagcacaacatgcagaagcagtcgccgccggtcagctctcggctgagctggctgcgcacgaagacgagctgatcgtcatggggctcgatcccgaggaggtacgcgacacgagtatggtggccgagtactcgaatgagatctttagctacatggctcggtgcgagcgcgagaccatggccaacccgaattacatggagtttcagagcgagattcactggcacatgcgtgctacgctcgtcgactggctcttgcaggtgcacatgcgctaccacatgctgccagagacgttgtggattgccatcaatgtggtcgaccgcttcctgagcgtgcgcgtggtcagcctggccaagctgcagctcgtcggtgtcacggccatgtttattgcagcaaagtacgaagagatcctggcgcctagcgtcaaggagtttgtctacatgaccgagggtggctactcgcaagaggagatcctcaagggcgagcgcatcatcctctcgacgttggactttaacatttcgtcctactgctcaccttactcttgggtgcgaaagatctccaaggcggacgactacgacattcgcacccgtaccctgtccaagttcctgatggagctggcgctgctggatcatcgcttcctgcgtgctcggcccagtcttgtggccgctgtgggcatgtttttggccaaaaagatgctgggaggcgagtgggatgacgcctttgtctactactctgactttaccgaagagcagctggtccccggcgcgaatctattactcgagcgtttgctggaccaaggctttgaggagcagtttgtctaccgcaagtactcgaacaaaaagtttctccgggccagcgtctttgcgcgtgattgggccttccagaaccacagcgcactactcgccgctgctgcagcagcggcagggtcgactcaagcagtgcactcttgcttggttacaacgactgtgcagcacagatttcgcgagcagagaacctatgtgcagagaagaagagcgggtgcgagtgtgtggcgcgatgagcggaaggatccgcgcggctctacatttggaagcgggtgcggagagtggaaagacaaagatcggatcgaagcagacgtgaagcgcgaagcgagtcgaatgaaacttgttcacgcggtctctgacatggccaagctgtacttgcacactcatcctcatcactgcagccacaaaagggtacatgcatggtatgagagcgtgtctgtcatgtgcattcacgattttcgcagcgctcagcttgcttggttgaggcttgaacctgtgatcgcgcgctgcgaagctcaagccattcacgatcgtgcctgctcgcaatcactatggccgactcaacgctcttgcctgacgagaaacggaacgcacgacgagaagctgagttgcaactcataa

SEQ ID NO: 14204 - protein, 740 aa, Ustilago maydis 521
MAQPAVRQPTVTRSRISRPGGIPASRSGDRIHLTEAASTSHLAKAKSTKLVGPSTAGKLRADSRSMPQRAALSDVSNRAGVARANALADGAVKLAPGHNGLRSQHTKSMTRLRDARSRSTSEQRLSGPTRSVSEQRDCAPAAAESMHVEASQLLPPFQSSASVKVGISDEAGSSRLHEDADIRDLAGSQHSDHVEEDEMSDVASTSSSDDDTAEDIGVDKANWLDSERLDAEGLVSLHPELEEAARRKVALIKSRYQEEVIQPRAARAQAQHAEAVAAGQLSAELAAHEDELIVMGLDPEEVRDTSMVAEYSNEIFSYMARCERETMANPNYMEFQSEIHWHMRATLVDWLLQVHMRYHMLPETLWIAINVVDRFLSVRVVSLAKLQLVGVTAMFIAAKYEEILAPSVKEFVYMTEGGYSQEEILKGERIILSTLDFNISSYCSPYSWVRKISKADDYDIRTRTLSKFLMELALLDHRFLRARPSLVAAVGMFLAKKMLGGEWDDAFVYYSDFTEEQLVPGANLLLERLLDQGFEEQFVYRKYSNKKFLRASVFARDWAFQNHSALLAAAAAAAGSTQAVHSCLVTTTVQHRFREQRTYVQRRRAGASVWRDERKDPRGSTFGSGCGEWKDKDRIEADVKREASRMKLVHAVSDMAKLYLHTHPHHCSHKRVHAWYESVSVMCIHDFRSAQLAWLRLEPVIARCEAQAIHDRACSQSLWPTQRSCLTRNGTHDEKLSCNS

SEQ ID NO: 14205 - DNA, 1440 bp, Cryptococcus neoformans var. neoformans B-3501A
  CDS (1)..(1440)
atggcttcccgaaatcccgtcgtcacccgtcgagctgccactcgctctcgaaatgatgaaaacgctgctcctcaacaatcagtacgaaccaagccctcaatctcccaccttggccctgcttccaagactgcggctgtcaatgtctccgttgctgctggcaagaagcctgtcgctgtcaaggttggcgccaagaggacagctttgggaggcgtggttgttaacggtaaggaagaaactgaagccgggaagaagcctttgaaggcgagtggcaagactgtcaccgaagctagacagcctcttgcatcccgacagaacaatgctcagccgacacgaccgattgccgccatccctcaccgatccaaagccactcccgccaacgtctatgctccagtagaggctcctgctaagcttactgtcgaggaagatatgcagatggagatcgatgctcgacgatctcagcccgtctccaacgctgctgacttcgccactgtcgatgaggagctcctcgatgacgaatccgaagaggatgacatggaggaagaggatgaagaagattggctgaggatgtctgaagaggagatggtgaaggcgcaagaacaactggacgttgtgcaggcgacttttaaggatgacgttgacatgtttgacaccactatggttgccgagtacgcggacgagattttcgagcacatggagagacttgaggaaagtgttatgcctaaccctcgctacatggacttccagactgagattgagtggaccatgaggacaacacttattgattggcttcttcaagtgcaccttcgttatcacatgctccccgagactctttggatcgctgtcaacattgttgaccgattcctttccacccgagtggtctcccttgtcaagcttcaacttgtcggtgtcaccgccatgttcatcgctgccaagtatgaagagatcctcgctccttctgttgaggaatttgtctacatgactgagaatgggtacaccaaggatgagatcctcaagggcgaaagaatcattctccaaaccctcgatttcaccatctcatcttactgttccccgtactcatgggtcaggcgaatttccaaggccgacgattacgacgttcaaactcgaacactgagcaagttcttgatggaggtcacccttttggaccacaggttcctcagatgtaagcctagcatgatcgctgccatcggaatgtatctcgccaggaagatgttgggcggtgactggaatgacgctttcatctactactccaactttaccgaatctcaactcatcactggcgcatctcttttgtgcgagcgacttattgagcctgactttgagtccgtgtacgtttacaagaagtacgccaacaagaagttcttgcgagcgtctacctttgcgcgagactgggctttgaccaacgccgccaactcatcatga

SEQ ID NO: 14206 - protein, 479 aa, Cryptococcus neoformans var. neoformans B-3501A
MASRNPVVTRRAATRSRNDENAAPQQSVRTKPSISHLGPASKTAAVNVSVAAGKKPVAVKVGAKRTALGGVVVNGKEETEAGKKPLKASGKTVTEARQPLASRQNNAQPTRPIAAIPHRSKATPANVYAPVEAPAKLTVEEDMQMEIDARRSQPVSNAADFATVDEELLDDESEEDDMEEEDEEDWLRMSEEEMVKAQEQLDVVQATFKDDVDMFDTTMVAEYADEIFEHMERLEESVMPNPRYMDFQTEIEWTMRTTLIDWLLQVHLRYHMLPETLWIAVNIVDRFLSTRVVSLVKLQLVGVTAMFIAAKYEEILAPSVEEFVYMTENGYTKDEILKGERIILQTLDFTISSYCSPYSWVRRISKADDYDVQTRTLSKFLMEVTLLDHRFLRCKPSMIAAIGMYLARKMLGGDWNDAFIYYSNFTESQLITGASLLCERLIEPDFESVYVYKKYANKKFLRASTFARDWALTNAANSS

SEQ ID NO: 14207 - DNA, 1305 bp, Dreissena polymorpha
  CDS (1)..(1305)
atgaatacaagagcagcgtctgctaatttagctggcaggatggcactgcagcaaatcaacagtgacaatattgaccaaattcctggcaaggcccaacttctgcaaagacctcaaacctcacacctaatgcaaagaaatacccttagtgacattggaaatcaagtatctgcaatcacaatatcagatgccagtaaaaagggtcctattaaaaaagaaattgtgcaagtaaatcccagacagcagaaagcattgaccaagaccaaagcaactacatccctcaaagcattggcagagaagaaggaaaccaaaaaggagcatgatgaattccatttcgttgagccttcatttccttcgcgaattccagtcccaacagccactgttcacccattgccatctgcacatgtgcctatggacacaagtgatgcgggaaaagatgcattttcgaaagctttgctaaatgtacagggcattgatgcaaatggcaggggaaacccccaactagtcagtgaatatgtcaacgatatatacgagtacatgagaatattagagaaaaagtacccaattgcggacagctacttagaaaagcaagaaatctccgggaagatgcgtgccattctcattgactggttgtgccaagttcatcacagatttcatcttctccaagaaacactctacctgactgttggcataatcgatagatttctccaggaatctcctgtgaccaaaaacaaattgcagttggtcggtgtcacatccatgttgattgcctccaaatatgaagagatgtacgcacctgaagttgcagactttgtttatattacagacaatgcttacactaaaaaggaaattttggaaatggaacaaactatcttacggacattaaactttagttttggaaagccattgtgtttgcatttcttgaggaggaattcaaaggctggtcaggttgatgccagcaagcatacgctggccaagtacctgatggagttgacgatagtggagtacgatatggtgcaatatctcccttctcaaatagctgccgcagccctatgtctttctatgaaacttctgggcgactgtaaatggacggagacattggcgcactatagctcttatacagaggaagaacttgtgccaaccatgcgtaaacttgccagtctagtcatgaaacaggaggattccaaactcaaactcactgccataaggaccaaatattcaagttcaaaattcatgaagataagcaccataccagctttgaagtctccactggtgcaggaacttgcaggtgcttcagactgctcctaa

SEQ ID NO: 14208 - protein, 434 aa, Dreissena polymorpha
MNTRAASANLAGRMALQQINSDNIDQIPGKAQLLQRPQTSHLMQRNTLSDIGNQVSAITISDASKKGPIKKEIVQVNPRQQKALTKTKATTSLKALAEKKETKKEHDEFHFVEPSFPSRIPVPTATVHPLPSAHVPMDTSDAGKDAFSKALLNVQGIDANGRGNPQLVSEYVNDIYEYMRILEKKYPIADSYLEKQEISGKMRAILIDWLCQVHHRFHLLQETLYLTVGIIDRFLQESPVTKNKLQLVGVTSMLIASKYEEMYAPEVADFVYITDNAYTKKEILEMEQTILRTLNFSFGKPLCLHFLRRNSKAGQVDASKHTLAKYLMELTIVEYDMVQYLPSQIAAAALCLSMKLLGDCKWTETLAHYSSYTEEELVPTMRKLASLVMKQEDSKLKLTAIRTKYSSSKFMKISTIPALKSPLVQELAGASDCS

SEQ ID NO: 14209 - DNA, 1738 bp, Candida albicans
  CDS (164)..(1687): transl_table=12
tctaacaactatcaacaacagagtcacaccaacacgttcattacctttaggtttaattgatagaaatagagtctgtattcagtcgattgattttggtgtttttatttttatttttattttttttttgaagacacgctcatttattccagaggttcacaacattatgcgatcttataaatcatccataacggatgagaatgagttgacaaaacaaagacttagagccaaaagtattgccaatttgagcagcaatcacgcaacagctgggcaaacatcaacaagctctcaacatagagaggcattgactgatttgacctcacaggagaataaaaatcacccaagagtgaaactcacacaaacaaacaccaatcatcacagaaacagctcaagtagttcgaacaaaatacaaatatatcaacaaatagagcaaaagaaaaccgatatccatcaattcaaaaaaccaagattggagaaggtattactaaatgacgacgacgatgaaaccgatgacgaatttgacgacgaagaagataaagaaaacagatatcatgatctagagttgaatgacgatgacagtaaacatcaactaataagtgaagcatttgaaacaattgatgaccggggaataagtgaaggtgagaatgatacagcgcaagaagcacgtgaaagattagaggaagaaacacaatcacatacacaggatatgagatcgatatatggggttcatgtacccatgcaaccaatgtggaataatgcgataataaacgagctcaaatacgttatacaaaagtactctcgtaatacgttggacgaaaatgacgaagatacttatgatactaccatggtggcagaatattcaccggaaattttcaattacttgcatgaacttgaaaataagtttacacctgatccaaattatatggatttccaagacgatctaaagtgggagatgcgtgcagtgcttattgattgggtcgtccaagtgcatgctcgattcaacttgttttcagaaaccttgtacttgactgtaaattacattgacagattcttatccaagagaagggtgtcattatccagatttcagttagttggggcagtagcattgtttattgctgccaaatacgaagaaatcaattgtcctacagtccaagaaattgcatacatggcagacaatgcctattcaattgacgagtttttaaaagccgagagatttatgattgatgtattggaatttgatttgggatggccagggccaatgtcgtttttgagaagaatatcaaaagctgacgattatgattatgaaactagaacacttgccaaatattttcttgaaataactataatggactcaaaatttgttgcttctccaccaagttggttggccgctggagcacattacatatcaagaatactattgggaagaggtgaatggacagaattgcatgttttttatagtggctataccgaaaagcaattgcagccattggcagacgttttgttagagaactgtcgccatgctgaaataaaccataaagccattttcgaaaaatacaaggaaagaaggtatagaaaaagttcactttttgtacaagaatattttcgtcacataatgtccagagttgatctaaagacaagtttccaacaatgcggtactttacattttattcaatctagccaaaatcattaattctatgcattggttaaatactgattagttgaagctgttcattacagtttt

SEQ ID NO: 14210 - protein, 507 aa, Candida albicans
MRSYKSSITDENELTKQRLRAKSIANLSSNHATAGQTSTSSQHREALTDLTSQENKNHPRVKLTQTNTNHHRNSSSSSNKIQIYQQIEQKKTDIHQFKKPRLEKVLLNDDDDETDDEFDDEEDKENRYHDLELNDDDSKHQLISEAFETIDDRGISEGENDTAQEARERLEEETQSHTQDMRSIYGVHVPMQPMWNNAIINELKYVIQKYSRNTLDENDEDTYDTTMVAEYSPEIFNYLHELENKFTPDPNYMDFQDDLKWEMRAVLIDWVVQVHARFNLFSETLYLTVNYIDRFLSKRRVSLSRFQLVGAVALFIAAKYEEINCPTVQEIAYMADNAYSIDEFLKAERFMIDVLEFDLGWPGPMSFLRRISKADDYDYETRTLAKYFLEITIMDSKFVASPPSWLAAGAHYISRILLGRGEWTELHVFYSGYTEKQLQPLADVLLENCRHAEINHKAIFEKYKERRYRKSSLFVQEYFRHIMSRVDLKTSFQQCGTLHFIQSSQNH

SEQ ID NO: 14211 - DNA, 1926 bp, Aspergillus oryzae
  CDS (1)..(1926)
atggatgcaaagccccagcgaattcgcgtccgtggggacgagaatgctgccttccctctgactagcaaaacggttcatcagaaaaacaaatcgacccccgccttgtccactatgttccagaatggcgtgacgaagaatgggccaagaagagccgcttttggagatgtcagcaatactgtgaaaaccgtccaaggcattcgggatgacatctctgttgcagcaaagaaacagatcaagccattggagaagccttccgtgcaggccacggagaggaaatcctctgtcttggcccaacctgcccagcggccaatgtcggtggcgggagtcaaaggcctatcgagcaatgtgacgacttccaaacccctggagcccatcggaaagtcgatcggcgtgccgcagcataccgccaacgcccgaaaggccctgaacaagcgaggaacagtgttcaaagatcacatggaaccattgacggaaaaacgcgaacttacatccaaggaaacaacacaaactaaggaagggattactgggggccaactcgcgcattcgtctacggcgccgtcgcagctcagcagcctgaaggaaaaggacgtggtcaacgagggatcaaatgatgagtcggagacccatgacgaacattccattgtcagctctgaagttgatggagaggagaaggacgcacccaagctcgacgaggatgtttgtaaggtccagggtattaaggaactcagggaagcctctgaacccggtacggcaacggatgccgacggctcagaccgcgctgtgaagccacaacgtgtatctgttcctggcgcacatatgtctcatgaacatgtgcccgcccactcggagccggaagagtcctgggacgacgaggatgacgaaaatgaagaagaggatgagtatatcactgctcgctcctatcgatcccgtggcgaaaacacaactggcgcgactactacaatactctttccgaaatatacgcagcaagtgagacgggagttggcactggccaagcaaatcgtcgaggcaacacggacagtggaggatattgaggacgaatattgggatacgagcatggtcgcggaatatagtgaagatatattcgattacatgcgggaacaggagatcaaaatgctgccaaacgcgcactatatggacaaccaagcggaaatccaatggtctatgcggtctgtcctgatggactggcttgtccaggtccaccatcggttctctctgcttcctgagacccttttcttgtgtgtcaactatatcgaccgcttcctgtcctgcaagatagtctctctaggcaaattgcagcttgttggtgctaccgcgatcttcattgctgccaagtacgaagagataaactgtccttccgtgcaagagattgtttatatggtcgacggaggctacacagccgatgagattctcaaggcggaacgcttcatgctcactatgctgcagttcgagctcggatggcccggtcccatgagctttctgcggaagatcagcaaagctgatgactacgacctggagacccggacactggcgaagtatttcttggagattaccatcatggatgaacgcttcgtcggatgcccaccaagctttacagctgctggcgctcattgtcttgcaaggatgatgttgagaaaagggaactggacgcctgcccatgtccattacgcgggatacacctattcacagctttacccgcttatttccctcatggtggaatgctgcgagatccctcgcaagcaccatgcggctatttatgaaaagtacactgacaaacggttcaagcgcgcttcgcttttcgtcgaggctgaaatgagaaaaggctttcatctgccggaggtcactcgggaaaagagtctttgcaatccgccatctcttgacgccggacatcagtggaagcgcgcataa

SEQ ID NO: 14212 - protein, 641 aa, Aspergillus oryzae
MDAKPQRIRVRGDENAAFPLTSKTVHQKNKSTPALSTMFQNGVTKNGPRRAAFGDVSNTVKTVQGIRDDISVAAKKQIKPLEKPSVQATERKSSVLAQPAQRPMSVAGVKGLSSNVTTSKPLEPIGKSIGVPQHTANARKALNKRGTVFKDHMEPLTEKRELTSKETTQTKEGITGGQLAHSSTAPSQLSSLKEKDVVNEGSNDESETHDEHSIVSSEVDGEEKDAPKLDEDVCKVQGIKELREASEPGTATDADGSDRAVKPQRVSVPGAHMSHEHVPAHSEPEESWDDEDDENEEEDEYITARSYRSRGENTTGATTTILFPKYTQQVRRELALAKQIVEATRTVEDIEDEYWDTSMVAEYSEDIFDYMREQEIKMLPNAHYMDNQAEIQWSMRSVLMDWLVQVHHRFSLLPETLFLCVNYIDRFLSCKIVSLGKLQLVGATAIFIAAKYEEINCPSVQEIVYMVDGGYTADEILKAERFMLTMLQFELGWPGPMSFLRKISKADDYDLETRTLAKYFLEITIMDERFVGCPPSFTAAGAHCLARMMLRKGNWTPAHVHYAGYTYSQLYPLISLMVECCEIPRKHHAAIYEKYTDKRFKRASLFVEAEMRKGFHLPEVTREKSLCNPPSLDAGHQWKRA

SEQ ID NO: 14213 - DNA, 1449 bp, Aspergillus oryzae
  CDS (1)..(1449)
atgaacgagaatgacgagaatagaccttcgacgcgtctgacacgggcgaaggctgccgctctttccgcaggtgacgtctccactgccgccactaagaaacctcttgagtccaagaaagccgctacctcgaccgcgaccgctggtaccacaaggaagcgcgctgctttgggtgatgtcagcaatgtcaccaagggtgagaacggcgccgcgaaggagggaaagaagccagccggggccaaggtcggcttgacttcgaaagccacaatgcaagctggcggtgttgcgaagctcacccgcaccaactcgtcgcgtactactgccctgacaaacaagaccaccaacacgaagaagcctacggaggacaaggagaaacgctcgggacccggatctatcaaggatagtgcacagaagcgccaaaaaaccacgaaagacaacgcgttggtcgaggagccaccccgcaagaaggtggaagtggaaaagaagcttaccgagaagaagcttgtcgctgaagaggctcccgccaaggaaaatgtcgaagcccctgtcgagccaaagacgctgcagaagccttctcaagatctcgtggaggatttggataccgaggatttggacgaccccttgatggtggcagaatatgtggtggagattttcgaatacatgaaggaccttgaactggagacactacctaacccccattacattgaccatcaacctgatctggagtggaagatgcgtggtatcctggttgactggctcatcgaggttcacactcgtttccgcctgttgcctgaaacccttttcctcgctgtcaacatcatcgaccgtttcctgtcggccgaggtggtggctctggatcgtctgcagcttgttggagttgctgctatgttcatcgcgtctaaatacgaggaggtcctctcgccgcatgtggccaatttcagtcacgtcgccgacgagactttcaccgacaaggagattttggacgctgagcgccacatcctggcgactctcgagtacaacatgagctatcccaatccgatgaacttcctgcgtcgtatttccaaggcggacaactatgatatccaaacgcgtacccttggaaagtaccttatggaaatcagtctgctagatcaccggttcatggcttaccgtcaaagtcacgtgtcagctgccgctatgtatctggcacgtctcattctggagcgtgggccttgggatgcaaccctggcttattacgccggatatgatgaagagcagatcgaccctgtcttccgtctaatgatcgactaccttcaccgcccggtctgccacgaggcgttcttcaagaaatatgccagcaagaagttcctcaaagcgtccatcttgacccgccaatgggccaagaagtatcaccacctgtacatcgacagctccctctcagaaccgtacaactatatcaaggatcacgaataa

SEQ ID NO: 14214 - protein, 482 aa, Aspergillus oryzae
MNENDENRPSTRLTRAKAAALSAGDVSTAATKKPLESKKAATSTATAGTTRKRAALGDVSNVTKGENGAAKEGKKPAGAKVGLTSKATMQAGGVAKLTRTNSSRTTALTNKTTNTKKPTEDKEKRSGPGSIKDSAQKRQKTTKDNALVEEPPRKKVEVEKKLTEKKLVAEEAPAKENVEAPVEPKTLQKPSQDLVEDLDTEDLDDPLMVAEYVVEIFEYMKDLELETLPNPHYIDHQPDLEWKMRGILVDWLIEVHTRFRLLPETLFLAVNIIDRFLSAEVVALDRLQLVGVAAMFIASKYEEVLSPHVANFSHVADETFTDKEILDAERHILATLEYNMSYPNPMNFLRRISKADNYDIQTRTLGKYLMEISLLDHRFMAYRQSHVSAAAMYLARLILERGPWDATLAYYAGYDEEQIDPVFRLMIDYLHRPVCHEAFFKKYASKKFLKASILTRQWAKKYHHLYIDSSLSEPYNYIKDHE

SEQ ID NO: 14215 - DNA, 1397 bp, Allium cepa
  CDS (118)..(1335)
cttactgtttcattctttttttttctttctcttatcgtcattgtttatcactctcttcccttttcttcttcactgaagaattagagtgataactttctcctagatcgtttaaagctaatggcaggtgctgatgaaaatcatggagctgttaagcttgcaaattttagagaaactacaaacagaagagcattaaaggacattaagaactttgttggcgcgccttcttttccttgtgccgctaataagagacaattaaaagaagtcgtatgtggcaacaatgatagtgttatacctcgaagaccaataacaaggcaatttgcttctactttagcaagcaaatcacaacaaagtcatggggaaactagtaataaacacggtcagattactgggaatgagaagcacaatcccattattattgatgaggatgtgccaatggttgaagaatcagaagagatggaggagtgtgagctcgttgaggaaattacgatggaagatattgtgattgacagtgcacaagatattgatataggtgatgtaggaaatccactagctgttgtggattatgttgatgatatatacaactactacaggcgagttgaggctagcagttgtgttcatcctgattacatgtctaaccaatttgacattaacgacaaaatgagagctattcttattgactggctcgtagaggttcactacaagtttgagctgatggaggaaacgctgtaccttactgtgaacataatagatagatttctatcaaggcaagcagttgttaggaagaagcttcaattagtaggagttactgccatgcttcttgcttgcaaatatgaagaagtatcggttccagtagtcgatgacttagttaccatatccgatcgtgcatatacacgaaaagaagtgcttgacatggaaaaatcgatagtgaaaactttgcagttcaacacgtctgtgccgaccccgtttgtatttttgagaaggttccttaaggcagctggttctgaaaagaagctggagctgctttcatccttcattatagagcttagtcttgttgagtatcaaatgcttaagtttcaaccttcattgctggctgccgccgccatatacactgctcaatgcagtctcaaaggattcaagttttggacaaggacttgtgagcagtacaccatgtatactgaagatcagcttctggaatgctcgaagatgatggtgggatttcatagaaatgcaggatcaggaaaattaacgggggtgcatagaaaatacagcacttcaaaatttggttttgcagggaagtcgtatccagcacttttcttgttggataacagactttgaaccaggatttcttcttgctgacagattatcaacaacgttcgtttaaaaaaaaaaaaaaaaaa

SEQ ID NO: 14216 - protein, 405 aa, Allium cepa
MAGADENHGAVKLANFRETTNRRALKDIKNFVGAPSFPCAANKRQLKEVVCGNNDSVIPRRPITRQFASTLASKSQQSHGETSNKHGQITGNEKHNPIIIDEDVPMVEESEEMEECELVEEITMEDIVIDSAQDIDIGDVGNPLAVVDYVDDIYNYYRRVEASSCVHPDYMSNQFDINDKMRAILIDWLVEVHYKFELMEETLYLTVNIIDRFLSRQAVVRKKLQLVGVTAMLLACKYEEVSVPVVDDLVTISDRAYTRKEVLDMEKSIVKTLQFNTSVPTPFVFLRRFLKAAGSEKKLELLSSFIIELSLVEYQMLKFQPSLLAAAAIYTAQCSLKGFKFWTRTCEQYTMYTEDQLLECSKMMVGFHRNAGSGKLTGVHRKYSTSKFGFAGKSYPALFLLDNRL

SEQ ID NO: 14217 - DNA, 1410 bp, Glycine max
  CDS (1)..(1410)
atggataaagtaaatagagtttgtgccaaagatgaagagcgtccactccgaatcaccagagcaagagctagagccttgagagggattactccctactcaagaccctccttaaaaaatgagcagaaaaacgtgcttcgagctaattccaaaagagcagcaagttctggaaacaaaacttttgcggttgttcctgctgttgtccagcaaaagggaagggcagtgctttcagatatatcaaacatgtgtgcaaaaccacatgataagtgtactaaggcatcaaaatttcaggccaaaggagtttgtacaaagaaaaacaccaagcttgcagcctcaagtgtttccactgacgtttcatcctcacatgacgatgttagagcaaagttagctgaagaattatccacaataaagatggttgaatcaaatgacaccttaagagaaggtgtaacagcagacacctcactttcaatgcaaaactctgtgaaatctgatgaactccggaactctccaaacaaagacatagatataatttgtgagaagctgggagcctcagactccctgactattgtggacattgattcagagttaaaggatcctcaactgtggagtttttatgcccctgacatatacagcaatattcgagtcacagagcttcaaaggaaaccattgaccaactacatggacaagttgcagaaagatattaatccaagcatgcgtggaattctggttgattggcttgtggaggtttctgaggaatacaagttggttccagacactctttacctgaccgtgaacctcattgatcggtatctctcaacaagactcattcagaagcaaaagctccagttgctcggtgttacttgcatgttgattgcatcaaaatatgaagagatgtgtgcacctcgagtggaggaattttgcttcatcacagataatacatacacaaaagaagaggtattgaaaatggagagagaagtactgaatcttgtgcattttcagttatctgtccccacaatcaaaacttttctcaggagattcatccaagcagcacaatcttcttacaaggctccttatgttgaactggaattcctggcaaattatttagcagagcttgctcttgttgaatgcagcttcttccagtttctaccttcccttatagctgcatctgctgtgttccttgccaaatggaccctgaatgagtcagaacatccatggaatccaactctggagcactatacaaaatacaaagcttcagacctcaaaactgttgttcttgcactgcaagatctgcaacttaataccaaaggatgcttcctgaatgctgtccgcgagaagtataagcaacagaagttcaattgtgtggcaaacttgtctccaaaatcggtgcagtcactcttccagaaccaagtgtaa

SEQ ID NO: 14218 - protein, 469 aa, Glycine max
MDKVNRVCAKDEERPLRITRARARALRGITPYSRPSLKNEQKNVLRANSKRAASSGNKTFAVVPAVVQQKGRAVLSDISNMCAKPHDKCTKASKFQAKGVCTKKNTKLAASSVSTDVSSSHDDVRAKLAEELSTIKMVESNDTLREGVTADTSLSMQNSVKSDELRNSPNKDIDIICEKLGASDSLTIVDIDSELKDPQLWSFYAPDIYSNIRVTELQRKPLTNYMDKLQKDINPSMRGILVDWLVEVSEEYKLVPDTLYLTVNLIDRYLSTRLIQKQKLQLLGVTCMLIASKYEEMCAPRVEEFCFITDNTYTKEEVLKMEREVLNLVHFQLSVPTIKTFLRRFIQAAQSSYKAPYVELEFLANYLAELALVECSFFQFLPSLIAASAVFLAKWTLNESEHPWNPTLEHYTKYKASDLKTVVLALQDLQLNTKGCFLNAVREKYKQQKFNCVANLSPKSVQSLFQNQV

SEQ ID NO: 14219 - DNA, 1823 bp, Scutellaria baicalensis
  CDS (1)..(1491)
  misc_feature (1675)..(1675): n is a, g, c or t
atggcgagttctgctggcgttaggaggccaacgacgtcgtctttggccaagcgccatgcttcttccgcgtcggataatgtcgggaaggtggcgtcgtccgcttccgcctccaagaaacgcccggcgcttgctaatgtcaccaaccagaggcatggaaccggttctgctaatgcgggtcgggcccctttgcccgaatcatccaaaattgcgccatgtacaaccaaaatcgtaagcatcaagaagggaccttcggcttccacaaattccggcttcccaggagctatcctgcccacgtcctcctctgtaaaacagaatattgttgcagttggaagatctacattcatcccaaaaagtgatgttgtgcttcccaagacacttgctgccccggtttcatgcagcatggatgtgtctccagataaatcagattcactctctgtttccatggatgaatccatgtccacatgtgattccttgaagagtcctgatgtcgaacatgtggactatattgatgtagctgcagttgattccattgagaggaaggcatcaaacatgctttgcatttctgaccatatggaaattgcagggaatctatgcaagagagatgctctggcatcattagaatcaggggacaagattgtagatgtcgatgagaatctagacgacccacagttatgtgcaaccattgcttgtgatatctacaaacacttgagagcatcagaggcaaagaaaaggccagctacaaacttcatggaaagagtccaaaaggatatcaatgcaagcatgcgcgctattctcattgattggcttgttgaggtagcggaggaatacaggctcgttcctgacacattgtatctaactgttaactatatagatcgttatctttctggaaatgtcatggacaggcaaaggttacaattgcttgggatagcctgcatgatgattgcatcaaaatatgaagagatttgtgcacctcaagtggaagagttttgctacataacagacaacacatactttaaggacgaggttttggaaatggaatctgctgttttgaattacctaaaatttgaaatgacagccccaacagcgaaatgtttcttaaggaggtttgttagggctgcacaaggtgttaatgagactccattactccagtttgagtgcttggctaactacataactgagctatctctcctagagtatagtatgctgtgttttgccccatcattgatagcagctgcatcaattttcttggccagatttattcttcttccttccaagaggccttggaatcatacattgagacattataccctctaccagccctatgatttacgtgattgtgtcttagcattacatgggttttgctgcaacagtcacaattctagtttacctgcaattcgggagaagtacagtcagcacaagtacaaatttgttgcaaaaaaatactgccctctatctatacctccagaatacttccacaatgtgagcagctagtatcacaaacaatgctctactgttccaatgctccgttggatggggtttctttgcacttcatgtggggttgatggctggctgcccgatgaaacaaaccaagtcttaccatttcagcccctcttgatatcttcactcacattcaatttttcttgccaagactaggtggagaggtacgaggggtggngtacccattatcttttttaggtcgattcgttatcgatgattcatatctcgatgaccccttgctatcttgtaactcagttttagacttaacatcatcagttcatgtatagatctgcccttgatcaaaaaaaaaaaaaaaaaaaaaaaaa

SEQ ID NO: 14220 - protein, 496 aa, Scutellaria baicalensis
MASSAGVRRPTTSSLAKRHASSASDNVGKVASSASASKKRPALANVTNQRHGTGSANAGRAPLPESSKIAPCTTKIVSIKKGPSASTNSGFPGAILPTSSSVKQNIVAVGRSTFIPKSDVVLPKTLAAPVSCSMDVSPDKSDSLSVSMDESMSTCDSLKSPDVEHVDYIDVAAVDSIERKASNMLCISDHMEIAGNLCKRDALASLESGDKIVDVDENLDDPQLCATIACDIYKHLRASEAKKRPATNFMERVQKDINASMRAILIDWLVEVAEEYRLVPDTLYLTVNYIDRYLSGNVMDRQRLQLLGIACMMIASKYEEICAPQVEEFCYITDNTYFKDEVLEMESAVLNYLKFEMTAPTAKCFLRRFVRAAQGVNETPLLQFECLANYITELSLLEYSMLCFAPSLIAAASIFLARFILLPSKRPWNHTLRHYTLYQPYDLRDCVLALHGFCCNSHNSSLPAIREKYSQHKYKFVAKKYCPLSIPPEYFHNVSS

SEQ ID NO: 14221 - DNA, 1815 bp, Ustilago maydis
  CDS (1)..(1815)
atggctcaacctgccgtcagacaacctaccgtgacaaggtcacgcatcagccgaccaggaggcatcccagcttctcgtagcggcgaccgcatccatctcacagaagctgcctccacaagtcatctggcaaaagccaagtcaacaaaattggtcggcccctctaccgcaggtaaactccgagccgattccagatccatgccacaacgcgctgccctttctgacgtcagtaatcgtgctggcgtcgccagagccaatgcactagcagatggcgccgtcaagctggcgcccggccacaatggcctgcgctctcaacacacaaaaagcatgacccgtctccgcgacgcccgttcgcgatccacgtccgagcagagactctctggcccaacacgctctgtctcggaacaacgtgactgtgcaccagccgctgccgagtctatgcatgtggaggcgtcacaactcctcccacccttccagagctccgcttcagtcaaggtgggcatcagcgacgaagcaggaagcagcaggctgcacgaagacgcagacatccgcgacctcgccggctcgcagcacagtgaccatgtcgaagaggacgagatgtcagatgtcgcctctacttcgagcagcgacgacgataccgcagaggacatcggcgtagacaaggccaactggctcgattcggaacgactcgatgccggtgcaagacccgagagcgtcacctctgccgaggacggcgacatgctcgacttcaacattgatccagagggtttggtctcgttacatccggagctggaggaggccgcgcgacgcaaggtggccttgatcaagtctcgctaccaggaggaagtcattcagcctcgtgcggcgcgcgcgcaagcacaacatgcagaagcagtcgccgccggtcagctctcggctgagctggctgcgcacgaagacgagctgatcgtcatggggctcgatcccgaggaggtacgcgacacgagtatggtggccgagtactcgaatgagatctttagctacatggctcggtgcgagcgcgagaccatggccaacccgaattacatggagtttcagagcgagattcactggcacatgcgtgctacgctcgtcgactggctcttgcaggtgcacatgcgctaccacatgctgccagagacgttgtggattgccatcaatgtggtcgaccgcttcctgagcgtgcgcgtggtcagcctggccaagctgcagctcgtcggtgtcacggccatgtttattgcagcaaagtacgaagagatcctggcgcctagcgtcaaggagtttgtctacatgaccgagggtggctactcgcaagaggagatcctcaagggcgagcgcatcatcctctcgacgttgggctttaacatttcgtcctactgctcaccttactcttgggtgcgaaagatctccaaggcggacgactacgacattcgcacccgtaccctgtccaagttcctgatggagctggcgctgctggatcatcgcttcctgcgtgctcggcccagtcttgtggccgctgtgggcatgtttttggccaaaaagatgctgggaggcgagtgggatgacgcctttgtctactactctgactttaccgaagagcagctggtccccggcgcgaatctattactcgagcgtttgctggaccaaggctttgaggagcagtttgtctaccgcaagtactcgaacaaaaagtttctccgggccagcgtctttgcgcgtgattgggccttccagaaccacagcgcactactcgccgctgctgcagcagcggcagggtcgactcaagcaggtcagccttga

SEQ ID NO: 14222 - protein, 604 aa, Ustilago maydis
MAQPAVRQPTVTRSRISRPGGIPASRSGDRIHLTEAASTSHLAKAKSTKLVGPSTAGKLRADSRSMPQRAALSDVSNRAGVARANALADGAVKLAPGHNGLRSQHTKSMTRLRDARSRSTSEQRLSGPTRSVSEQRDCAPAAAESMHVEASQLLPPFQSSASVKVGISDEAGSSRLHEDADIRDLAGSQHSDHVEEDEMSDVASTSSSDDDTAEDIGVDKANWLDSERLDAGARPESVTSAEDGDMLDFNIDPEGLVSLHPELEEAARRKVALIKSRYQEEVIQPRAARAQAQHAEAVAAGQLSAELAAHEDELIVMGLDPEEVRDTSMVAEYSNEIFSYMARCERETMANPNYMEFQSEIHWHMRATLVDWLLQVHMRYHMLPETLWIAINVVDRFLSVRVVSLAKLQLVGVTAMFIAAKYEEILAPSVKEFVYMTEGGYSQEEILKGERIILSTLGFNISSYCSPYSWVRKISKADDYDIRTRTLSKFLMELALLDHRFLRARPSLVAAVGMFLAKKMLGGEWDDAFVYYSDFTEEQLVPGANLLLERLLDQGFEEQFVYRKYSNKKFLRASVFARDWAFQNHSALLAAAAAAAGSTQAGQP

SEQ ID NO: 14223 - DNA, 1962 bp, Neurospora crassa
  CDS (1)..(1962)
atggacgcaaagccccagcgtcctctgtgggctcctcccgttcgatacggtgacgagaatatcccacctgccgatccgactcatcaaagtaagaggtcggacagcaagatcaaggcaatgatggcggttaacggcaccttgaacgcaccacccaagagggctgcctgcttcgacaagagcaacacctcgaagccactagccgacggcgggaacaaggacatgctgaagaacagggtgaaaccgatggtcacaaccagcagcactcgagacctacggtcggatggcagggagaataaccgctcggcagcggaggagcattatatgcggccaacggcgacctcgaaggcagcatcacacggccaccaaaagtattcttcgacggctcccctatcatcccatgccgccagcggggcatacggtggcattcgctcacacaatgccatcgccaaactctccgcaccggtcaagaaaacgaccaacgtataccgcgacaacaaagtcaaggaggagagcacatctcatgcgcccacttcctcgtcagttgatgatcttgttgcgatggtcgacaagcatattaaggatccacgccactacaaaagtcaaccgcaactcaagtcggaccagcagcataccctacaccggaatcagagcaaatacgtgcccaattacgagaacctgaatgacgtggatgatcccgacgattcaaatgccgattacgccgagtcttacgaggacgcggtcgagcaattatccagagatctcgatattcctgcgaacactgatcctgcagctatcgtccacgcaaatcacatgtcaatcgcccaagccagttatgactcgatgcctcaaggcgcaccactcgcaccctcgaaaccagtcagggcccttccactgccccccaacgtctctgatcccgaagagtattctgaagatgacgacgatcaggacctctacgacgaccaaggatataccaccgcccattcttatcgatctcattgcgacaataccacaggaggacctcccacattagtcgcgcccaaatttaccgcggacatccagaaggaacttgacattgcgaaggcatgggttttggagcatcaaacggaggaagaggttgaggaagagaattgggatgtgagcatggtagctgagtacggcgacgagatctttgagtacttgcgcgagcttgaggaacggatgcttccgaatcctcactacatggacatccaaaccgagatccggtggtccatgcgatccgtcctcatggactggctggtccaggttcaccatcgcttcagtcttctcccggagaccctctttctcaccgtgaactacatcgaccgctttctttcagttaaggttgtttcgctgggcaagcttcaactggttggcgcgactgccattttcgtcgcagccaagtacgaggagatcaactgcccttccattcaggaacttgtgtacatggtggatcagggatactctgttgaggagattctaaaggcagagaagttcatgctcaccatgctgaacttcgaacttggttggccaggcccgatgagcttccttcggcgcattagcaaagccgatgactacgatttggaaactcgaactcttgcaaagtacttgctcgaagtgactatcatggatgagcgttttgtgggctgccctgcgagttatcttgctgccggtgcccattgcctctcccgctttttcctgcaaagagggccatggacacatgcccatgttcacttttccggctatacgctggctcaattgaggccactcatcattagcatcctcgactgctgccaggaaccacgcaaacatcacggcgcggtatacgacaagtactctcatcagaggttcaagtccgcgtctactttcgtggaaggcaaaattgcgaacggtttcgtgctgccgattcgaacgaacgcttctatcagcgacagtgcgcaatcatag

SEQ ID NO: 14224 - protein, 653 aa, Neurospora crassa
MDAKPQRPLWAPPVRYGDENIPPADPTHQSKRSDSKIKAMMAVNGTLNAPPKRAACFDKSNTSKPLADGGNKDMLKNRVKPMVTTSSTRDLRSDGRENNRSAAEEHYMRPTATSKAASHGHQKYSSTAPLSSHAASGAYGGIRSHNAIAKLSAPVKKTTNVYRDNKVKEESTSHAPTSSSVDDLVAMVDKHIKDPRHYKSQPQLKSDQQHTLHRNQSKYVPNYENLNDVDDPDDSNADYAESYEDAVEQLSRDLDIPANTDPAAIVHANHMSIAQASYDSMPQGAPLAPSKPVRALPLPPNVSDPEEYSEDDDDQDLYDDQGYTTAHSYRSHCDNTTGGPPTLVAPKFTADIQKELDIAKAWVLEHQTEEEVEEENWDVSMVAEYGDEIFEYLRELEERMLPNPHYMDIQTEIRWSMRSVLMDWLVQVHHRFSLLPETLFLTVNYIDRFLSVKVVSLGKLQLVGATAIFVAAKYEEINCPSIQELVYMVDQGYSVEEILKAEKFMLTMLNFELGWPGPMSFLRRISKADDYDLETRTLAKYLLEVTIMDERFVGCPASYLAAGAHCLSRFFLQRGPWTHAHVHFSGYTLAQLRPLIISILDCCQEPRKHHGAVYDKYSHQRFKSASTFVEGKIANGFVLPIRTNASISDSAQS

SEQ ID NO: 14225 - DNA, 1380 bp, Pneumocystis carinii
  CDS (1)..(1380)
atgaacgcagcgaggcgtgtaacacgtcagacggcaacgtttaatcttaatgatgagaacaaattgcatggacaaatatctcgggtgaagcaagtatctacacaaggattagaaggggtaaataagccatggacggcggcgacgcgaaagagagcagcattaggagatgtaagcaatgtgcataataaggagaatcagacggcgaaaacgaaaacgcagccgttatcaaccaaagcacgcgtggtgacgaaaaccggagttcaaagtcatcaaagcaaagaatccgttcatacggtaccaacgggagaattgcgtggtgaagaaacaacacgaaaaagacggacatcaaaggttttaacggagcaaaaagtgatcattgaggtggaacaaacacaagcaagtaaaaaagtgagaaccgatggccttttaaacggatcggtacaagagcatccagcatcacaagattgggatgatttagatgcggatgatgctcatgatccattgatggtatcggaatacgttgaagaaatcatgggttacatgagggaattagaggtattaacacttcctttaccagattatatggatcgacagaaagaacttcaatggaaaatgcgaggaatcttggtagattggttaattgaggttcatgcgaaatttcgtcttcttccagaaacgttatttctttctgtcaatattattgatcgatttttatccctacgagtatgttcgcttcctaagcttcaattagtagggattacagcactttttatcgcagcaaaatatgaagaagtgatgtgtccatcgatacaaaattttatgtacatggcagatggtggatatacgaatgaagaaattctaaaagcagaacaatacgttttacaagttcttggatatgatatgtcatatccaaatcccattaattttctaagaagagtatcaaaggcagataattatgatattcagacacgtacagtggcaaaatatcttatggaaattagtcttcttgatcatcgatttttgccttttgtgccatctaatattgcagcttcgggcatttatttggctagaattatggttactggtggcaattggaatgctaatttaatacattattcgggatataaagaatcagatcttgttccatgttctaaaatgatgctggattatctttcacgatcagttataaaacatgaagcattttttaaaaaatatgccagcaaaaaattcatgaaagctagtttatttgttcgcgattgggttaaaaaacattacgatcttgaggcaaacgtgcgattaaacactatctctttcgattacgataaccatgaatcaaatgaaatacatcaggacttagaagaggaagaaggatccctatag

SEQ ID NO: 14226 - protein, 459 aa, Pneumocystis carinii
MNAARRVTRQTATFNLNDENKLHGQISRVKQVSTQGLEGVNKPWTAATRKRAALGDVSNVHNKENQTAKTKTQPLSTKARVVTKTGVQSHQSKESVHTVPTGELRGEETTRKRRTSKVLTEQKVIIEVEQTQASKKVRTDGLLNGSVQEHPASQDWDDLDADDAHDPLMVSEYVEEIMGYMRELEVLTLPLPDYMDRQKELQWKMRGILVDWLIEVHAKFRLLPETLFLSVNIIDRFLSLRVCSLPKLQLVGITALFIAAKYEEVMCPSIQNFMYMADGGYTNEEILKAEQYVLQVLGYDMSYPNPINFLRRVSKADNYDIQTRTVAKYLMEISLLDHRFLPFVPSNIAASGIYLARIMVTGGNWNANLIHYSGYKESDLVPCSKMMLDYLSRSVIKHEAFFKKYASKKFMKASLFVRDWVKKHYDLEANVRLNTISFDYDNHESNEIHQDLEEEEGSL

SEQ ID NO: 14227 - DNA, 1365 bp, Arabidopsis thaliana
  CDS (1)..(1365)
atgtcttcttcgtcgagaaatctatctcaggagaatccgattcctcgtccgaacttagccaagactcgaacctcactccgcgatgttggaaaccgtcgtgctcccctcggcgacatcacaaatcagaagaatggatctagaaatccttcaccgtcgtctactctggtgaattgttcaaataagatcggccaatctaagaaagcaccaaaacctgctttatctcgtaattggaatttgggaattctcgattccggtttacctcccaagccaaatgcgaaatcaaacataatcgttccttacgaagacaccgaattgctccaaagcgatgatagtcttctatgttcttcacctgcattatccttggatgcctctcctactcaatctgacccgtcaatttccactcatgactctttgacgaaccacgttgtagattacatggtcgagagcactactgatgatggaaatgatgatgatgatgatgagattgttaacattgatagtgacttgatggatccacagctttgtgcttcttttgcttgtgatatctacgagcatttgcgtgtatctgaggtgaacaaaagaccggctctagattacatggaaagaactcagtcaagcatcaatgctagcatgcgttctatactgattgactggcttgtggaggttgctgaagagtataggctttcgcccgagacgttgtatttggcagtaaactacgttgatcggtatcttacaggaaatgcaatcaacaagcaaaatctgcagctacttggtgttacctgcatgatgatagcagcaaaatatgaagaagtgtgtgtgccgcaagtggaggatttctgttacatcactgataacacatacttaagaaatgagcttttggagatggagtcttctgttctgaactacttgaagttcgaattaacaactccaacagcaaaatgtttcttgaggcgctttcttcgtgctgctcaaggcagaaaggaggtaccatcactgctgtctgagtgtctggcctgctatctcaccgaattatcgctgttagattacgctatgcttcgatacgctccatcacttgttgcagcctctgcagttttcttggcacaatacactctacacccttcaagaaaaccatggaatgctacgctagagcattacacatcgtacagggctaaacatatggaagcatgcgttaagaatcttcttcagctgtgtaatgagaaactctcatctgatgtggttgcaatcagaaagaatacaagtttgcagcaaagaagctttgtcccacgtcactaccgcaagagcttttcctctgatagtgtttctggatacgttttttttaccctcgtgtattgtacatattgttga

SEQ ID NO: 14228 - protein, 454 aa, Arabidopsis thaliana
MSSSSRNLSQENPIPRPNLAKTRTSLRDVGNRRAPLGDITNQKNGSRNPSPSSTLVNCSNKIGQSKKAPKPALSRNWNLGILDSGLPPKPNAKSNIIVPYEDTELLQSDDSLLCSSPALSLDASPTQSDPSISTHDSLTNHVVDYMVESTTDDGNDDDDDEIVNIDSDLMDPQLCASFACDIYEHLRVSEVNKRPALDYMERTQSSINASMRSILIDWLVEVAEEYRLSPETLYLAVNYVDRYLTGNAINKQNLQLLGVTCMMIAAKYEEVCVPQVEDFCYITDNTYLRNELLEMESSVLNYLKFELTTPTAKCFLRRFLRAAQGRKEVPSLLSECLACYLTELSLLDYAMLRYAPSLVAASAVFLAQYTLHPSRKPWNATLEHYTSYRAKHMEACVKNLLQLCNEKLSSDVVAIRKNTSLQQRSFVPRHYRKSFSSDSVSGYVFFTLVYCTYC

SEQ ID NO: 14229 - DNA, 1227 bp, Patella vulgata
  CDS (1)..(1227)
atgactacagttacacgctcttcatcggctaatcttggtgctagtcaaaagttggctgtgaagaaaggtgatgcaatgatgtcgagtaaaggtatttccaaccgaagcaatcggtctgctttaggagacataggaaataaagtttctaatatgactattgacccaacgaaaaaagcattaggcctacctgtaatcaaaaaggagataattcagaaatccaagtttacaagaagtaagactaccgtttcggaatcggatatcttgttacaggagaaagagtctgcctgttgtagtagagcttataccatctttaaagatgccatcgaaccaattgtgtcgactgttgatcttatggacattagtgaagacaaaccagacgccttctccaaagttttattaacagttgaagatattgacgccaacgacaaagataacccccaacttgtcagtgactatgtcaatgatatttaccattacatgagacatttagaggaaacgtttgccgtaaaagctaactttcttgaaggacaagaagtaactggtaaaatgagatcaatcttgattgattggttatgccaagttcatcacagattccatctattacaagaaactttatatttaacggtttctataatagacaggtttttgcaggttcatccgatttctagaaataagttgcagttagttggggttacctcaatgctgcttgcttcaaaatatgaagaaatgtacgcccccgaagtggcggattttgtgtacataacggacaatgcttataccaaagccgatattaggactatggaacaaacaatattaaaaacactagattttagttttggaaagccattgtgtttacattttttacgaaggaattctaaagctggtcaggttgatgcaaccaaacatacacttgccaagtatttaatggaacttaccattatagagtatgatatggtgcattgtaatccatctattatagctgctgcagctttatgtttatctatgaaggtgctagatgattcacaatggtctgaaaccttagctcattacagtaactactcggaaaaagagatttatccagtaatgcagaaattagctcagttggtggttaaagcagaaactagtaaattaacggctgtaaagataaaatattccagttcaaggtttatgaaaatcagttccattccagaattgaaatctaatgctataacggatctcgtattatag

SEQ ID NO: 14230 - protein, 408 aa, Patella vulgata
MTTVTRSSSANLGASQKLAVKKGDAMMSSKGISNRSNRSALGDIGNKVSNMTIDPTKKALGLPVIKKEIIQKSKFTRSKTTVSESDILLQEKESACCSRAYTIFKDAIEPIVSTVDLMDISEDKPDAFSKVLLTVEDIDANDKDNPQLVSDYVNDIYHYMRHLEETFAVKANFLEGQEVTGKMRSILIDWLCQVHHRFHLLQETLYLTVSIIDRFLQVHPISRNKLQLVGVTSMLLASKYEEMYAPEVADFVYITDNAYTKADIRTMEQTILKTLDFSFGKPLCLHFLRRNSKAGQVDATKHTLAKYLMELTIIEYDMVHCNPSIIAAAALCLSMKVLDDSQWSETLAHYSNYSEKEIYPVMQKLAQLVVKAETSKLTAVKIKYSSSRFMKISSIPELKSNAITDLVL

SEQ ID NO: 14231 - DNA, 1479 bp, Candida albicans
  CDS (1)..(1479): transl_table=12
atgccacaagtcactaaaactaataatgaaaatgagtttagacttactagatcaaaagtacagcatcaagagtcgataagtaccatcaaaaatacgaccatatccaattctcagcataaacaacaaacacaacaacaaatttcatcaccacctcaagtctctgtaacatcatctgaaggagtttcacatgtcaatacacgtcaatatttgggtgatgtttcaaatcaatacataacaaatgctaaaccaacaaataaaagaaaaccattgggtggagacaatgcccctctacaaaaacaacagcatagaccatctagaccaatacccattgccagtgataacaacaataatggtagtaccagtagcagtagcaacagtagcaacaacaataacaacgacgcaaatagactagcatctttggcagttccatctcgattaccccaaaaacgacaagctactgaatcgtcgacaaatttagtagagaaattaagagtaccacaaccagaagtaggggaaagaagtcagtcataccataagaaatcacgtttaattgattatgaatggcaggatttggatgaagaagataatgacgaccaattaatggttagtgaatatgttaacgaaatattttcgtactattacgaattagaaacacgaatgttacctgatccgcaatatcttttcaaacaaacattgttaaaaccaagaatgagatcgatattggttgattggcttgttgaaatgcatttaaaattcaagttattacctgaatcactttttttggcagtcaatgtaatggatagattcatgtctgttgaagtggttcaaatagataaattacaattattggctacagcagctttatttactgctgccaaaaatgaagaagtattttctcccctggttaaaaattatgcatatttcactgatggttcatatactccagaagaagtggtacaagcagaaaaatacatgcttaccattcttaactttgatttgaattaccccaatccaatgaatttcttgagaagaatttctaaagctgatgattatgatgtccaatcaagaacgctaggaaaatatcttttggaaatcactatagttgattacaaatttattggtatgagaccatctttatgttgtgccctggccatgtatttagcaagactaatattgggcaaattgccagtttggaatgggaatttgattcattatagtggaggttatagaatcagtgatatgagagaatgtatcgaattaatgtttcaatatcttattgctcctatagaacatgatgaatttttcaaaaaatatgccatgagaaaatttatgagagcaagtactctttgtcgaaattgggctaaaaaattccaagcatcaggaagagatttgtttgatgaacgattatcgacccataggctaacattagaagatgatgacgaagaagaagaaatagtggtagcagaagcagaagagtaa

SEQ ID NO: 14232 - protein, 492 aa, Candida albicans
MPQVTKTNNENEFRLTRSKVQHQESISTIKNTTISNSQHKQQTQQQISSPPQVSVTSSEGVSHVNTRQYLGDVSNQYITNAKPTNKRKPLGGDNAPLQKQQHRPSRPIPIASDNNNNGSTSSSSNSSNNNNNDANRLASLAVPSRLPQKRQATESSTNLVEKLRVPQPEVGERSQSYHKKSRLIDYEWQDLDEEDNDDQLMVSEYVNEIFSYYYELETRMLPDPQYLFKQTLLKPRMRSILVDWLVEMHLKFKLLPESLFLAVNVMDRFMSVEVVQIDKLQLLATAALFTAAKNEEVFSPSVKNYAYFTDGSYTPEEVVQAEKYMLTILNFDLNYPNPMNFLRRISKADDYDVQSRTLGKYLLEITIVDYKFIGMRPSLCCASAMYLARLILGKLPVWNGNLIHYSGGYRISDMRECIELMFQYLIAPIEHDEFFKKYAMRKFMRASTLCRNWAKKFQASGRDLFDERLSTHRLTLEDDDEEEEIVVAEAEE

SEQ ID NO: 14233 - DNA, 1437 bp, Emericella nidulans
  CDS (1)..(1437)
atgaatgaaaacgacgagaatggtccctcaacgcgtcttactcgcgccaaagccgccgccctgacaacagacgcccctgctgccaatggagccctcaagaaaccccttcagacaaagaaagccgccactggcgccaacggcacacaaagaaaacgtgctgcgcttggtgatgttagcaatgtcggaaaggcggacaatggcgagaccaaggacgcgaagaaggccacatccaagaccggccttacatcaaaagctaccatgcagtcggggggcgttcaaaagctcagccgcagcaatctatcccgtaccgccgtcggagcaaaggacaacaatgtaaagaaacctgccacagaggcaaagcgccctggaagtgggtctggtatgggaagcgcgatgaagcgcacatccagccaaaagtctctacaggaaaagaccatccaacaagaagagcctccccgcaagaaggtcgacattgaaaaggtcgtggaaaagcaggctgaggctgtctcggttaagggggatgttaaggcaggggcacaaacagaagagcttgaaaagcctcaagatttcgttgccgacctagacactgaggacctggacgaccccttgatggctgctgaatacgtggtggagatcttcgattaccttcgcgagctggagatggagacgttgccaaaccctgattacatcgatcaccagccagaccttgagtggaagatgcgcggcatcctggttgactggctcatcgaagttcacactcgcttccgtcttcttcctgaaacgcttttccttgccgtcaacattattgaccgtttcctctctgccgaagtggtcgccttggaccgtctccagttggttggtgttgctgccatgtttattgcttccaaatatgaagaagttctctccccccatgtcgccaatttcagccacgtcgccgacgaaaccttctctgataaggagatcctggatgccgaacgtcacattctggccacgcttgaatacaacatgagctatcccaatcctatgaacttcctgcgccgtatttccaaagcagacaactacgacattcaaacacgtactcttggaaagtacttgatggagattagcctgcttgatcacaggtttttgggctaccctcagagccaaatcggtgcagcagccatgtacttagctcgtctgattttagaccgtggtccttgggatgccactcttgcccattacgctggctacaccgaggaagagattgatgaagttttccggttgatggttgactacctccaccgtcccgtctgccacgaagcattttttaagaaatatgcaagcaagaagttccttaaggcctctatcatgacacggcagtgggccaaaaaataccaccatctgtacattgacagcgcgctcacagagccgtacaactccatcaaagacaacgaatag

SEQ ID NO: 14234 - protein, 478 aa, Emericella nidulans
MNENDENGPSTRLTRAKAAALTTDAPAANGALKKPLQTKKAATGANGTQRKRAALGDVSNVGKADNGETKDAKKATSKTGLTSKATMQSGGVQKLSRSNLSRTAVGAKDNNVKKPATEAKRPGSGSGMGSAMKRTSSQKSLQEKTIQQEEPPRKKVDIEKVVEKQAEAVSVKGDVKAGAQTEELEKPQDFVADLDTEDLDDPLMAAEYVVEIFDYLRELEMETLPNPDYIDHQPDLEWKMRGILVDWLIEVHTRFRLLPETLFLAVNIIDRFLSAEVVALDRLQLVGVAAMFIASKYEEVLSPHVANFSHVADETFSDKEILDAERHILATLEYNMSYPNPMNFLRRISKADNYDIQTRTLGKYLMEISLLDHRFLGYPQSQIGAAAMYLARLILDRGPWDATLAHYAGYTEEEIDEVFRLMVDYLHRPVCHEAFFKKYASKKFLKASIMTRQWAKKYHHLYIDSALTEPYNSIKDNE

SEQ ID NO: 14235 - DNA, 1248 bp, Schizosaccharomyces pombe
  CDS (1)..(1248)
atggacgtttcgactcaaacaagacacgcaacatattttcaagatgagaatcagctacaaaaggatcacatttatgtgaagaagaaaagtcacatcaagttaaatacgggtgttcgtgcacctttcaaggcagtagataacatcaatcaacaagatgaaccaacattgattgaagggaataatgaatcctccatctcttcgtccactggcgacacttttgaagaggattttgcataccaggacaaagtcgagatagaggaacggtcaattcgctccactcctaagtctattggagatgatgatttggaaaaccgtgagggcagctttgacgcacctgaaggaattcttacacacgggaagcatagactaccaacaattcccgagtggaccaaggaagatttagccgccctgtctgaagctgctgctcgattacaagctaacccatcgcctgaggatatagaaactgatccatccatggtaccagactatgatcctgagatatttcactacatgcaatctttggaaaggaagctggctccacctcctaattacatgtcagttcagcaagagattgactgggttacaagacatatgcttgttgattggattgtgcaagttcaaatacattttcgtttacttcctgagacattatttttggcggtaaaccttatcgaccggtttctttccataaaagtcgtatctttgcaaaaagtccagttggtaggtttatcagctttgctgattgcctgtaagtatgaagagatacaccctccaagcatctacaactttgcgcatgttgtccaagggatcttcaccgttgacgaaatcattagagccgagcgctatatgctgatgcttttggattttgacattagttggccagggcccatgtcgtttttgcgtcgtataagtcgagctgattcttacgatcacgacattcgcatgctcgccaaatatcttcaagaagtaaccttgatggatgaaatttttataggtgcccatattagcttcattgctgctactgcctactacttgtctatgcagatgttgggtcatttggattggactccttgccatgtatattatagtgggtacacggctcgtcaattgaaaccgtgtgccataatcattatggaatgtttggtcgatgcccctaaccatcacaatgccatttaccgaaagtactcggagaatagaatgaagcgagttagcgcctttgctcacaactgggtactaagtgtgatttga

SEQ ID NO: 14236 - protein, 415 aa, Schizosaccharomyces pombe
MDVSTQTRHATYFQDENQLQKDHIYVKKKSHIKLNTGVRAPFKAVDNINQQDEPTLIEGNNESSISSSTGDTFEEDFAYQDKVEIEERSIRSTPKSIGDDDLENREGSFDAPEGILTHGKHRLPTIPEWTKEDLAALSEAAARLQANPSPEDIETDPSMVPDYDPEIFHYMQSLERKLAPPPNYMSVQQEIDWVTRHMLVDWIVQVQIHFRLLPETLFLAVNLIDRFLSIKVVSLQKVQLVGLSALLIACKYEEIHPPSIYNFAHVVQGIFTVDEIIRAERYMLMLLDFDISWPGPMSFLRRISRADSYDHDIRMLAKYLQEVTLMDEIFIGAHISFIAATAYYLSMQMLGHLDWTPCHVYYSGYTARQLKPCAIIIMECLVDAPNHHNAIYRKYSENRMKRVSAFAHNWVLSVI

SEQ ID NO: 14237 - DNA, 1416 bp, Saccharomyces cerevisiae
  CDS (1)..(1416)
atgtcacgatcccttttggtagagaatagtagaaccattaatagtaatgaagagaagggggtaaacgaaagtcaatatatcttacaaaagagaaacgtcccaaggaccattctcggtaatgtcacaaataatgcaaatatcctgcaagagatttctatgaacagaaaaattgggatgaagaacttctcaaaattgaacaacttctttcctttaaaggatgatgtttcgagagccgatgacttcacctcctcttttaatgacagtagacagggggtgaaacaagaagtactaaacaataaggaaaatattcctgaatatggatattccgagcaagaaaagcagcagtgctcaaatgatgactcttttcatacgaattcgactgccttgagctgtaatcggttgatatactctgagaacaagtctatttccactcaaatggaatggcagaaaaaaataatgagagaagattccaaaaaaaaaaggccaatatcaactcttgtagagcaggatgaccagaaaaagttcaaactccatgaattgactacagaagaagaggttctggaggagtacgaatgggatgacctagatgaagaagattgtgatgatcccttaatggtgagcgaagaggttaatgatatcttcgattatttgcatcacttggaaataatcacattgccaaataaggcgaatctctataagcataaaaatattaagcaaaacagagacattttggtgaactggataatcaagattcataataagtttggccttctgccggaaactctatatttggccataaacataatggatagatttctttgtgaagaggtggttcagttaaatagattgcaactggttggtacatcatgcctgttcatcgcatctaagtatgaggaaatatactcccctagcataaaacattttgcgtacgagacagacggtgcatgctctgtggaagatattaaagagggtgaaagatttatattggaaaaactcgattttcaaattagtttcgctaacccaatgaatttcttaaggagaatatcaaaagcggatgactatgatatccagtctaggacgttagcgaagttcctaatggaaatatctatagtggacttcaagttcatcgggatattaccgtcattatgtgcctcagcggcaatgttcctttcgagaaaaatgctgggcaagggcacctgggatggcaacttaatccattatagtggtggttacacaaaggcaaaactatatcccgtttgccaattactgatggattatcttgttggatctactattcacgacgagttcttgaaaaaatatcaatcgagaagatttttaaaggcttccataatttctatcgaatgggcattgaaggtaaggaaaaatggatatgatattatgacattgcatgagtga

SEQ ID NO: 14238 - protein, 471 aa, Saccharomyces cerevisiae
MSRSLLVENSRTINSNEEKGVNESQYILQKRNVPRTILGNVTNNANILQEISMNRKIGMKNFSKLNNFFPLKDDVSRADDFTSSFNDSRQGVKQEVLNNKENIPEYGYSEQEKQQCSNDDSFHTNSTALSCNRLIYSENKSISTQMEWQKKIMREDSKKKRPISTLVEQDDQKKFKLHELTTEEEVLEEYEWDDLDEEDCDDPLMVSEEVNDIFDYLHHLEIITLPNKANLYKHKNIKQNRDILVNWIIKIHNKFGLLPETLYLAINIMDRFLCEEVVQLNRLQLVGTSCLFIASKYEEIYSPSIKHFAYETDGACSVEDIKEGERFILEKLDFQISFANPMNFLRRISKADDYDIQSRTLAKFLMEISIVDFKFIGILPSLCASAAMFLSRKMLGKGTWDGNLIHYSGGYTKAKLYPVCQLLMDYLVGSTIHDEFLKKYQSRRFLKASIISIEWALKVRKNGYDIMTLHE

SEQ ID NO: 14239 - DNA, 1236 bp, Schizosaccharomyces pombe
  CDS (1)..(1236)
atggctctctattcaatttcaaagcctgttggttctaaaatcaataagcatagttatcaagatgaaaacacacttgttggcaaacaagctttatcaaaagggactgagaagacaaaattatctacaaattttgaaattaatctgccacgtcgaactgtcctatctgatgtttccaatgtaggtaaaaataatgctgatgagaaggatacgaaaaaagcgaaaagatcgttcgatgaatctaatttatctacaaatgaagaagctgataaacctgtcgaatctaaattcgtgaaaaagttgaaagtttatagcaaaaatgcggatccatctgtagaaactttacaaaaggacagagtctctaatgttgatgatcatttatcctccaatcctttgatggctgaggaatacgcacccgaaatatttgagtacatcagaaagctggatttaaagtgtcttcccaatccaaaatatatggaccaacaaaaagaattaacctggaaaatgagggaaattttgaatgaatggttggtggaaatacattccaacttttgtttaatgcccgaaaccctttatttggcagtcaatataattgatcgattcttgtcgcgtcgttcatgctctttgtctaaatttcaattaacaggcattactgctcttctcatcgctagcaaatatgaggaggttatgtgtccttcgatacaaaactttgtttacatgactgatggtgcttttaccgtagaagatgtctgtgtcgctgaacgttatatgttaaatgttctcaattttgacttgtcctatccaagtcctttaaattttcttcgcaaaatatctcaagcagaaggttatgatgcacaaacaaggacattggggaaatacctaacagaaatttatctgtttgaccacgatttattacgatatcctatgtctaaaattgctgctgccgcaatgtatttgagccgccgattattgcgtcgcggcccatggacgccaaagttagttgaaagctctggtgggtatgaagagcatgaattaaaggagatagcgtatattatgcttcattatcataacaagcctctagaacacaaagcctttttccaaaaatactcctcaaaaaggttcctgaaggctagtatttttgttcatcaactcgtccgtcaacgatactcagtcaatcgtacggacgatgatgaccttcaatcagaaccgtcttcttctttaacaaatgatggtcactaa

SEQ ID NO: 14240 - protein, 411 aa, Schizosaccharomyces pombe
MALYSISKPVGSKINKHSYQDENTLVGKQALSKGTEKTKLSTNFEINLPRRTVLSDVSNVGKNNADEKDTKKAKRSFDESNLSTNEEADKPVESKFVKKLKVYSKNADPSVETLQKDRVSNVDDHLSSNPLMAEEYAPEIFEYIRKLDLKCLPNPKYMDQQKELTWKMREILNEWLVEIHSNFCLMPETLYLAVNIIDRFLSRRSCSLSKFQLTGITALLIASKYEEVMCPSIQNFVYMTDGAFTVEDVCVAERYMLNVLNFDLSYPSPLNFLRKISQAEGYDAQTRTLGKYLTEIYLFDHDLLRYPMSKIAAAAMYLSRRLLRRGPWTPKLVESSGGYEEHELKEIAYIMLHYHNKPLEHKAFFQKYSSKRFLKASIFVHQLVRQRYSVNRTDDDDLQSEPSSSLTNDGH

SEQ ID NO: 14241 - DNA, 1476 bp, Saccharomyces cerevisiae
  CDS (1)..(1476)
atgtccaacccaatagaaaacacagaaaactcacagaatactagttcatcaaggtttttgaggaatgtacaaaggttggccttaaacaatgtaacaaatacgacatttcaaaagagtaatgcgaataatccagccctaacaaatttcaaatctacactaaactcagtaaagaaggagggaagtcggattcctcaatttactagagaaagcgtatcaagatcaacagccgcacaagaggagaaaagaaccctgaaagaaaatggtatccaactccccaaaaacaatcttttagatgataaagaaaaccaagacccaagtagtcagcaatttggtgcgctaacttctataaaggaggggagagctgagctgcctgcaaatataagtttacaagaatcctcctcagcgaaggagataatccagcatgatcccctaaaaggcgttggatcaagcactgaggtagtccataactcggtagaaaacgaaaaacttcatccagctagaagtcaacttcaagttagaaataccgaaagtgaaactgatagtggaaaaaaaagaccaatttctacaattgttgaacaagaactgcccaaaaagtttaaagtgtgcgatgaaaatggcaaagaagaatatgaatgggaagacctagatgcagaagatgtaaatgatccattcatggtcagcgagtacgtcaatgatatattcgaatatctccaccaactagaggtcattactcttccaaagaaggaagatctctatcagcatagaaatattcatcaaaatcgagatatcctagttaattggttggttaaaatccataataaattcggcttattaccggagactttgtatcttgccattaacataatggacaggtttttaggtaaagagctagttcaactggataagttacaattggttggcacatcatgccttttcattgcctctaaatatgaagaggtctattctcctagtataaaacatttcgcatcagagacagacggtgcatgtacggaagatgaaatcaaagaaggggagaaattcattttaaagacattgaaatttaacctaaattatcccaatccgatgaattttctgagaagaatttcgaaagcagatgactacgatatacagtctcgaactcttgccaaattcttattagagatatcattggtagatttcagatttattgggatactaccctcattgtgtgcagcagctgcgatgtttatgtcgagaaaaatgttaggtaaaggtaaatgggatggaaatctaatacactatagcggcgggtatactaaagaagaacttgcgcccgtgtgtcacatgataatggattatctagtgagtccaattgttcatgatgaatttcatagaaaatatcaatctagaagatttatgaaagcttctataatttccgtccaatgggctttaaaggttagaaaaaacggctatgatataatgaccttgcatgaatga

SEQ ID NO: 14242 - protein, 491 aa, Saccharomyces cerevisiae
MSNPIENTENSQNTSSSRFLRNVQRLALNNVTNTTFQKSNANNPALTNFKSTLNSVKKEGSRIPQFTRESVSRSTAAQEEKRTLKENGIQLPKNNLLDDKENQDPSSQQFGALTSIKEGRAELPANISLQESSSAKEIIQHDPLKGVGSSTEVVHNSVENEKLHPARSQLQVRNTESETDSGKKRPISTIVEQELPKKFKVCDENGKEEYEWEDLDAEDVNDPFMVSEYVNDIFEYLHQLEVITLPKKEDLYQHRNIHQNRDILVNWLVKIHNKFGLLPETLYLAINIMDRFLGKELVQLDKLQLVGTSCLFIASKYEEVYSPSIKHFASETDGACTEDEIKEGEKFILKTLKFNLNYPNPMNFLRRISKADDYDIQSRTLAKFLLEISLVDFRFIGILPSLCAAAAMFMSRKMLGKGKWDGNLIHYSGGYTKEELAPVCHMIMDYLVSPIVHDEFHRKYQSRRFMKASIISVQWALKVRKNGYDIMTLHE

SEQ ID NO: 14243 - DNA, 1449 bp, Schizosaccharomyces pombe
  CDS (1)..(1449)
atgactacccgtcgtttaactcgccagcacctattggcaaataccttgggcaacaatgacgaaaatcatccttcaaaccatattgcccgtgcaaaaagctctttgcactcttcagaaaattctttagtaaatggcaagaaagccactgtgtcttccaccaacgttcctaagaagcgtcatgcgttggatgatgtttccaattttcacaacaaagaaggtgttccattagctagtaaaaacacaaatgtcagacacactactgcttctgtcagtacccgtcgtgctctcgaggaaaagtctataatccctgcaacagatgatgaacccgcttccaagaagcgtcgccaaccttctgtttttaattcatcagtcccctcgttacctcaacacttgtcaacgaaatcacactctgtttcaacccatggggttgatgctttccataaggatcaagcaactattccaaaaaaattaaagaaagatgttgatgaacgcgttgtttcgaaagatattcccaaacttcaccgtgatagtgttgagagtcccgaatctcaagattgggatgacttggatgcagaagattgggctgaccctcttatggtttctgaatatgtcgttgatatttttgaatatttgaatgagttggaaattgaaactatgccctctcctacttatatggatcgtcaaaaagagcttgcatggaagatgcgtggaatacttaccgattggttaattgaagtgcattctcgtttccgactgcttcctgaaacattgtttttggccgtaaatattattgatagatttttatcattgcgggtatgctctcttaacaaactacaattggttggcattgctgccttgttcatcgctagcaagtatgaggaggtgatgtgcccttcagtccaaaactttgtatatatggcggatggtgggtatgatgaagaggaaattcttcaagccgagcgctacattttgcgtgtcctagagtttaatcttgcttacccgaatcctatgaatttcctacgtcgtatctcaaaagccgacttttacgatattcaaacaagaactgttgcaaagtatcttgttgaaattggtcttttagatcataaacttttaccttatcccccttcccaacagtgtgctgccgctatgtaccttgccagggaaatgcttggacgtggaccgtggaatcgtaatcttgtgcattactcaggttatgaggagtaccaattaatttccgttgttaagaagatgattaattatttacaaaagcctgttcaacatgaagcttttttcaagaagtatgcctccaaaaagtttatgaaagctagtctttttgttcgtgactggatcaagaagaattctatccctcttggcgatgacgctgatgaagattatacttttcacaagcaaaaacgtatacaacatgacatgaaagatgaagaatggtaa

SEQ ID NO: 14244 - protein, 482 aa, Schizosaccharomyces pombe
MTTRRLTRQHLLANTLGNNDENHPSNHIARAKSSLHSSENSLVNGKKATVSSTNVPKKRHALDDVSNFHNKEGVPLASKNTNVRHTTASVSTRRALEEKSIIPATDDEPASKKRRQPSVFNSSVPSLPQHLSTKSHSVSTHGVDAFHKDQATIPKKLKKDVDERVVSKDIPKLHRDSVESPESQDWDDLDAEDWADPLMVSEYVVDIFEYLNELEIETMPSPTYMDRQKELAWKMRGILTDWLIEVHSRFRLLPETLFLAVNIIDRFLSLRVCSLNKLQLVGIAALFIASKYEEVMCPSVQNFVYMADGGYDEEEILQAERYILRVLEFNLAYPNPMNFLRRISKADFYDIQTRTVAKYLVEIGLLDHKLLPYPPSQQCAAAMYLAREMLGRGPWNRNLVHYSGYEEYQLISVVKKMINYLQKPVQHEAFFKKYASKKFMKASLFVRDWIKKNSIPLGDDADEDYTFHKQKRIQHDMKDEEW

SEQ ID NO: 14245 - DNA, 1383 bp, Saccharomyces cerevisiae
  CDS (1)..(1383)
atgatgcttgaagggtatacggtacaacctccacagtctactttgataggtgacattgaaattcaggacgaaaatgcaaaccaagaagttaagaacgtactttaccaaggagttcaaaagggtataaaaaggctagaaaaaagacaaaggagggttgcattaggtgatgtaacctctcaaaaggcaaacaaaatacacaatgctatacataataaattccatcagacgaagaacaattttgaaatagagaacatacgctcatcggccttggtaaaagaacaacaacgagacgtaaggcatgaagatagcgactattttttaattgatagttctgaaggctcttctactgatgacgaacaagttaatgaagatgctattgatgatttgttaagtcgaagagtaaatgatcagcagattcaagccgatgaagtgtatgaagatttcgatggagaaatgcaagatgtcattgaagaggatgttgatagtcaaattgaaccactatcaccaataaacaacgatgaaattcagactgagctggacagggcgtttgaaaaatattttcggtcggttcccaatccgctggatgatgatacccatgatgttgtgatggttgtggagtacgcttccgacatattctattacttgagagaacttgaagtgaaatataggcctaatccctactatatgcaaaatcaagtagagcttacatggccgttcagacgaactatgatagattggctagttcaactgcattttagatttcaacttttaccagaaacgctatacctgacgattaatatagtggatagatttctgtcaaagaagaccgttactttgaacaggtttcaattggttggtgtatcggctttatttattgctgccaagtttgaagagattaactgccccactttggatgatctagtttacatgctggaaaatacatacactagagatgacattattagagcggaacagtatatgatagatactctggaatttgaaataggttggccaggacccatgccatttttaagaaggataagtaaagcagatgactatgacttcgaaccaagaacattagcaaagtacttattggaaactacaatagtagaacccaaactagtggctgcggcaccaagctggttagctgctggcgcgtattttctgagcagaacaattcttggttcaaatgattggtctttaaaacatgtattctactctggctatacatccagccaaataattcctttagcatcactgatattggagaattgcaagaacgcatctcgacgccatcattcaatttggaaaaaatactttgaccaaaagcattaccgctgttctcaaattgtagaagaatggattgtttcgacagaagcctaa

SEQ ID NO: 14246 - protein, 460 aa, Saccharomyces cerevisiae
MMLEGYTVQPPQSTLIGDIEIQDENANQEVKNVLYQGVQKGIKRLEKRQRRVALGDVTSQKANKIHNAIHNKFHQTKNNFEIENIRSSALVKEQQRDVRHEDSDYFLIDSSEGSSTDDEQVNEDAIDDLLSRRVNDQQIQADEVYEDFDGEMQDVIEEDVDSQIEPLSPINNDEIQTELDRAFEKYFRSVPNPLDDDTHDVVMVVEYASDIFYYLRELEVKYRPNPYYMQNQVELTWPFRRTMIDWLVQLHFRFQLLPETLYLTINIVDRFLSKKTVTLNRFQLVGVSALFIAAKFEEINCPTLDDLVYMLENTYTRDDIIRAEQYMIDTLEFEIGWPGPMPFLRRISKADDYDFEPRTLAKYLLETTIVEPKLVAAAPSWLAAGAYFLSRTILGSNDWSLKHVFYSGYTSSQIIPLASLILENCKNASRRHHSIWKKYFDQKHYRCSQIVEEWIVSTEA

SEQ ID NO: 14247 - DNA, 1308 bp, Saccharomyces cerevisiae
  CDS (1)..(1308)
atgggagagaaccacgaccatgagcagagtattaaaagaaattctatgatttataatgaaaatgagaggcagttgtgcaattcaaacctaaagattcttcaaaataaaagggccctttcaaaaaatgacagctctagtaagcagcaggttcaggattctaaaccaagaagggctttaacagatgtaccagtgaacaataatcctttaagccagaacaagagaatagtagcagggagcaaggcggccaaagtacgaagagaagaaaacattagacctattgttagcgccgttcaaaaaagacagatatataacgatcgaacggcagcagagcaagaagaagaagaagaagaagaaggagaagatgatgatgctgcttcgatagtgaacaaaaaacgcagaatagacgctgaaggagtgagtgaaatagtaggctggcaggacctagattatgttgaaaaagatgatactgcaatggtagcagaatattctgctgaaatttttgcatttttatatagaagagaattagaaacgttaccatcgcacaactatttactcgacaaaacgtccaagtattatttgaggccttccatgagaacaatattagtggattggctggtagaggtgcacgaaaaatttcaatgctatccggaaacgttattcctatccataaacttaatggatagatttttagctaaaaataaagttacgatgaacaagttacaattattggcagttacctcacttttcatcgcggcaaaatttgaagaggtaaatttgcccaaactagctgaatacgcttatatcactgacggcgcggcttctaaaaacgacataaaaaatgcggaaatgttcatgctcacttccttagaattcaacattggttggcccaacccactcaatttcctaaggaggatctccaaggcagatgattacgatccggttaatagaaatattggtaagtttattttagagtatgcctactgctgccaccaattcattcatttacctccatctaccgtaagcgcaatggcaatgtatatagcgagaagaatgaccaacagaaacaagaacgagctatggaatggaacactacagcattacagtggtggtatcgatccaatacacgatgaagcgtttcagtctctctgcattgatctagtcaaagacatcgctagttccaaaactcatttagattcattgattttgaagtacaagaaaccaaggtatggctctgtttatttccaaactttcaagtggtgtacatccgaaatgcatagcaactttcaaaatctatttaatcttaagtag

SEQ ID NO: 14248 - protein, 435 aa, Saccharomyces cerevisiae
MGENHDHEQSIKRNSMIYNENERQLCNSNLKILQNKRALSKNDSSSKQQVQDSKPRRALTDVPVNNNPLSQNKRIVAGSKAAKVRREENIRPIVSAVQKRQIYNDRTAAEQEEEEEEEGEDDDAASIVNKKRRIDAEGVSEIVGWQDLDYVEKDDTAMVAEYSAEIFAFLYRRELETLPSHNYLLDKTSKYYLRPSMRTILVDWLVEVHEKFQCYPETLFLSINLMDRFLAKNKVTMNKLQLLAVTSLFIAAKFEEVNLPKLAEYAYITDGAASKNDIKNAEMFMLTSLEFNIGWPNPLNFLRRISKADDYDPVNRNIGKFILEYAYCCHQFIHLPPSTVSAMAMYIARRMTNRNKNELWNGTLQHYSGGIDPIHDEAFQSLCIDLVKDIASSKTHLDSLILKYKKPRYGSVYFQTFKWCTSEMHSNFQNLFNLK

SEQ ID NO: 14249 - DNA, 1515 bp, Oryza sativa
  CDS (1)..(1515)
atggcggcgaagcggcccgcggcgggggagggaggagggaaggcggcagcgggcgccgcggcggccaagaagcgcgtcgcgcttgtcaacatcaccaacgttgccgccgcggccaacaatgcgaaatttaattcagctacctgggctgcacctgtgaagaagggatctttggccagtggccgcaatgtgtgcacgaatcgggtctcagcggtgaaatcggcttccgccaagccagctccggccatatcccgccatgagagcgccccacagaaggagtcagttattcctcctaaagtgcttagcattgttccgactgctgcacccgcacctgtcactgtaccctgcagcagcttcgtctcccctatgcattcaggagattcagtttcggttgacgagacgatgtcgatgtgtgactcaatgaaaagcccagactttgagtacattgataatggggattcctcctcagttctaggttccttgcagcgaagagcaaacgagaacctgcgtatctcagaggatagagatgttgaagaaactaagtggaataaggatgctccttccccaatggaaatcgaccaaatttgtgatgttgacaataactacgaggatccgcagttgtgtgctactcttgcttctgatatctacatgcacttgcgcgaggccgagaccaggaaacgtccatcaactgattttatggaaacaatccaaaaggatgtaaacccaagcatgagagcgatcctgatagactggcttgtggaagtcgctgaagaatatcgtcttgttcctgatacattatacctgacagttaactacattgatcgttatctttctggcaatgagatcaatcgtcaaagactgcaattacttggagttgcttgtatgcttattgctgcaaaatacgaggagatatgtgcacctcaagtagaagaattctgctatataactgacaacacatacttcagagatgaggttttggaaatggaagcttctgtcctgaattacctgaagtttgaagtgactgcacctacagcaaaatgctttttgaggagatttgtccgtgttgcacaagtatcggatgaggatccagcattgcatcttgagttcctagccaattatgttgctgagctatcactgctggagtacaatctactttcttaccctccttcactagtagcggcatcggctattttcttggccaaattcatactgcagccaacaaagcacccttggaattccacccttgctcactacacacaatacaagtcgtcagagttaagcgactgtgtaaaggcattgcaccgcctttttagcgttggtcccgggagtaaccttcctgcaatcagggagaagtatacccaacataagatactgcatgcagctgatgtgatcgacttgaacatggcaaatgcatttaagaatgtgaaaatattatgtcaatgtccctgtcaatgcaaccttcttgaagaagtcatgctcaagctatttccatactggaagctaagcacagctgtttag

SEQ ID NO: 14250 - protein, 504 aa, Oryza sativa
MAAKRPAAGEGGGKAAAGAAAAKKRVALVNITNVAAAANNAKFNSATWAAPVKKGSLASGRNVCTNRVSAVKSASAKPAPAISRHESAPQKESVIPPKVLSIVPTAAPAPVTVPCSSFVSPMHSGDSVSVDETMSMCDSMKSPDFEYIDNGDSSSVLGSLQRRANENLRISEDRDVEETKWNKDAPSPMEIDQICDVDNNYEDPQLCATLASDIYMHLREAETRKRPSTDFMETIQKDVNPSMRAILIDWLVEVAEEYRLVPDTLYLTVNYIDRYLSGNEINRQRLQLLGVACMLIAAKYEEICAPQVEEFCYITDNTYFRDEVLEMEASVLNYLKFEVTAPTAKCFLRRFVRVAQVSDEDPALHLEFLANYVAELSLLEYNLLSYPPSLVAASAIFLAKFILQPTKHPWNSTLAHYTQYKSSELSDCVKALHRLFSVGPGSNLPAIREKYTQHKILHAADVIDLNMANAFKNVKILCQCPCQCNLLEEVMLKLFPYWKLSTAV

SEQ ID NO: 14251 - DNA, 1272 bp, Oryza sativa
  CDS (1)..(1272)
atggcgtcgaggaggcagtggggagccggtgccggcgccgtcgatgttcctgctcaggaacgcaagggagaggctgccaagattgcgaggaggccaaagaccacgacggttgttgctcagcaaccgccaagaatccgtcgagccctcgccgacgtcagtaatctcgtcaatggccgggctgctctgcctgtcgtaaatcgccagaaggcagcagcagcagcagctgacaagtgcaggaaaccaatcaagcagcgcaacgagaacaacaaggcggccaagccagaagtcatcgtgatcagttcagactccgagaaacataagaaaaatccagcccagagagcagcctcccggagggcgccaatccaaacgctcacctcgattctgaccaagtgcagcagggcttctgacggtgtgatcagcccgaaaaaggagctgatatacgacatcgatgcatctgattctcacaacgagctggcagtggttgattacgtcgaagatatctacagattctacaggaacaccgagaacacctaccggcctctctgcacctacatggtgtcacagaccgagatcaacgagagaatgagagcaatcctgactgattggctcatcgaagtgcactacaggcttatgctgatgccagagacactgtacctcactgtctacataattgatcagtacctgtccctggagaatgtgcccaggaaggagctgcagcttgtcggtgtaagcgccatgttgatagcctgcaagtatgaggagacttgggctccattggttaaggacttccttgtcatatcagacaactccttcagcaggcagcaggtcctgagcacagagaagtccatacttaacaagctccagtggaacctgactgttccgacaatgtacatgttcatccttcgatacctgaaagctgcattgggtgacgaggagctggagcacatgactttcttctacgcagagctcgcactggttcagtactccatgctcttttttgcgccatcggtgatagcagccgctgccgtctacgctgctcggtgtacccttggcctgagcccactatggagcgatcttctggagtaccacaccggcttagctgagccgcaattgctggagtgtgcgaggcggctggtgagcctgcacgcggcggcgccggagagcaggcagaaggtggtgtacaagaagtacgcgagccccaagctcggagccgtctccctccactcgccggccaagaagcttctcccgccgccgtcgccggtggcggcttga

SEQ ID NO: 14252 - protein, 423 aa, Oryza sativa
MASRRQWGAGAGAVDVPAQERKGEAAKIARRPKTTTVVAQQPPRIRRALADVSNLVNGRAALPVVNRQKAAAAAADKCRKPIKQRNENNKAAKPEVIVISSDSEKHKKNPAQRAASRRAPIQTLTSILTKCSRASDGVISPKKELIYDIDASDSHNELAVVDYVEDIYRFYRNTENTYRPLCTYMVSQTEINERMRAILTDWLIEVHYRLMLMPETLYLTVYIIDQYLSLENVPRKELQLVGVSAMLIACKYEETWAPLVKDFLVISDNSFSRQQVLSTEKSILNKLQWNLTVPTMYMFILRYLKAALGDEELEHMTFFYAELALVQYSMLFFAPSVIAAAAVYAARCTLGLSPLWSDLLEYHTGLAEPQLLECARRLVSLHAAAPESRQKVVYKKYASPKLGAVSLHSPAKKLLPPPSPVAA

SEQ ID NO: 14253 - DNA, 1470 bp, Zea mays
  CDS (1)..(1470)
atggctatgcgaaaagaaaaccctgtgcttaatgcttgtcaagcatccaatggccggatcacgcgagctcaagctgctgcaaatcgtcgaagctttggagctttcccttctgttccattgcctgcaaaaaccgaacgaaaacagactgcacaagggaaggcaaaacgaggttcttcatatgacaacaccagtgcaagcgttgcactttcaggcccccagcctaaaaggcgcacagtactcagggatgtgaccaatttgagcaatgctaactctaacaaaagttttgctgctgcaccgaagcttcagacaaagccctctctaaggactggaagaaccgtgagcaaaagcaagccgtgcgcaaaaaagattcctaaaaaaccaccaccagctggtaatggaagtgcattgactaatgttttgaacattgctgaagaaacacaagcggagaagattttggcagagagagtggaacccgttctgttgcttgagaacagggggccactgtcattgcagaatgttgaaaggaacagggacagtgcttgtcatgaggtattctttgaggaaagaaacctcagggataaatgtgaaccttctgtgtcaaagaatggggactcttatgtgttagacattgtagatatcgacaaagataatggcaatcctcaaatgtgtgcttcctacgttgtggagatatactcaaacctaatggcttcagagcttatgagaagaccaagtccaaattacatggagggtttgcaacgggacatcacaaagggcatgagagaaatactcattgattggcttgtggaggtttctgaagaatacaagcttgttccagacacgctgtacctaactgtatatcttattgaccggtttctttctcggaactacattgaaagacagagactacaacttgtgggaataacaagcatgcttgttgcctcgaaatatgaagagatatgtgctcctcgagtagaagagttctgtttcataaccgacaatacatacacaaaagcagaggtgctgaaaatggagagccagctgctgaatgacctgggatttaacctttctgttccaacaacaaaaacatttctcaggagattccttagagcggcacaagcatctcgtaaaactccttctatgactttaggatttctggccaattatctcgcggagttgactttgaccgaatatgagttcttgaaatttcttccgtcgttggtggcagcatcggccgtgtttctcgctagatggacgcttgaccaatccgaccttccatggaaccagactctagagcactacacctcttacaaatgctctgacattcaattgtgtgtctgtgctctacgggaactccagcataacaccagtaactgccctcttaacgccatccgcgagaagtacaggcatcaaaagtttgaatgcgtagcgaacctaacttcaccggagttccctcggtcgttcttcagctga

SEQ ID NO: 14254 - protein, 489 aa, Zea mays
MAMRKENPVLNACQASNGRITRAQAAANRRSFGAFPSVPLPAKTERKQTAQGKAKRGSSYDNTSASVALSGPQPKRRTVLRDVTNLSNANSNKSFAAAPKLQTKPSLRTGRTVSKSKPCAKKIPKKPPPAGNGSALTNVLNIAEETQAEKILAERVEPVLLLENRGPLSLQNVERNRDSACHEVFFEERNLRDKCEPSVSKNGDSYVLDIVDIDKDNGNPQMCASYVVEIYSNLMASELMRRPSPNYMEGLQRDITKGMREILIDWLVEVSEEYKLVPDTLYLTVYLIDRFLSRNYIERQRLQLVGITSMLVASKYEEICAPRVEEFCFITDNTYTKAEVLKMESQLLNDLGFNLSVPTTKTFLRRFLRAAQASRKTPSMTLGFLANYLAELTLTEYEFLKFLPSLVAASAVFLARWTLDQSDLPWNQTLEHYTSYKCSDIQLCVCALRELQHNTSNCPLNAIREKYRHQKFECVANLTSPEFPRSFFS

SEQ ID NO: 14255 - DNA, 1275 bp, Zea mays
  CDS (1)..(1275)
atggagaatctgagatctcaaaactgccaccaaggtgttgccatggagggagtcaagtttgcgccggagaaggccaacaccaaccggagagccctcagcgacatcaagaacataataggaggcccacaccagcacttggcggtcagcaagagggctctgtcagaaaaaccagctgctgctgctgctgcaaatgctaaagatcaagctggctttgttggacaccgtccagtcaccaggaaattcgctgcaacattggcaacccaacctacagttgcccttctggacccaattggaagtgaaagactgaaaagaaacgctgatacggcatttcacacacctgcagatatggaaagcacaaaaatgacagatgacagtcccttgcctatggtgtcggagatggatgaaatgatgagtcctgaactgaaagagatcgagatggaagatattgaggaggcagcacctgatattgacagtggtgatgcaggaaattctctggctgtggctgactatgtagatgaaatttacagattttacaggaaaactgagggtgcaagctgcgtccctacaaattatatgtcaagccaaactgatataaatgagaagatgcgtggcattctaattgactggctcatagaggtacactacaaactagagctgttggaggagacccttttcctaaccgtgaacatcatagacagattcttggcacgtgaaaatgtggtgcggaagaagcttcagttagctggtgtaactgctatgttgctcgcgtgcaagtatgaagaagtgagcgtacctgtggtcgaggatctgatcttgatctgtgatcgtgcatacacaagggctgacattcttgagatggagaggaggatagtgaacacacttaatttcaatatgtcggtgccgactccatactgtttcatgagaaggtttctaaaggcagcacaatcagagaagaagctcgaactcctgtctttcttcatgatcgagttgagtcttgtcgaatatgagatgctccagttctgcccgtctatgctagcagccgctgccatctacaccgctcaatgcaccataaatgggttcaagtcctggaacaaatgctgtgaactgcacacaagatattcagaagaacatctaatggtttgctctaggatgatggttgaactgcaccaaagagcagctcatgggaaacttacaggggtccatagaaagtacaacacttctagatatagctatgctgcgaaatcggaacccgcaactttcttgctggatgcctga

SEQ ID NO: 14256 - protein, 424 aa, Zea mays
MENLRSQNCHQGVAMEGVKFAPEKANTNRRALSDIKNIIGGPHQHLAVSKRALSEKPAAAAAANAKDQAGFVGHRPVTRKFAATLATQPTVALLDPIGSERLKRNADTAFHTPADMESTKMTDDSPLPMVSEMDEMMSPELKEIEMEDIEEAAPDIDSGDAGNSLAVADYVDEIYRFYRKTEGASCVPTNYMSSQTDINEKMRGILIDWLIEVHYKLELLEETLFLTVNIIDRFLARENVVRKKLQLAGVTAMLLACKYEEVSVPVVEDLILICDRAYTRADILEMERRIVNTLNFNMSVPTPYCFMRRFLKAAQSEKKLELLSFFMIELSLVEYEMLQFCPSMLAAAAIYTAQCTINGFKSWNKCCELHTRYSEEHLMVCSRMMVELHQRAAHGKLTGVHRKYNTSRYSYAAKSEPATFLLDA

SEQ ID NO: 14257 - DNA, 1413 bp, Glycine max
  CDS (1)..(1413)
atggataaagtaaatagagtttgtgccaaagatgaagagcgtccactccgaatcaccagagcaagagctagagccttgagagggattactccatactcaagaccctccttaaaaaatgagcagaaaaatgtgcttcgagcacatccgaaaagagcagcatcttctgaaaacaaaacttctgtggttgttcctgctgttgtccaacagaagggaagggcagtgctttcagatgtatcaaacatgtgtgcaaaaccacatgataagtgtactaagtcatcaaagtttcaggccaaaggagtttatacaaagaaaaccaccaagctagcagcctcaagtgtttccactgacgtttcatcaacacaagacaatgttagagcaaagttagctgaagaattatccacaataaagatggtagaatcaaaggacaccttaagagaaggtgtaacagcagacacctcactttcaatgcaaaactctgtgaaatctgatgaactccggaactctccaaacaaagacatagatataatttgtgagaagctgggagcctcagactccctgaccattgtggacattgattcagtggagttaaaggatcctcaactgtggagttcatatgcccctgacatatacaacaatatacgagtcacagagcttcaaaggaaaccattaaccaactacatggacaagttacagaaagatatcaatccaagcatgcgaggaattctgattgattggcttgtggaggtttctgaggaatacaagctagttccagacactctttacctgaccgtgaacctcattgatcggtatctctcaaaaagactcattcagaagcaaaggctccagttgctcggtgttacttgcatgctgattgcatcaaaatatgaagagatttgtgcacctcgagtggaggaattttgcttcatcacagataatacatacacaaaagaagaggtattgaaaatggagagagaagtactggatcttgtgcattttcagttatctgttcccacaatcaaaacttttctaaggagattcatccaagcagcacaatcttcttacaaggctccttgcgttgaactggaattcctggcaaattatttagcagagcttgctcttgttgaatgcaactttttccagtttctaccttcccttgtagctgcatccgctgtgttccttgccaaatggaccctgaatgagtcagaacatccatggaatccaactctgaagcactatacaaaatacaaagcttcagagctcaagactgttgttcttgcactgcaagatctgcaacttaataccaaaggaagctccctgaatgctgtccctgagaagtataagcaacagaagttcaattgtgtggcaaacttgtctccaaaaccggtgcagtcactcttccaggacaaagtgtaa

SEQ ID NO: 14258 - protein, 470 aa, Glycine max
MDKVNRVCAKDEERPLRITRARARALRGITPYSRPSLKNEQKNVLRAHPKRAASSENKTSVVVPAVVQQKGRAVLSDVSNMCAKPHDKCTKSSKFQAKGVYTKKTTKLAASSVSTDVSSTQDNVRAKLAEELSTIKMVESKDTLREGVTADTSLSMQNSVKSDELRNSPNKDIDIICEKLGASDSLTIVDIDSVELKDPQLWSSYAPDIYNNIRVTELQRKPLTNYMDKLQKDINPSMRGILIDWLVEVSEEYKLVPDTLYLTVNLIDRYLSKRLIQKQRLQLLGVTCMLIASKYEEICAPRVEEFCFITDNTYTKEEVLKMEREVLDLVHFQLSVPTIKTFLRRFIQAAQSSYKAPCVELEFLANYLAELALVECNFFQFLPSLVAASAVFLAKWTLNESEHPWNPTLKHYTKYKASELKTVVLALQDLQLNTKGSSLNAVPEKYKQQKFNCVANLSPKPVQSLFQDKV

SEQ ID NO: 14259 - DNA, 1374 bp, Glycine max
  CDS (1)..(1374)
atgatctattggggtgagcctgtgtgtcaggagaatggatggattgtaacgtactggtccttgctcaccacaaagaggaaatcgattcagaacagttctaaaccaatcaaccctacaagttttcaaggagggatagaatgtgtggggaacagaaagatggggcagaacagaagggctttaagcgtgatcaatcaggatctggtggcggaagggagaccttacccttgtgttgttaacaagagggcattggcagaaaaacacaatgtttgtgagaagaagcaggcggatccggggcatcgacccatcacaaggaggtttgctgcacaaattgctagcacacagaaaaatcgtgcagagggaaccaagaagtcaaacttggggaattcaaattcgaatggatttggagagcacatatttgtcgatgaagaacacaagtcaacaacggatgaccagccagtgccaatgtctttagagaagacagagccaatgcatagtgaatcagatcagatggaggaagttgagatggaggatataatcgaagaagagactgttttggacattgatacctgtgatgcaaacaaccctcttgcagtcgtagactatattgaagatctttatgcccactacagaaaaatggagggtactagctgtgtctcgccggattatatggcacaacaatctgacattaatgaaaggatgagggctatactgattgactggcttattgaggtgcacgacaaatttgacctcttgcacgagacattgtttctcacagtcaatcttatagatcgatttttggcaaagcagacagtggcaagaaagaagcttcagttggttggtctagttgccatgcttttggcatgcaagtatgaagaagtttctgtacctgtggtgggggatctaattctcatatcagacaaagcatacacaaggaaggaagttctggaaatggagaagttgatggtgaacacattgcagttcaacatgtctgtgccaacagcatacgtttttatgaaaaggttcctaaaggcagctcaagcagacagaaagcttgagttattggctttcttcctggtagagctatctcttgtggaatatgagatgctgaagttccctccatctttgctagcagcagctgctgtctacacagcccaatgcacaatttatggtttcaaacaatggagcaaaacatgtgaatggcactcaaattactcagaagatcagctattagagtgctcaacattaatggccgcttttcatcagaaggctggaaatggaaaactaactggggtacataggaagtactgctcatctaaatttagctatactgcaaaatgtgaaccagcacgttttcttctggagaacccattgtag

SEQ ID NO: 14260 - protein, 457 aa, Glycine max
MIYWGEPVCQENGWIVTYWSLLTTKRKSIQNSSKPINPTSFQGGIECVGNRKMGQNRRALSVINQDLVAEGRPYPCVVNKRALAEKHNVCEKKQADPGHRPITRRFAAQIASTQKNRAEGTKKSNLGNSNSNGFGEHIFVDEEHKSTTDDQPVPMSLEKTEPMHSESDQMEEVEMEDIIEEETVLDIDTCDANNPLAVVDYIEDLYAHYRKMEGTSCVSPDYMAQQSDINERMRAILIDWLIEVHDKFDLLHETLFLTVNLIDRFLAKQTVARKKLQLVGLVAMLLACKYEEVSVPVVGDLILISDKAYTRKEVLEMEKLMVNTLQFNMSVPTAYVFMKRFLKAAQADRKLELLAFFLVELSLVEYEMLKFPPSLLAAAAVYTAQCTIYGFKQWSKTCEWHSNYSEDQLLECSTLMAAFHQKAGNGKLTGVHRKYCSSKFSYTAKCEPARFLLENPL

SEQ ID NO: 14261 - DNA, 1281 bp, Zea mays
  CDS (1)..(1281)
atggcggcgcgggcggctgacgagaacaggagaccggcggcagggaagcccgcgccaggcgtccgagacatggcgagccggcgcgcgctcacggacatcaagaacctcgtcggggctgccccgtacccctgcgccgtcgccaagaagcccatgctgcagaagagcagaagggacgaaaagcagccagcgttggcaagcagccggcccatgacaaggaaattcgccgcctccttggcgagcaagggccaacctgaatgtcagccgatcgtagctgatccagaacccgaagtttgtcaacagaaggaatcagtaggcgatggcaccgttgatattgacgtggaactctacgagctggtcgacgatagtgatagtgacatcgacatgggtgatgagacagagaacaaggacattatgaaccaagatgaatcgctcatggatattgacagtgcagactcggggaacccgcttgcagcaacagaatatgttgaagagctttacaagttttacagagaaaatgaggctaagagttgtgtaaaccctgattacatgtccagtcagcaagatataaatgcaaagatgagagcaattctgattgactggctgattgaggttcactacaagtttgaactgatggacgagacgctatttcttacggtaaacgtaatagatagattcttggaaaaggaagtggttccaaggaagaagctacaactggttggaatcacagctctgcttcttgcttgcaaatatgaggaggtctcagttccagttgttgaggaccttgtgctcatttctgaccgtgcctacacaaaagggcaaattctagaaatggaaaagttgattctgaacacgctgcaattcaacatgtctgttccaacaccttatgtcttcatgaagaggtttctgaaagcagcagacgcagataaacagcttgagctagtgtcatttttcatgctggagctctgcttggtagagtaccaaatgctgaattataggccttcacatctggctgccgctgcggtttatactgcacaatgtgctattaaccgttgccagcaatggacaaaggtttgcgagtcacacagcagatacactggcgaccaactcctggagtgctcgaggatgatggtagactttcaccagaaggctggaaccggcaagctcactggcgtgcacaggaagtacagtacctacaagttcgggtgcgcggccaagattttgcctgcgcagttcatgctggagtcaggagggacagcaccgcctccttcaggtgcaatctaa

SEQ ID NO: 14262 - protein, 426 aa, Zea mays
MAARAADENRRPAAGKPAPGVRDMASRRALTDIKNLVGAAPYPCAVAKKPMLQKSRRDEKQPALASSRPMTRKFAASLASKGQPECQPIVADPEPEVCQQKESVGDGTVDIDVELYELVDDSDSDIDMGDETENKDIMNQDESLMDIDSADSGNPLAATEYVEELYKFYRENEAKSCVNPDYMSSQQDINAKMRAILIDWLIEVHYKFELMDETLFLTVNVIDRFLEKEVVPRKKLQLVGITALLLACKYEEVSVPVVEDLVLISDRAYTKGQILEMEKLILNTLQFNMSVPTPYVFMKRFLKAADADKQLELVSFFMLELCLVEYQMLNYRPSHLAAAAVYTAQCAINRCQQWTKVCESHSRYTGDQLLECSRMMVDFHQKAGTGKLTGVHRKYSTYKFGCAAKILPAQFMLESGGTAPPPSGAI

SEQ ID NO: 14263 - DNA, 1329 bp, Zea mays
  CDS (1)..(1329)
atggcctcgcgcaaccacaacgccgccgctccgcagcttcaccatcacaaccgagccggtgttcccgctcttggaaagaccaaggccgtgcccgcccgacctgacgctctgaaccggcgaccccctctcggcgatataggcaacctcgtcagcgtccgcccagccacagggaacccgcaggagcaggtcaatcgccccatcactagaagcttcggcgctcaactcgtcaagaaagcgcaggcgaaggccgcaatcaagaatgccgcaatcctgcctgcgaggcatgcgccgaggcaggagaggaaggctcctgtcaagcagcacccgccgccggaggatatcatagtactcagctccgattctgaacagagcagggcgcagtccgagagcagcgctagctccgtccgctccaggaggaaggccatcaacaccctttcttccgtgctctcggctcgctcaaaggctgcctgtggaatcgctggtaagcctagacaagtggtcgatgacatcgacaagctggacgtcaacaatgagctcgcggtggtggaatacattgaggacatctacacgttctacaagattgctcagcacgagagacggccatgtgactacatcgacgcccaactcgagatcaactctaagatgagggctatcctggctgattggataatcgaagtacaccacaagtttgaactgatgcccgaaactctctacctgaccatgtacatcatcgatcagtacctctcgctgcaaccagtcctgcgtaaggagctgcagcttgtcggcgtttcatctatgctgatcgcctgcaagtacgaggagatttgggccccagaggtgaacgacttcatcctcatatcagacagtgcatacagtagagaacagattctttcgatggagaagggaattctgaataggctggagtggaacctgactgtccctacagtgtatatgttccttgtccgttttctgaaggccgcaacattgggcggcaaagttgagaaagagatggagaatatggtgttcttcttcgctgaattggcgctgatgcaatacgatttggtgacgcgcctgccatcgctggtcgctgcttctgctgtctacgcagccagactcactctcaagagggctcccctttggaccgacaccctcaagcaccacacgggcttcagggagtcagaggcagagctcattgaatgcacgaagatgctggtgatcgcgcactcgactgcccctgagagcaagctgagggttgtatacaagaagtattccagcgagcagttcggaggggtcgcgctgcgtccacccgcagaggagatctgcaagtga

SEQ ID NO: 14264 - protein, 442 aa, Zea mays
MASRNHNAAAPQLHHHNRAGVPALGKTKAVPARPDALNRRPPLGDIGNLVSVRPATGNPQEQVNRPITRSFGAQLVKKAQAKAAIKNAAILPARHAPRQERKAPVKQHPPPEDIIVLSSDSEQSRAQSESSASSVRSRRKAINTLSSVLSARSKAACGIAGKPRQVVDDIDKLDVNNELAVVEYIEDIYTFYKIAQHERRPCDYIDAQLEINSKMRAILADWIIEVHHKFELMPETLYLTMYIIDQYLSLQPVLRKELQLVGVSSMLIACKYEEIWAPEVNDFILISDSAYSREQILSMEKGILNRLEWNLTVPTVYMFLVRFLKAATLGGKVEKEMENMVFFFAELALMQYDLVTRLPSLVAASAVYAARLTLKRAPLWTDTLKHHTGFRESEAELIECTKMLVIAHSTAPESKLRVVYKKYSSEQFGGVALRPPAEEICK

SEQ ID NO: 14265 - DNA, 1275 bp, Zea mays
  CDS (1)..(1275)
atggcggcgcgggcggctgacgagaacaggagaccggcggcagggaagcccgcgccaggcgtccgagacatggcgagccggcgcgcgctcacggacatcaagaacctcgtcggggctgccccgtacccctacgccgtcgccaagaagcccatgctgcagaagagcaaaagggacgaaaagcagccagcgttggcaagcagccggcccatgacaaggaaattcgccgcctccttggcgagcaagggccaacctgaatgtcagccgatcgtagctgatccagaacccgaagtttgtcaacagaaggaatcagtaggcgatggcaccgttgatattgacgtggaactctacgagctggtcgacggtagtgatagtgacatcgacatgggtgcgacagagaacaaggacattatgaacgaagatgaattgctcatggatattgacagtgcagactcggggaacccgcttgctgcaacagaatatgttaaagagctttacaccttttacagagaaaatgaggctaagagttgtgtaaggccagattacatgtccagccaacaagacataaactcaaagatgagagcaattctgattgactggctgattgaggttcactacaagtttgaactgatggatgagacgctctttcttatggtaaacataatagatagattcttggaaaaggaagtggttccaaggaagaagctacaactggttggagtcacagctatgctgctcgcttgtaaatatgaggaggtatctgttccagttgttgaggaccttgtgctgatatctgaccgtgcctacacaaaagggcaaattctagaaatggaaaagttgattctgaacacgctgcagttcaacatgtctgttccaacaccttatgtcttcatgaagaggtttctgaaagctgcagatgcagataaacagcttgagctagcgtcatttttcatgctggagctctgcttggtagaataccaaatgctgaattatcggccttcgcatctggctgctgctgcggtttatactgcacagtgtgctatcaatcgttgccagcactggacaaaggtctgcgagtctcatagcagatacactagcgaccaactcctggagtgctcgaggatgatggtagattttcaccagaaggctggaaccagtaagctcactggcgtgcacaggaagtacagtacctacaagttcggttgcgtggccaagattttgcctgcgcagttcctgctggagtcgggagggacaccgcctccttcaggtgcaaactag

SEQ ID NO: 14266 - protein, 424 aa, Zea mays
MAARAADENRRPAAGKPAPGVRDMASRRALTDIKNLVGAAPYPYAVAKKPMLQKSKRDEKQPALASSRPMTRKFAASLASKGQPECQPIVADPEPEVCQQKESVGDGTVDIDVELYELVDGSDSDIDMGATENKDIMNEDELLMDIDSADSGNPLAATEYVKELYTFYRENEAKSCVRPDYMSSQQDINSKMRAILIDWLIEVHYKFELMDETLFLMVNIIDRFLEKEVVPRKKLQLVGVTAMLLACKYEEVSVPVVEDLVLISDRAYTKGQILEMEKLILNTLQFNMSVPTPYVFMKRFLKAADADKQLELASFFMLELCLVEYQMLNYRPSHLAAAAVYTAQCAINRCQHWTKVCESHSRYTSDQLLECSRMMVDFHQKAGTSKLTGVHRKYSTYKFGCVAKILPAQFLLESGGTPPPSGAN

SEQ ID NO: 14267 - DNA, 1275 bp, Zea mays
  CDS (1)..(1275)
atggagaatctgagatctcaaaactgccaccaaggtgttgccatggagggagtcaagtttgcgccggagaaggccaacaccaaccggagagccctcagcgacatcaagaacataataggaggcccacaccagcacttggcggtcagcaagagggctctgtcagaaaaaccagctgctgctgctgctgcaaatgctaaagatcaagctggctttgttggacaccgtccagtcaccaggaaattcgctgcaacattggcaacccaacctacagttgcccttctggacccaattggaagtgaaagactgaaaagaaacgctgatacggcatttcacacacctgcagatatggaaagcacaaaaatgacagatgacagtcccttgcctatggtgtcggagatggatgaaatgatgagtcctgaactgaaagagatcgagatggaagatattgaggaggcagcacctgatattgacagtggtgatgcaggaaattctctggctgtggctgactatgtagatgaaatttacagattttacaggaaaactgagggtgcaagctgcgtccctacaaattatatgtcaagccaaactgatataaatgagaagatgcgtggcattctaattgactggctcatagaggtacactacaaactagagctgttggaggagacccttttcctaaccgtgaacatcatagacagattcttggcacgtgaaaatgtggtgcggaagaagcttcagttagctggtgtaactgctatgttgctcgcgtgcaagtatgaagaagtgagcgtacctgtggtcgaggatctgatcttgatctgtgatcgtgcatacacaagggctgacattcttgagatggagaggaggatagtgaacacacttaatttcaatatgtcggtgccgactccatactgtttcatgagaaggtttctaaaggcagcacaatcagagaagaagctcgaactcctgtctttcttcatgatcgagttgagtcttgtcgaatatgagatgctccagttctgcccgtctatgctagcagccgctgccatctacaccgctcaatgcaccataaatgggttcaagtcctggaacaaatgctgtgagctgcacacaaaatattcagaagaacatctaatggtttgctctaggatgatggttgaactgcaccaaagagcagctcatgggaaacttacaggggtccatagaaagtacaacacttctagatatagctatgctgcgaaatcggaacccgcaactttcttgctggatgcctga

SEQ ID NO: 14268 - protein, 424 aa, Zea mays
MENLRSQNCHQGVAMEGVKFAPEKANTNRRALSDIKNIIGGPHQHLAVSKRALSEKPAAAAAANAKDQAGFVGHRPVTRKFAATLATQPTVALLDPIGSERLKRNADTAFHTPADMESTKMTDDSPLPMVSEMDEMMSPELKEIEMEDIEEAAPDIDSGDAGNSLAVADYVDEIYRFYRKTEGASCVPTNYMSSQTDINEKMRGILIDWLIEVHYKLELLEETLFLTVNIIDRFLARENVVRKKLQLAGVTAMLLACKYEEVSVPVVEDLILICDRAYTRADILEMERRIVNTLNFNMSVPTPYCFMRRFLKAAQSEKKLELLSFFMIELSLVEYEMLQFCPSMLAAAAIYTAQCTINGFKSWNKCCELHTKYSEEHLMVCSRMMVELHQRAAHGKLTGVHRKYNTSRYSYAAKSEPATFLLDA

SEQ ID NO: 14269 - DNA, 1539 bp, Zea mays
  CDS (1)..(1539)
atgtcgaccatcgctgcctcccgccgctcgtcctcctcgtcctcttccgcgaccgccaagcgccccgcgattgcggacggccccgggggacccaaggcgaccgccgcacaggccaagaagcgcgtggcgctcggcaacatcaccaacgttgccgcgcggggagggagggcttccgttggcggcagccttgggaacgtcatggcgcccaccagcagcgcgaagttgaatccaacggtacccttgaagaagccgtctttggcaacaagtgctcggagtgtgagttcttccatccggggttctgctgacaaaccggcttccatcaagccagctccaccagtagcacgccatggcagcgcaacacaaaggcataacaatgttcctcctcctaaagtgcctaccattgccgatgtgccaagtcgtgctcctgccttggtgtcctgcaccggcttggtgtctcctggacgctcaggagattctgtttcatccgatgagacgatgtcgacttgcgactccatgaaaagcccagactttgagtacgtagacaatcaggacacctcgatgctggcttcgttgcagcgacggacaagtgaacatctgcgaatatcagaggatagagatgttgaagaaaataagcggaagaaaaatgccgtggccccaatggaaattgaccgcatctgtgatgttgacagtgaatatgaggatccacagctgtgcgctactctggcttctgacatttacatgcacttgcgagaggctgagacgaagaaaagaccgtcaactgatttcatggaaacgattcaaaaagatgtcaacccaagcatgagagcaattttgatagactggctcgtggaagttgctgaagaatatcgtcttgttcctgatactttgtacctgacagtcaactacattgaccgttatctttctggcaacgaaatcagccgccaacggctgcaattacttggtgttgcatgcatgcttatagctgcaaaatacgaggagatatgtgcaccacaagtagaagaattctgctacataacagacaatacatatttcagagatgaggttctagatatggaagcttctgtactgaattacttgaagtttgaaatgacagcacctacagcaaagtgctttttgaggagatttgctcgtgctgcacaagcgtgtgatgaggatcctgctttgcatctggagttccttgccaattacatcgctgagctatcactactggagtacagtctactctcttaccctccatcactaatagctgcatcggctattttcttggcgagatttatactacagccaacaaagtatccttggaattccacactcgctcattacacacagtacaaaccgtccaaactgagcgaatgtgtaaaggcattgcatcgcctttgcagcgttggttctggtagcaaccttccagcaatcagagaaaagtacagtcaacataagtacaaatttgttgcaaagaagcagtgtccaccgcagataccctcactcgaattctttcgggacgcgacatgcctagactag

SEQ ID NO: 14270 - protein, 512 aa, Zea mays
MSTIAASRRSSSSSSSATAKRPAIADGPGGPKATAAQAKKRVALGNITNVAARGGRASVGGSLGNVMAPTSSAKLNPTVPLKKPSLATSARSVSSSIRGSADKPASIKPAPPVARHGSATQRHNNVPPPKVPTIADVPSRAPALVSCTGLVSPGRSGDSVSSDETMSTCDSMKSPDFEYVDNQDTSMLASLQRRTSEHLRISEDRDVEENKRKKNAVAPMEIDRICDVDSEYEDPQLCATLASDIYMHLREAETKKRPSTDFMETIQKDVNPSMRAILIDWLVEVAEEYRLVPDTLYLTVNYIDRYLSGNEISRQRLQLLGVACMLIAAKYEEICAPQVEEFCYITDNTYFRDEVLDMEASVLNYLKFEMTAPTAKCFLRRFARAAQACDEDPALHLEFLANYIAELSLLEYSLLSYPPSLIAASAIFLARFILQPTKYPWNSTLAHYTQYKPSKLSECVKALHRLCSVGSGSNLPAIREKYSQHKYKFVAKKQCPPQIPSLEFFRDATCLD

SEQ ID NO: 14271 - DNA, 25 bp, Artificial sequence
  primer
atgcatcataactcacagtctttga

SEQ ID NO: 14272 - DNA, 26 bp, Artificial sequence
  primer
ttagttagatctttctactctgtgtt

SEQ ID NO: 14273 - protein, 261 aa, Artificial sequence
  consensus sequence
  Variant (2)..(4): Xaa in position 2 to 4 is any amino acid
  Variant (6)..(12): Xaa in position 6 to 12 is any amino acid
  Variant (14)..(20): Xaa in position 14 to 20 is any amino acid
  Variant (21)..(21): Xaa in position 21 is any or no amino acid
  Variant (23)..(31): Xaa in position 23 to 31 is any amino acid
  Variant (32)..(35): Xaa in position 32 to 35 is any or no amino acid
  Variant (38)..(39): Xaa in position 38 to 39 is any amino acid
  Variant (41)..(41): Xaa in position 41 is any amino acid
  Variant (45)..(46): Xaa in position 45 to 46 is any amino acid
  Variant (48)..(52): Xaa in position 48 to 52 is any amino acid
  Variant (54)..(55): Xaa in position 54 to 55 is any amino acid
  Variant (59)..(59): Xaa in position 59 is any amino acid
  Variant (61)..(62): Xaa in position 61 to 62 is any amino acid
  Variant (64)..(65): Xaa in position 64 to 65 is any amino acid
  Variant (68)..(68): Xaa in position 68 is any amino acid
  Variant (70)..(75): Xaa in position 70 to 75 is any amino acid
  Variant (76)..(79): Xaa in position 76 to 79 is any or no amino acid
  Variant (83)..(83): Xaa in position 83 is any amino acid
  Variant (85)..(90): Xaa in position 85 to 90 is any amino acid
  Variant (92)..(92): Xaa in position 92 is any amino acid
  Variant (97)..(99): Xaa in position 97 to 99 is any amino acid
  Variant (101)..(109): Xaa in position 101 to 109 is any amino acid
  Variant (111)..(112): Xaa in position 111 to 112 is any amino acid
  Variant (114)..(121): Xaa in position 114 to 121 is any amino acid
  Variant (123)..(128): Xaa in position 123 to 128 is any amino acid
  Variant (130)..(130): Xaa in position 130 is any amino acid
  Variant (132)..(135): Xaa in position 132 to 135 is any amino acid
  Variant (136)..(136): Xaa in position 136 is any or no amino acid
  Variant (138)..(141): Xaa in position 138 to 141 is any amino acid
  Variant (146)..(148): Xaa in position 146 to 148 is any amino acid
  Variant (150)..(158): Xaa in position 150 to 158 is any amino acid
  Variant (159)..(163): Xaa in position 159 to 163 is any or no amino acid
  Variant (165)..(169): Xaa in position 165 to 169 is any amino acid
  Variant (171)..(182): Xaa in position 171 to 182 is any amino acid
  Variant (185)..(186): Xaa in position 185 to 186 is any amino acid
  Variant (189)..(189): Xaa in position 189 is any amino acid
  Variant (191)..(197): Xaa in position 191 to 197 is any amino acid
  Variant (199)..(202): Xaa in position 199 to 202 is any amino acid
  Variant (203)..(216): Xaa in position 203 to 216 is any or no amino acid
  Variant (218)..(222): Xaa in position 218 to 222 is any amino acid
  Variant (223)..(223): Xaa in position 223 is any or no amino acid
  Variant (225)..(254): Xaa in position 225 to 254 is any amino acid
  Variant (255)..(259): Xaa in position 255 to 259 is any or no amino acid
YXXXIXXXXXXXEXXXXXXXXYXXXXXXXXXXXXXMRXXLXDWLXXVXXXXXLXXETLXLXXNXXDRXLXXXXXXXXXXLQLXGXXXXXXAXKYEEXXXPXXXXXXXXXDXXYXXXXXXXXEXXXXXXLXFXXXXXPXXXXFLRRXXXAXXXXXXXXXXXXXXLXXXXXEXXXXXXXXXXXXPSXXAAXAXXXXXXXLXXXXXXXXXXXXXXXXXXWXXXXXXYXXXXXXXXXXXXXXXXXXXXXXXXXXXXXXXXXXXKY

SEQ ID NO: 14274 - protein, 34 aa, Artificial sequence
  protein pattern
  Variant (2)..(3): Xaa in position 2 to 3 is any amino acid
  Variant (4)..(4): Xaa in position 4 is Leu, Met or Val
  Variant (5)..(5): Xaa in position 5 is any amino acid
  Variant (6)..(6): Xaa in position 6 is Asp, Glu or Asn
  Variant (8)..(8): Xaa in position 8 is Ile, Leu or Val
  Variant (9)..(10): Xaa in position 9 to 10 is any amino acid
  Variant (11)..(11): Xaa in position 11 is Ile, Leu or Val
  Variant (12)..(16): Xaa in position 12 to 16 is any amino acid
  Variant (18)..(18): Xaa in position 18 is Phe, Leu, Met or Val
  Variant (19)..(19): Xaa in position 19 is any amino acid
  Variant (20)..(20): Xaa in position 20 is Asp or Glu
  Variant (23)..(23): Xaa in position 23 is Phe or Tyr
  Variant (25)..(27): Xaa in position 25 to 27 is any amino acid
  Variant (28)..(28): Xaa in position 28 is any or no amino acid
  Variant (30)..(30): Xaa in position 30 is any or no amino acid
  Variant (32)..(32): Xaa in position 32 is Gln or Arg
  Variant (33)..(33): Xaa in position 33 is Phe or Tyr
  Variant (34)..(34): Xaa in position 34 is Leu or Met
RXXXXXWXXXXXXXXXLXXXTLXLXXXXIXDXXX

SEQ ID NO: 14275 - DNA, 1548 bp, Saccharomyces cerevisiae
  CDS (1)..(1548)
atgtttcaacgaaagactttacagagaaggaacttgaaagggctcaatcttaacctgcacccagatgtgggcaataatggccaattgcaggaaaagacagagactcaccagggacaatctcgaatagaaggccacgtgatgtctaacattaatgcaatacagaataatagcaacctgtttttgcgaagaggcataaaaaaaaaactgacgttggatgcgtttggtgatgaccaagctatatcgaaaccaaacactgtggtaatacagcaaccgcaaaatgaacctgttttagttctgtcttctctatcacaatccccgtgtgtatcatcatcatcatctttgtccacgccatgcattatagatgcgtacagtaataatttcggattatcgccatcatccacgaattctactccctctacgattcagggattgtccaatattgcaacaccagttgaaaacgaacattcgatatcactaccacctttggaggaaagcctatcgccagccgcagcagatctgaaagatacgttgtcgggaacttcaaatggtaattatatacaactccaggacttggttcagttggggaaaattggtgctggaaattctggaactgtggtgaaggcactacatgttcctgattccaaaatagttgccaaaaaaaccattcctgtggaacagaataacagtacaatcatcaaccaattagttagggaattatctatcgtcaaaaacgttaagccccatgaaaacattatcaccttctatggagcttattataaccagcatataaataatgaaatcataattttaatggaatactctgattgtggttctttagataaaatactgtccgtttataaaaggtttgttcaaagagggactgtttcgagtaagaaaacctggttcaacgaattaacaatatcaaaaatagcgtatggcgtactaaatggcttggatcatttgtaccgacaatataagatcattcatcgtgatatcaagccttccaatgttctgattaatagtaaggggcagattaagttatgtgattttggagtttccaaaaaactaataaattctatcgctgatacatttgttggaacgtccacttatatgtcaccagagaggatacaaggaaacgtttattctatcaaaggggacgtttggtcattgggcttaatgatcatcgagctggtaactggagagtttcccctaggtgggcataacgatacacctgatggcatattggatttgctgcaacgtattgtcaacgagccttcaccaagattacccaaagaccgtatctattccaaggaaatgacagattttgtcaataggtgttgtattaagaatgaaagggaaaggtcatcgattcatgaattgctacatcatgatcttataatgaaatacgtatcaccgtctaaagatgataaatttagacattggtgtagaaaaataaaatctaaaataaaggaagacaagagaattaaaagagaagccttggaccgtgccaagttagaaaagaaacaatcggaaagatcaacccattga

SEQ ID NO: 14276 - protein, 515 aa, Saccharomyces cerevisiae
MFQRKTLQRRNLKGLNLNLHPDVGNNGQLQEKTETHQGQSRIEGHVMSNINAIQNNSNLFLRRGIKKKLTLDAFGDDQAISKPNTVVIQQPQNEPVLVLSSLSQSPCVSSSSSLSTPCIIDAYSNNFGLSPSSTNSTPSTIQGLSNIATPVENEHSISLPPLEESLSPAAADLKDTLSGTSNGNYIQLQDLVQLGKIGAGNSGTVVKALHVPDSKIVAKKTIPVEQNNSTIINQLVRELSIVKNVKPHENIITFYGAYYNQHINNEIIILMEYSDCGSLDKILSVYKRFVQRGTVSSKKTWFNELTISKIAYGVLNGLDHLYRQYKIIHRDIKPSNVLINSKGQIKLCDFGVSKKLINSIADTFVGTSTYMSPERIQGNVYSIKGDVWSLGLMIIELVTGEFPLGGHNDTPDGILDLLQRIVNEPSPRLPKDRIYSKEMTDFVNRCCIKNERERSSIHELLHHDLIMKYVSPSKDDKFRHWCRKIKSKIKEDKRIKREALDRAKLEKKQSERSTH

SEQ ID NO: 14277 - DNA, 1515 bp, Kluyveromyces lactis NRRL Y-1140
  CDS (1)..(1515)
atgattacacgtacccaaaacggctcgatgttattgaatcgaataaaccatgaaccgtcgaatgatagtgcagagggatcgtgcaatagtttgttcaaaccgaagactttgaaacggaagaatttgaagcatttgactctagaatcatcatgttcatcatcatcttcctctcctgacgaaataccgaaaggttttagtaatggaaatggtccaacactcagtttgatgttggagaagcttccggtccgtgaggaaataagtccaattagcagagacacttcattccagacggtttcattccttcaagggagttctagtacatcagatatatcttccattgtcagcgggactacaccaaccacaagagatgctccaatgtcacttactcctacaggagtcagtatgatgcaacaggagacagatgaaacggccacattgactactcagattgctcgactttctttaaccccagagaacggaattcaactcgaaaaccttgtacgattgagcaagattggagcgggaaattcgggtactgtggtgaagactttgcatgtacctgattctagaatcatagctaagaaaactataccagtagagaataaggaagtgctgaaaaatcaacttgttagagaactaaccatcatgaaaaatgtttcagcccatgataacattgttggtttctacggtgcattttacaatccatccaccactaacgaaatagtgattcttatggaatatatggattgtggctcgttagataagattttgtcagtttacagatctgattgccataggaaaaacgtttctatatcgtgcaagacatcgtggttcaacgaaatgcctctctcaaggatctccttttgtgttttaaatggacttatctatctttatgactgctataaaatcattcacagggacatcaaaccgtccaatatattgataaactcgaagggagacgtaaagatctgcgattttggtgtctctactactctaattaactctcttgcggatacctttgtcggaacctccacttacatgtcacctgaacgtatccaaggtggcagatatactactaaaggtgatgtgtggtcattaggtcttatgatcatcgagctcagtagtggtgagttcccactaggtggacatcacgacacaccagaagggattcttgatcttttacagagaattgtcaatgaacctgctccaaaactgtcaaaaaatgaacattactccatagaaatgacagatttcgtgaacaggtgttgcattaaggaggagagaggacgatcatctttgaaagaattgatatgtcatgatttcatctgtaagtataacaacagagacactattgcaaaagaattcaggcattggtgcaaaaaagtgaagaagcggatcaaagaggataagatgataagaagagaagagacagagagaagtaagatcgaaaaaagacaattagagaaagcagcgttggctgttacagccgcaaggtcttcgagtacaaggcgatga

SEQ ID NO: 14278 - protein, 504 aa, Kluyveromyces lactis NRRL Y-1140
MITRTQNGSMLLNRINHEPSNDSAEGSCNSLFKPKTLKRKNLKHLTLESSCSSSSSSPDEIPKGFSNGNGPTLSLMLEKLPVREEISPISRDTSFQTVSFLQGSSSTSDISSIVSGTTPTTRDAPMSLTPTGVSMMQQETDETATLTTQIARLSLTPENGIQLENLVRLSKIGAGNSGTVVKTLHVPDSRIIAKKTIPVENKEVLKNQLVRELTIMKNVSAHDNIVGFYGAFYNPSTTNEIVILMEYMDCGSLDKILSVYRSDCHRKNVSISCKTSWFNEMPLSRISFCVLNGLIYLYDCYKIIHRDIKPSNILINSKGDVKICDFGVSTTLINSLADTFVGTSTYMSPERIQGGRYTTKGDVWSLGLMIIELSSGEFPLGGHHDTPEGILDLLQRIVNEPAPKLSKNEHYSIEMTDFVNRCCIKEERGRSSLKELICHDFICKYNNRDTIAKEFRHWCKKVKKRIKEDKMIRREETERSKIEKRQLEKAALAVTAARSSSTRR

SEQ ID NO: 14279 - DNA, 1515 bp, Debaryomyces hansenii CBS767
  CDS (1)..(1515)
atgatgcgattgaataatgattcgctgacttcaataggatcaaacaaagacaagaagttacccccaatcccgaattcacaggaaaatgaagcaaaaaccaccaatattataccaaatgaggatctgatattagaatccaagacattgaaacgtaagaatttcaagaaattgtcattagactcaccatcaacaacatctacaccatcagcatcgcaagcagaaaatacgtcaacagacatgggattacgatacccacctagctctaagtcgggtagaattagaccagcaccattgatgaatttaaacaggaactcacagggtaaattaaacatcaatcaaagtaatagaaatatagacccagatacacagtcgtctacggatgttattataaaccatttttcgaatcttgagttatcaaatatgaataagaggaacccttcgattgcaagcagaaaaagacaaacagttatttcctccatatctccaacgaaatctagtgcatcatctccgaacgatgcaaatttgaattctctaaacttaacagatcaacaatcgcctatcgcgacgacatcctcgataaaattgaataataatgacttgttgacgttgaagaatttgggttctgggaactcagggactgtttcgaagatccttcatattccaacacagaaaacaatggctaaaaaaataatacatatcgatctgaaaagtgtcattcagactcagataataagggagttacggatattacacgaatgccaatctccatttattattgaattttacggagcttttattaataataacaacacaatagtgatttgcatggaatactgtaattgtgggtctttagataaaatcttaccactttgtcagaataatcaatttcccttatttgtattaaagaagttgtcctatgcaattctatcggggttaacctatttatattctacgcataaaatcatccatcgagatattaaaccaagcaatgtcctaatgaatcataaaggtgaatttaaattatgtgatttcggtgtcctgagagaattgactaattcgctcgcgatggcggacacttttgtggggacatcaacatatatgtcaccagagagaatacaaggtttgacttatggtgtaaagtcagatgtttggtctatgggtttaatgttgatcgaattagcaaggggaatccctgtttgggtagacgatggtgaggaggaaggtcctcaaggccctgagggtattctagatttgttgcaaagaatcgtcaacgaggcgcctccttccttagccaataagactaacacaacaacaaatcaaccgttcgatgatatattatgtaaatttatcgattcttgtctaataaaggatgacaatttgagaaaatcaccatgggatttattaaatgaaccccaaggattcatatcgggagtcgaaaaggggctttacgataaagacgtcaaggtgtgggccaaagggataagaaaattgcataaagaaaagaatgagagttag

SEQ ID NO: 14280 - protein, 504 aa, Debaryomyces hansenii CBS767
MMRLNNDSLTSIGSNKDKKLPPIPNSQENEAKTTNIIPNEDLILESKTLKRKNFKKLSLDSPSTTSTPSASQAENTSTDMGLRYPPSSKSGRIRPAPLMNLNRNSQGKLNINQSNRNIDPDTQSSTDVIINHFSNLELSNMNKRNPSIASRKRQTVISSISPTKSSASSPNDANLNSLNLTDQQSPIATTSSIKLNNNDLLTLKNLGSGNSGTVSKILHIPTQKTMAKKIIHIDLKSVIQTQIIRELRILHECQSPFIIEFYGAFINNNNTIVICMEYCNCGSLDKILPLCQNNQFPLFVLKKLSYAILSGLTYLYSTHKIIHRDIKPSNVLMNHKGEFKLCDFGVLRELTNSLAMADTFVGTSTYMSPERIQGLTYGVKSDVWSMGLMLIELARGIPVWVDDGEEEGPQGPEGILDLLQRIVNEAPPSLANKTNTTTNQPFDDILCKFIDSCLIKDDNLRKSPWDLLNEPQGFISGVEKGLYDKDVKVWAKGIRKLHKEKNES

SEQ ID NO: 14281 - DNA, 1173 bp, Tribolium castaneum
  CDS (1)..(1173)
atgtcgaagaacaagctaaacctgaccctccccccgggttcgctggaccaaacccccacggtgacccccacaatgtcttttccgtgcgtttcgaaactggagggcagtttcaggtcgaacaacgtcgggggctccagcatcgacaacctaacggcccggatcgagggcttggagatggacgccacgcagaggaggcgcattgaggtgttcctgtgccagaaggagaaaatcgggggtgatttgagcgacgacgatttggaaaaactgggcgagttggggtcggggaacggcggcgtcgttattaaagtccgccataaatccgggctcatcatggcccggaaattaatccacttggaggtgaaacaggcgatcaaactccagataattcgcgaattgaaagtcttgcacgagtgcaatttcgcgcacattgtgggcttctacggcgcgttttacagcgatggggagatcagcatctgtatggagtatatggacgctgggtctttagacttaattcttaaaaaagccggacggattcccgaaaatatactcgggaagattaccgttgcggttttgaaggggctgagctacttgagggataaacacgcgattatgcaccgcgatgttaagcccagtaatatactcattaatagtagcggcgagatcaagatttgtgattttggggtctcgggacaacttatagactcgatggcgaactctttcgtcggaacgagaagctacatgtcgccggagagactccaaggaacgcattactcagtccaaagtgatatttggtctctcggtttatcactagtggagatggcaatcggcatgtacccaatcccacctcctgatccagaaacgttgaaagcgatgtttgagtcgcgaaacgacaacgattcacctgaccacactaaagggcctcgccctatggcaatcttcgagcttctggactacatcgtcaacgagcctccgccgaaactgccaagcgggttattttcagacgaattcaaagattttgttgataggtgtttaagaaaaaatccggatgaaagggccgacttgaaaaccttgatgaaccacgaatggatcaaaaaagccgaagccgaggacgtggacatcgccggttgggtttgtaaaacaatggaaattcaaccgccacaaaataaagtataa

SEQ ID NO: 14282 - protein, 390 aa, Tribolium castaneum
MSKNKLNLTLPPGSLDQTPTVTPTMSFPCVSKLEGSFRSNNVGGSSIDNLTARIEGLEMDATQRRRIEVFLCQKEKIGGDLSDDDLEKLGELGSGNGGVVIKVRHKSGLIMARKLIHLEVKQAIKLQIIRELKVLHECNFAHIVGFYGAFYSDGEISICMEYMDAGSLDLILKKAGRIPENILGKITVAVLKGLSYLRDKHAIMHRDVKPSNILINSSGEIKICDFGVSGQLIDSMANSFVGTRSYMSPERLQGTHYSVQSDIWSLGLSLVEMAIGMYPIPPPDPETLKAMFESRNDNDSPDHTKGPRPMAIFELLDYIVNEPPPKLPSGLFSDEFKDFVDRCLRKNPDERADLKTLMNHEWIKKAEAEDVDIAGWVCKTMEIQPPQNKV

SEQ ID NO: 14283 - DNA, 1383 bp, Yarrowia lipolytica
  CDS (1)..(1383)
atgtgtgtggactcttgtgttcagagatcgtcgttgccccatttgtcccggccacctggcaacttgcacaaaataattaactccgatatatatatatatatcaagccacatgccccaacccccctacttgtagcttttgcacccacaccccatccatccacaaccacttccccattcggccaaggtctgcaccaagcgcatcgccaacgcgtagcgtctctcccaacgtacggtaaaaccacaaccttcaacctgccagacaatagaccgataaaaacggtacattgtccatcgtgtgaacatgtctgtcgacctcaaacccaagacgctgaagcgcaaaaacttcaagaagctgtcactcaacgccgacgccggagtggcgccccaggcaacagcttcccctccgccatcacagcccttcaccctcgacaaacccacgctcccagagagcggccctcagcaaggcaacctgataagccaaatgggaatcgctgggagctgggcgtggagttcaaaatcgacatccgggctcaggatctgcgcaccatacaggagctgggcgccgggaacggcgggtcggtctcccgggtggaacacatccccactggtgccgtcatggccaagaaggtgatccatatcggaggcaaagaggccgtgcgacgccagattttgcgggagctgcacattatgcacgagtgcgactcgccctacattgtctccttctacggcgccttcatcaacgagtcgtccggcgacgtggtcatgtgcatggagtttatggactgcggccacttggaccgcatctacaagaaggccggcccgctgaccgaagagattgtcggccatatcaccgtggccgtcgtcgagggcctaacgtatctatacaacgagcaccgcatcgtccacagagacgtcaagccgtccaacattctcgtcaactcccatggccagatcaagctgtgcgactttggagtgtctggcgagctcatcaactccatcgcagacacctttgttggcacctcaacgtacatgtcacccgaacgaatccagggaggaaactacactgtcaagtccgacgtgtggtcgcttggcatctcgctgctggagttgctgctgggaaagttcccctttgacatggctaacggagctgtgggacccatgggtattcttgatctgctgcagcgaatcgtcaacgaacctccgccaacccttccggcagaagacaccaggttctcgcccgtgtgcagacggtttgtcgaccggtgtcttgtaaaggagcccgagcgtccttcccctcagcagctccatccaacgatgccttttatcatcacgtctcgggccaagcaggttgacatgaaggcctgggccatgagcgtgcagtag

SEQ ID NO: 14284 - protein, 460 aa, Yarrowia lipolytica
MCVDSCVQRSSLPHLSRPPGNLHKIINSDIYIYIKPHAPTPLLVAFAPTPHPSTTTSPFGQGLHQAHRQRVASLPTYGKTTTFNLPDNRPIKTVHCPSCEHVCRPQTQDAEAQKLQEAVTQRRRRSGAPGNSFPSAITALHPRQTHAPRERPSARQPDKPNGNRWELGVEFKIDIRAQDLRTIQELGAGNGGSVSRVEHIPTGAVMAKKVIHIGGKEAVRRQILRELHIMHECDSPYIVSFYGAFINESSGDVVMCMEFMDCGHLDRIYKKAGPLTEEIVGHITVAVVEGLTYLYNEHRIVHRDVKPSNILVNSHGQIKLCDFGVSGELINSIADTFVGTSTYMSPERIQGGNYTVKSDVWSLGISLLELLLGKFPFDMANGAVGPMGILDLLQRIVNEPPPTLPAEDTRFSPVCRRFVDRCLVKEPERPSPQQLHPTMPFIITSRAKQVDMKAWAMSVQ

SEQ ID NO: 14285 - DNA, 1191 bp, Drosophila melanogaster
  CDS (1)..(1191)
atgtcgaagaacaagctgaatctggtgctgccgccggtaaatacggaggcaactgttgccgccgccacagtggcgccgacgccgccattcaaaaccccctcgggcacagacacacacagtttgctggggaagcccaagacgagcatcgatgcgctgacagagacgctggagggtctggacatgggcgacacggaacgcaagcggatcaagatgttcctcagccagaaggagaagatcggcgagctgtccgacgaggatctggagaagctgggcgagctcggatcgggcaatggcggcgtggtgatgaaggtccggcacacgcacacacacctgatcatggccaggaaactgatccatctggaggtgaagccggcgatcaagaaacagatcctgcgcgaactgaaagtcctgcacgaatgtaatttcccgcacattgtcggtttctacggcgccttctacagcgacggcgagatcagtatctgcatggagtatatggacggtggatcacttgacctgatcctcaagagggccggtcgaataccggagtccattctcggcaggatcacgctggcggtactcaagggcttgagctatctgcgcgacaatcacgccatcatccaccgtgacgtgaagccgagcaatatcctcgtcaatagcagcggcgagatcaagatctgtgatttcggcgtctccggtcaactgatcgactcgatggccaactcctttgtgggcacccgtagctatatgtcgccggagcgattgcagggcacccactactccgtgcagtcggacatctggtcgttgggtctgtcgctggtggagatggccatcggcatgtaccccatcccgccgccaaacaccgccaccctggagtcgatattcgccgacaatgcggaggagagcggccagccgacggacgagcccagggcaatggccatcttcgagctgctggattatattgtaaacgaaccgccgcccaagctagagcacaagatcttctccaccgagttcaaggacttcgtggacatctgcctgaagaaacagcccgacgagcgggcagatctcaagaccctgctgagtcatccgtggatacgcaaggcggaattggaggaggtggatatatccggctgggtgtgcaagacaatggacctgccgccatcgacgccaaagcgtaatacgtcgcccaactag

SEQ ID NO: 14286 - protein, 396 aa, Drosophila melanogaster
MSKNKLNLVLPPVNTEATVAAATVAPTPPFKTPSGTDTHSLLGKPKTSIDALTETLEGLDMGDTERKRIKMFLSQKEKIGELSDEDLEKLGELGSGNGGVVMKVRHTHTHLIMARKLIHLEVKPAIKKQILRELKVLHECNFPHIVGFYGAFYSDGEISICMEYMDGGSLDLILKRAGRIPESILGRITLAVLKGLSYLRDNHAIIHRDVKPSNILVNSSGEIKICDFGVSGQLIDSMANSFVGTRSYMSPERLQGTHYSVQSDIWSLGLSLVEMAIGMYPIPPPNTATLESIFADNAEESGQPTDEPRAMAIFELLDYIVNEPPPKLEHKIFSTEFKDFVDICLKKQPDERADLKTLLSHPWIRKAELEEVDISGWVCKTMDLPPSTPKRNTSPN

SEQ ID NO: 14287 - DNA, 1080 bp, Glycine max
  CDS (1)..(1080)
atgaagaaagcagggagcataagctctggtctcaaactcacagttcctgctgcatctgatcgtgattcatttacaaagttccggtctgagcctgaaagtggaacgtttaaggctggtgacttgcttgtcaataatgaaggagttcgaattgtctctgagaatgaagtggaagctccacccccgatcaggccacaagataaccagttaagtttggcagacattgatacaatcaaagtgattggaaaaggaaatggaggggtagtgcaattggtgcaacacaaatggactaatcagttttttgcattgaaggaaatccaaatgcctattgaggagcctatccgcaggcagatagcacaagagctaaaaatcaatcaatcagcacaatgtccctatgttgttgtttgctacaattcattctatcataacggtgtcatatcaatcattttagagtacatggacggagggtccttggaagatcttctgagcaaagttaaaacaattccagagtcgtatctttctgccatctgcaagcaggtgctcaagggtttaatgtatcttcactatgcaaaacatattatccatagggacttaaaaccttctaatctgctgataaatcatagaggggaggtaaagattactgactttggtgtaagtgtaatcatggaaaatacatctggtcaagcaaatacattcattggcacatacagctatatgtcgccagaaagaatcattggtaaccagcatggctacaactacaaaagtgatatatggagcttgggactgattttgctcaagtgtgctacggggcagtttccatatacaccaccggatcgtgaagggtgggaaaatattttccagcttattgaagtcattgtggaaaaaccttctcccagtgctccatcagatgatttttctccagaattttgctcatttatctcagcatgtttacagaaaaatccaggggatagaccgtcagctcgggaccttataaatcatccttttatcaacatgcatgaggacttgaacgtggatctttcagcttatttcttcaactcaggatgtacacttgcaaccatatag

SEQ ID NO: 14288 - protein, 359 aa, Glycine max
MKKAGSISSGLKLTVPAASDRDSFTKFRSEPESGTFKAGDLLVNNEGVRIVSENEVEAPPPIRPQDNQLSLADIDTIKVIGKGNGGVVQLVQHKWTNQFFALKEIQMPIEEPIRRQIAQELKINQSAQCPYVVVCYNSFYHNGVISIILEYMDGGSLEDLLSKVKTIPESYLSAICKQVLKGLMYLHYAKHIIHRDLKPSNLLINHRGEVKITDFGVSVIMENTSGQANTFIGTYSYMSPERIIGNQHGYNYKSDIWSLGLILLKCATGQFPYTPPDREGWENIFQLIEVIVEKPSPSAPSDDFSPEFCSFISACLQKNPGDRPSARDLINHPFINMHEDLNVDLSAYFFNSGCTLATI

SEQ ID NO: 14289 - DNA, 26 bp, Artificial sequence
  primer
atgtttcaacgaaagactttacagag

SEQ ID NO: 14290 - DNA, 25 bp, Artificial sequence
  primer
tcaatgggttgatctttccgattgt

SEQ ID NO: 14291 - protein, 332 aa, Artificial sequence
  consensus sequence
  Variant (2)..(3): Xaa in position 2 to 3 is any amino acid
  Variant (4)..(5): Xaa in position 4 to 5 is any or no amino acid
  Variant (7)..(12): Xaa in position 7 to 12 is any amino acid
  Variant (14)..(14): Xaa in position 14 is any amino acid
  Variant (17)..(17): Xaa in position 17 is any amino acid
  Variant (19)..(19): Xaa in position 19 is any amino acid
  Variant (21)..(24): Xaa in position 21 to 24 is any amino acid
  Variant (26)..(31): Xaa in position 26 to 31 is any amino acid
  Variant (32)..(32): Xaa in position 32 is any or no amino acid
  Variant (34)..(34): Xaa in position 34 is any amino acid
  Variant (36)..(36): Xaa in position 36 is any amino acid
  Variant (38)..(47): Xaa in position 38 to 47 is any amino acid
  Variant (48)..(48): Xaa in position 48 is any or no amino acid
  Variant (50)..(51): Xaa in position 50 to 51 is any amino acid
  Variant (55)..(64): Xaa in position 55 to 64 is any amino acid
  Variant (65)..(65): Xaa in position 65 is any or no amino acid
  Variant (67)..(68): Xaa in position 67 to 68 is any amino acid
  Variant (74)..(78): Xaa in position 74 to 78 is any amino acid
  Variant (79)..(81): Xaa in position 79 to 81 is any or no amino acid
  Variant (83)..(83): Xaa in position 83 is any amino acid
  Variant (85)..(85): Xaa in position 85 is any amino acid
  Variant (89)..(89): Xaa in position 89 is any amino acid
  Variant (91)..(91): Xaa in position 91 is any amino acid
  Variant (96)..(96): Xaa in position 96 is any amino acid
  Variant (99)..(105): Xaa in position 99 to 105 is any amino acid
  Variant (106)..(120): Xaa in position 106 to 120 is any or no amino acid
  Variant (122)..(126): Xaa in position 122 to 126 is any amino acid
  Variant (128)..(130): Xaa in position 128 to 130 is any amino acid
  Variant (133)..(133): Xaa in position 133 is any amino acid
  Variant (136)..(136): Xaa in position 136 is any amino acid
  Variant (139)..(143): Xaa in position 139 to 143 is any amino acid
  Variant (145)..(145): Xaa in position 145 is any amino acid
  Variant (149)..(149): Xaa in position 149 is any amino acid
  Variant (154)..(154): Xaa in position 154 is any amino acid
  Variant (156)..(156): Xaa in position 156 is any amino acid
  Variant (158)..(159): Xaa in position 158 to 159 is any amino acid
  Variant (161)..(162): Xaa in position 161 to 162 is any amino acid
  Variant (164)..(164): Xaa in position 164 is any amino acid
  Variant (171)..(172): Xaa in position 171 to 172 is any amino acid
  Variant (174)..(177): Xaa in position 174 to 177 is any amino acid
  Variant (178)..(179): Xaa in position 178 to 179 is any or no amino acid
  Variant (181)..(182): Xaa in position 181 to 182 is any amino acid
  Variant (187)..(188): Xaa in position 187 to 188 is any amino acid
  Variant (195)..(195): Xaa in position 195 is any amino acid
  Variant (198)..(199): Xaa in position 198 to 199 is any amino acid
  Variant (200)..(201): Xaa in position 200 to 201 is any or no amino acid
  Variant (203)..(206): Xaa in position 203 to 206 is any amino acid
  Variant (208)..(208): Xaa in position 208 is any amino acid
  Variant (214)..(216): Xaa in position 214 to 216 is any amino acid
  Variant (218)..(220): Xaa in position 218 to 220 is any amino acid
  Variant (222)..(223): Xaa in position 222 to 223 is any amino acid
  Variant (225)..(234): Xaa in position 225 to 234 is any amino acid
  Variant (235)..(256): Xaa in position 235 to 256 is any or no amino acid
  Variant (258)..(259): Xaa in position 258 to 259 is any amino acid
  Variant (262)..(263): Xaa in position 262 to 263 is any amino acid
  Variant (269)..(269): Xaa in position 269 is any amino acid
  Variant (271)..(271): Xaa in position 271 is any amino acid
  Variant (273)..(277): Xaa in position 273 to 277 is any amino acid
  Variant (278)..(284): Xaa in position 278 to 284 is any or no amino acid
  Variant (286)..(290): Xaa in position 286 to 290 is any amino acid
  Variant (292)..(294): Xaa in position 292 to 294 is any amino acid
  Variant (296)..(297): Xaa in position 296 to 297 is any amino acid
  Variant (299)..(302): Xaa in position 299 to 302 is any amino acid
  Variant (304)..(308): Xaa in position 304 to 308 is any amino acid
  Variant (310)..(327): Xaa in position 310 to 327 is any amino acid
  Variant (328)..(331): Xaa in position 328 to 331 is any or no amino acid
LXXXXLXXXXXXGXGNXGXVXXXXHXXXXXXXAXKXIXXXXXXXXXXXQXXRELXXXXXXXXXXXIXXFYGAFXXXXXXXXIXIXMEYXDXGSLDXILXXXXXXXXXXXXXXXXXXXXXXEXXXXXIXXXVLXGLXYLXXXXXIXHRDXKPSNXLXNXXGXXKXCDFGVSXXLXXXXXXAXXFVGTXXYMSPERXQGXXXXYXXXXDXWSLGLXXXEXXXGXXPXXXXXXXXXXXXXXXXXXXXXXXXXXXXXXXXIXXLLXXIVNEPXPXLXXXXXXXXXXXXSXXXXXFXXXCXXKXXXXRXXXXXLXXXXXXXXXXXXXXXXXXXXXXW

SEQ ID NO: 14292 - protein, 29 aa, Artificial sequence
  protein pattern
  Variant (2)..(2): Xaa in position 2 is Ile, Met or Val
  Variant (6)..(6): Xaa in position 6 is Ile, Leu or Val
  Variant (11)..(12): Xaa in position 11 to 12 is any or no amino acid
  Variant (14)..(15): Xaa in position 14 to 15 is any or no amino acid
  Variant (17)..(18): Xaa in position 17 to 18 is any amino acid
  Variant (20)..(20): Xaa in position 20 is Asp, Glu or Gln
  Variant (21)..(21): Xaa in position 21 is Ile or Val
  Variant (23)..(23): Xaa in position 23 is Ile or Leu
  Variant (24)..(24): Xaa in position 24 is Cys or Thr
IXHRDXKPSNXXIXXNXXGXXKXXDFGVS

SEQ ID NO: 14293 - protein, 22 aa, Artificial sequence
  protein pattern
  Variant (2)..(2): Xaa in position 2 is Asp or Asn
  Variant (3)..(3): Xaa in position 3 is Ser or Thr
  Variant (8)..(8): Xaa in position 8 is any or no amino acid
  Variant (10)..(10): Xaa in position 10 is any or no amino acid
  Variant (17)..(17): Xaa in position 17 is Ile or Leu
  Variant (20)..(21): Xaa in position 20 to 21 is any amino acid
AXXFVGTXSXYMSPERXQGXXY

SEQ ID NO: 14294 - protein, 18 aa, Artificial sequence
  protein pattern
  Variant (2)..(2): Xaa in position 2 is any amino acid
  Variant (4)..(4): Xaa in position 4 is any amino acid
  Variant (5)..(5): Xaa in position 5 is Leu or Met
  Variant (8)..(8): Xaa in position 8 is any amino acid
  Variant (9)..(9): Xaa in position 9 is Asp or Asn
  Variant (10)..(10): Xaa in position 10 is Ala, Cys or Gly
  Variant (14)..(14): Xaa in position 14 is any or no amino acid
  Variant (16)..(17): Xaa in position 16 to 17 is any or no amino acid
IXIXXEYXXXGSLXDXXL

SEQ ID NO: 14295 - protein, 21 aa, Artificial sequence
  protein pattern
  Variant (2)..(5): Xaa in position 2 to 5 is any or no amino acid
  Variant (8)..(8): Xaa in position 8 is Leu or Met
  Variant (10)..(10): Xaa in position 10 is Ile or Leu
  Variant (11)..(11): Xaa in position 11 is any amino acid
  Variant (12)..(12): Xaa in position 12 is Ile or Leu
  Variant (13)..(13): Xaa in position 13 is Ile, Leu or Val
  Variant (15)..(15): Xaa in position 15 is Leu or Met
  Variant (16)..(17): Xaa in position 16 to 17 is any amino acid
  Variant (19)..(19): Xaa in position 19 is any amino acid
  Variant (20)..(20): Xaa in position 20 is any or no amino acid
VXXXXWSXGXXXXEXXXGXXP

SEQ ID NO: 14296 - protein, 18 aa, Artificial sequence
  protein pattern
  Variant (2)..(2): Xaa in position 2 is Phe or Leu
  Variant (3)..(3): Xaa in position 3 is Asp or Glu
  Variant (6)..(6): Xaa in position 6 is Asp or Gln
  Variant (7)..(7): Xaa in position 7 is any amino acid
  Variant (12)..(12): Xaa in position 12 is any or no amino acid
  Variant (14)..(14): Xaa in position 14 is any or no amino acid
  Variant (16)..(16): Xaa in position 16 is any amino acid
  Variant (17)..(17): Xaa in position 17 is any or no amino acid
IXXLLXXIVNEXPXPXXL

SEQ ID NO: 14297 - protein, 15 aa, Artificial sequence
  protein pattern
  Variant (2)..(3): Xaa in position 2 to 3 is any amino acid
  Variant (4)..(7): Xaa in position 4 to 7 is any or no amino acid
  Variant (9)..(9): Xaa in position 9 is Ile or Val
  Variant (10)..(10): Xaa in position 10 is Glu, Gly, Ser or Thr
  Variant (15)..(15): Xaa in position 15 is Phe or Tyr
HXXXXXXIXXFYGAX

SEQ ID NO: 14298 - protein, 19 aa, Artificial sequence
  protein pattern
  Variant (2)..(5): Xaa in position 2 to 5 is any amino acid
  Variant (6)..(6): Xaa in position 6 is Asp, Arg or Ser
  Variant (8)..(8): Xaa in position 8 is Ile or Val
  Variant (9)..(9): Xaa in position 9 is Asp, Asn or Ser
  Variant (10)..(10): Xaa in position 10 is any amino acid
  Variant (12)..(13): Xaa in position 12 to 13 is any amino acid
  Variant (15)..(17): Xaa in position 15 to 17 is any amino acid
  Variant (18)..(18): Xaa in position 18 is any or no amino acid
SXXXXXFXXXCXXKXXXXR

SEQ ID NO: 14299 - protein, 23 aa, Artificial sequence
  protein pattern
  Variant (2)..(3): Xaa in position 2 to 3 is any amino acid
  Variant (4)..(4): Xaa in position 4 is Ile or Leu
  Variant (5)..(5): Xaa in position 5 is any amino acid
  Variant (6)..(6): Xaa in position 6 is Glu, Asn, Gln or Arg
  Variant (8)..(10): Xaa in position 8 to 10 is any or no amino acid
  Variant (12)..(12): Xaa in position 12 is Ala or Ser
  Variant (15)..(15): Xaa in position 15 is any or no amino acid
  Variant (17)..(17): Xaa in position 17 is Gly, Ser, Thr or Val
  Variant (19)..(19): Xaa in position 19 is Ser or Val
  Variant (20)..(22): Xaa in position 20 to 22 is any amino acid
  Variant (23)..(23): Xaa in position 23 is His or Arg
LXXXXXLXXXGXGNXGXVXXXXX

SEQ ID NO: 14300 - protein, 19 aa, Artificial sequence
  protein pattern
  Variant (2)..(3): Xaa in position 2 to 3 is any amino acid
  Variant (4)..(4): Xaa in position 4 is Ile, Leu or Val
  Variant (5)..(5): Xaa in position 5 is Gly or Ser
  Variant (6)..(6): Xaa in position 6 is any amino acid
  Variant (8)..(8): Xaa in position 8 is Ala, Cys, Ser or Thr
  Variant (9)..(10): Xaa in position 9 to 10 is any amino acid
  Variant (12)..(12): Xaa in position 12 is Leu or Val
  Variant (13)..(13): Xaa in position 13 is any amino acid
  Variant (16)..(16): Xaa in position 16 is any amino acid
  Variant (17)..(18): Xaa in position 17 to 18 is any or no amino acid
EXXXXXIXXXVXXGLXXXY

SEQ ID NO: 14301 - protein, 18 aa, Artificial sequence
  protein pattern
  Variant (2)..(2): Xaa in position 2 is Lys or Arg
  Variant (4)..(4): Xaa in position 4 is any amino acid
  Variant (6)..(6): Xaa in position 6 is any amino acid
  Variant (7)..(7): Xaa in position 7 is Ile, Leu or Val
  Variant (8)..(8): Xaa in position 8 is Asp, Glu or Gly
  Variant (9)..(10): Xaa in position 9 to 10 is any amino acid
  Variant (11)..(11): Xaa in position 11 is Glu, Asn, Pro, Gln or Ser
  Variant (12)..(12): Xaa in position 12 is Ala, Ser or Val
  Variant (13)..(15): Xaa in position 13 to 15 is any amino acid
  Variant (16)..(16): Xaa in position 16 is Asn or Gln
  Variant (17)..(17): Xaa in position 17 is any amino acid
  Variant (18)..(18): Xaa in position 18 is Ile, Leu or Val
AXKXIXXXXXXXXXXXXX

SEQ ID NO: 14302 - DNA, 1161 bp, Saccharomyces cerevisiae
  CDS (1)..(1161)
atgtccgccgctactgttggtaaacctattaagtgcattgctgctgttgcgtatgatgcgaagaaaccattaagtgttgaagaaatcacggtagacgccccaaaagcgcacgaagtacgtatcaaaattgaatatactgctgtatgccacactgatgcgtacactttatcaggctctgatccagaaggacttttcccttgcgttctgggccacgaaggagccggtatcgtagaatctgtaggcgatgatgtcataacagttaagcctggtgatcatgttattgctttgtacactgctgagtgtggcaaatgtaagttctgtacttccggtaaaaccaacttatgtggtgctgttagagctactcaagggaaaggtgtaatgcctgatgggaccacaagatttcataatgcgaaaggtgaagatatataccatttcatgggttgctctactttttccgaatatactgtggtggcagatgtctctgtggttgccatcgatccaaaagctcccttggatgctgcctgtttactgggttgtggtgttactactggttttggggcggctcttaagacagctaatgtgcaaaaaggcgataccgttgcagtatttggctgcgggactgtaggactctccgttatccaaggtgcaaagttaaggggcgcttccaagatcattgccattgacattaacaataagaaaaaacaatattgttctcaatttggtgccacggattttgttaatcccaaggaagatttggccaaagatcaaactatcgttgaaaagttaattgaaatgactgatgggggtctggattttacttttgactgtactggtaataccaaaattatgagagatgctttggaagcctgtcataaaggttggggtcaatctattatcattggtgtggctgccgctggtgaagaaatttctacaaggccgttccagctggtcactggtagagtgtggaaaggctctgcttttggtggcatcaaaggtagatctgaaatgggcggtttaattaaagactatcaaaaaggtgccttaaaagtcgaagaatttatcactcacaggagaccattcaaagaaatcaatcaagcctttgaagatttgcataacggtgattgcttaagaaccgtcttgaagtctgatgaaataaaatag

SEQ ID NO: 14303 - protein, 386 aa, Saccharomyces cerevisiae
MSAATVGKPIKCIAAVAYDAKKPLSVEEITVDAPKAHEVRIKIEYTAVCHTDAYTLSGSDPEGLFPCVLGHEGAGIVESVGDDVITVKPGDHVIALYTAECGKCKFCTSGKTNLCGAVRATQGKGVMPDGTTRFHNAKGEDIYHFMGCSTFSEYTVVADVSVVAIDPKAPLDAACLLGCGVTTGFGAALKTANVQKGDTVAVFGCGTVGLSVIQGAKLRGASKIIAIDINNKKKQYCSQFGATDFVNPKEDLAKDQTIVEKLIEMTDGGLDFTFDCTGNTKIMRDALEACHKGWGQSIIIGVAAAGEEISTRPFQLVTGRVWKGSAFGGIKGRSEMGGLIKDYQKGALKVEEFITHRRPFKEINQAFEDLHNGDCLRTVLKSDEIK

SEQ ID NO: 14304 - DNA, 1404 bp, Zea mays subsp. mays
  CDS (61)..(1206)
atctctccactgctccgtccagcgcgtccacctcccaaacccctactcccccaggaagcaatggcttcccccacccagggccaggtcatcacctgcaaagcggcggtggcgtacgagccgaacaagccactcgtgatcgaggacgtgcaggtggcgccgccgcaggccggcgaggtccgcgtcaagatcctcttcaccgcgctctgccacaccgaccactacacctggagcggcaaggatcctgagggtctttttccttgcattcttggccacgaagctgctggaattgtggaaagtgtcggtgaaggagtaactgatgtgcagcctggggatcatgtcattccttgctaccaagcagaatgcaaagaatgcaagttttgcaagagcggaaagaccaacctctgtggtaaggtccgtagtgccacaggcgtaggtgtcatgatgaatgatatgaagagcaggttctctgtaaatggaaagcccatttaccatttcatggggacatcgacattcagccagtacactgtggtgcatgatgtcagtgttgcaaagatcaacccacaggcacccttagataaagtctgcctgctcggttgtggtgttcctactggtcttggagcggtgtggaatactgcaaaggttgaatctggctcagttgttgctgtttttggccttggaacagttggacttgcagttgctgagggagcaaaagctgctggtgcttctcgagttattggcattgacatcgacaataaaaagtttgatgttgcaaagaactttggagttacagaatttgttaacccaaaagagcatgacaaaccgatacagcaggtcctggtcgatcttacagatggcggcgtggattacagctttgagtgcattggaaatgtttcgattatgagggctgcactggaatgctgccacaagggctggggaacctccgtcatcgtcggcgttgccgcctctggccaggagatctccacacgaccattccagctcgtgactggtcgtgtctggaagggaaccgcttttggtggcttcaagagccggacccaggtcccatggcttgttgacaagtacatgaagaaggaaattaaggtggacgagtacattacgcacaacatgaacctggctgacatcaacgacgccttccacctgctgcacgaaggtggctgtctgcgttgtgtgctggcgatgcagatctgaaattcctaagctaagcagtttttggatgtgtcggcatagactgtcttttgttttggaactagaattcctttttgcctcgttaggcctggacccactgtataatgctatgttgctttggatggctgacgatggttaccgctgtgttgctagccatgtggtacttgatctgtatcacggttgcaaataagtgctgtttct

SEQ ID NO: 14305 - protein, 381 aa, Zea mays subsp. mays
MASPTQGQVITCKAAVAYEPNKPLVIEDVQVAPPQAGEVRVKILFTALCHTDHYTWSGKDPEGLFPCILGHEAAGIVESVGEGVTDVQPGDHVIPCYQAECKECKFCKSGKTNLCGKVRSATGVGVMMNDMKSRFSVNGKPIYHFMGTSTFSQYTVVHDVSVAKINPQAPLDKVCLLGCGVPTGLGAVWNTAKVESGSVVAVFGLGTVGLAVAEGAKAAGASRVIGIDIDNKKFDVAKNFGVTEFVNPKEHDKPIQQVLVDLTDGGVDYSFECIGNVSIMRAALECCHKGWGTSVIVGVAASGQEISTRPFQLVTGRVWKGTAFGGFKSRTQVPWLVDKYMKKEIKVDEYITHNMNLADINDAFHLLHEGGCLRCVLAMQI

SEQ ID NO: 14306 - DNA, 1337 bp, Oryza sativa
  CDS (73)..(1206)
acattaaaaaaaatattttaaaagaaaactattcgcgatatttagaaactaatctttttgtgtaagccaaaaatgagcacgcaaggaaaagttattaagtgtaaagctgcggttgcttggggtgccaaacaacagctcaagatcgaagagatcgaagtcgatccaccgaaagccggtgaagtccgaattaagataacggccaccggagtttgccacactgatgcctatacactaggtggtgaagatagcgaagccgtctttccggttattctcggccatgagggagccggcgtcgtcgagtcggtcggtgagggtgtgacgtcagttgcgcctggcgaccatgttatcccactttatacacctcaatgcaagaactgcgagtactgccgtagtccaaagacgaatctttgcgtgaaaatcagagcgacacaaggtaaaggtctgatgcctgatggaacgactcgcttcagtattaatggtcaacggttgtatcactatatggggtgtagtacgtttagcgaatatacagttgttgcagatatttcggttgcaaagataaatccggcggctcctttagataaaatcggacttatcggttgtggaatcagcactggctacggtgcagctttagtcactgccaaagtcgaaaaaggttcaacagtaggtgtgtggggtctcggcgccgttggcttggccgttataatgggagctaaagcggctggtgctaaagaaatcgtcggtatcgatatcaaccctaacaagttcaagacagccatcgaattcggcgctactcaatgtgtcaacccgaacgatttccccgacaagcctttccagcagacgctcattgagaaattcgatggtggcttcgactatactttcgagtgcatcggaaacgtgaatactatgagatgtgccctcgaagctagccacagaggttggggtgtttcggttattattggggtcgccggagccggaaaagagatcgccacaaggccattccagctggtcactggacgcacttggaaaggaaccgcttttggaggttggaagagtgttgatcaagttcccgagttggttgagaagtatttgacaaaggagctcaaagttgacgagttcatcactcatacaatgccactcgccgaaatcaacaaggcttttgatctaatgcacagcggagaaagcttgcgttcaatgattcaattctaaagaattttatcgatccgattttgaatcacatagaacagaaaaccaaattaatataagttattaatgttttatccgtagatatatttctcttaaagatttgattagtctaataaacaaccaactttatcaac

SEQ ID NO: 14307 - protein, 377 aa, Oryza sativa
MSTQGKVIKCKAAVAWGAKQQLKIEEIEVDPPKAGEVRIKITATGVCHTDAYTLGGEDSEAVFPVILGHEGAGVVESVGEGVTSVAPGDHVIPLYTPQCKNCEYCRSPKTNLCVKIRATQGKGLMPDGTTRFSINGQRLYHYMGCSTFSEYTVVADISVAKINPAAPLDKIGLIGCGISTGYGAALVTAKVEKGSTVGVWGLGAVGLAVIMGAKAAGAKEIVGIDINPNKFKTAIEFGATQCVNPNDFPDKPFQQTLIEKFDGGFDYTFECIGNVNTMRCALEASHRGWGVSVIIGVAGAGKEIATRPFQLVTGRTWKGTAFGGWKSVDQVPELVEKYLTKELKVDEFITHTMPLAEINKAFDLMHSGESLRSMIQF

SEQ ID NO: 14308 - DNA, 1140 bp, Oryza sativa
  CDS (1)..(1140)
atggcgaccgcagggaaggtgatcaagtgcaaagcggcggtggcatgggaggccgcgaagccgctggtgatcgaggaggtggaggtggcgccgccgcaggccatggaggtgcgcgtcaagatcctcttcacctcgctctgccacaccgacgtctacttctgggaggccaagggacagactcccgtgttccctcggatcttcggccatgaagctggaggtattgtggagagtgttggagagggtgtgactgatcttgcccctggtgaccatgttctccctgtgttcactggggagtgcaaggagtgtccccactgcaagtcagcagagagcaacatgtgtgatctgctcaggatcaacactgacaggggtgtgatgattggtgatggcaaatcacgcttttccatcaacgggaagcccatttaccatttcgtcgggacttcgaccttcagcgagtacactgtcatgcatgttggttgcgttgcgaagatcaacccggcagctccacttgataaagtttgcgttcttagctgtggtatttctactggtcttggtgctacaatcaatgtggcaaagccaccaaagggttcgacggtggcgatatttggtctaggagctgtaggccttgctgccgcagaaggtgcaaggattgcaggagcgtcaaggatcattggcattgacctgaacgccaacagatttgaagaagctaggaaatttggttgcactgaatttgtgaacccaaaggaccatgacaagccagttcagcaggtacttgctgagatgaccaatggcggagttgaccgcagcgttgaatgcactggcaacatcaacgccatgatccaagcatttgaatgtgttcatgatggctggggtgttgctgttttggtcggcgtgccacacaaggacgccgagttcaagacccacccgatgaacttcctgaacgagaggactctcaagggaaccttcttcggcaactacaagccacgcaccgatctgcccaacgtcgtcgagctctacatgaagaaggagctggaggtggagaagttcatcacacacagcgtgccgttctcggagatcaacacggcgttcgacctgatgcacaagggcgagggcatccgctgcatcatccgcatggagaactga

SEQ ID NO: 14309 - protein, 379 aa, Oryza sativa
MATAGKVIKCKAAVAWEAAKPLVIEEVEVAPPQAMEVRVKILFTSLCHTDVYFWEAKGQTPVFPRIFGHEAGGIVESVGEGVTDLAPGDHVLPVFTGECKECPHCKSAESNMCDLLRINTDRGVMIGDGKSRFSINGKPIYHFVGTSTFSEYTVMHVGCVAKINPAAPLDKVCVLSCGISTGLGATINVAKPPKGSTVAIFGLGAVGLAAAEGARIAGASRIIGIDLNANRFEEARKFGCTEFVNPKDHDKPVQQVLAEMTNGGVDRSVECTGNINAMIQAFECVHDGWGVAVLVGVPHKDAEFKTHPMNFLNERTLKGTFFGNYKPRTDLPNVVELYMKKELEVEKFITHSVPFSEINTAFDLMHKGEGIRCIIRMEN

SEQ ID NO: 14310 - DNA, 1393 bp, Oryza sativa
  CDS (82)..(1227)
ggcaatcacatcctcttcccttctcttctccatcgcatctaccaccgagcgtgcaaggagggggggggggggggggtgaaaatggcttcctcgacccagggccaggtcatcacctgcaaagcggcggtggcatgggaggccaacaggccgatgacgatcgaggacgtgcaggtggcgccgccgcaggccggcgaggtccgtgtcaagatcctcttcaccgcgctctgccacaccgaccactacacctggagcggcaaggatcctgagggtctatttccttgcattcttggtcatgaagctgctggaattgttgaaagtgttggggaaggagtaactgaggtgcagcctggggaccatgtcattccttgttaccaagcagaatgcagagaatgcaagttttgcaagagtggaaagaccaacctctgtggcaaagttcgtgctgccacaggggtcggtgtcatgatgaatgatcgcaagagccgtttctcaataaatggaaaacccatttatcatttcatgggaacatctacattcagccagtatactgttgtgcacgatgtcagtgtcgcaaagataaacccacaggcacctctagacaaagtttgcctgcttggctgcggtgtttctactggcctcggagcagtatggaataccgcaaaggttgaagcaggttccatcgttgctatttttggacttggcacagttggacttgcagttgctgagggggcaaaatcagctggtgcttctcggattattggcatcgacattgatagcaaaaagtttgatgtcgcaaagaactttggggttacagaatttgtgaacccaaaggaccatgacaaaccaatccaacaggtcatagttgaccttacagacggtggtgtggactacagctttgaatgcattggaaatgtttctgttatgaggtctgcattggagtgctgccacaagggctggggaacctctgtcatcgttggtgtagctgcttctgggcaagaaatctctacacgaccattccagctcgtcactggccgtatctggaagggaacagctttcggcggtttcaagagccgaagccaagttccatggctcgttgagaagtacttgaacaaggaaatcaaggtggacgagtacgttactcacagcatgaacctgactgacatcaacaaggcgtttgacctgctgcatgaaggtggctgcctgcggtgtgttctggcaactgataaatgaaccgatgatggttcatctgcttttggctgtgcttctgagctatgtcacgccaaattgtaatccagatctaccagccttggaaattgaattattctgctcgtttcgcttagaagcactttgaactgtgacaccactctgctataataatatatgtgctgtttggacc

SEQ ID NO: 14311 - protein, 381 aa, Oryza sativa
MASSTQGQVITCKAAVAWEANRPMTIEDVQVAPPQAGEVRVKILFTALCHTDHYTWSGKDPEGLFPCILGHEAAGIVESVGEGVTEVQPGDHVIPCYQAECRECKFCKSGKTNLCGKVRAATGVGVMMNDRKSRFSINGKPIYHFMGTSTFSQYTVVHDVSVAKINPQAPLDKVCLLGCGVSTGLGAVWNTAKVEAGSIVAIFGLGTVGLAVAEGAKSAGASRIIGIDIDSKKFDVAKNFGVTEFVNPKDHDKPIQQVIVDLTDGGVDYSFECIGNVSVMRSALECCHKGWGTSVIVGVAASGQEISTRPFQLVTGRIWKGTAFGGFKSRSQVPWLVEKYLNKEIKVDEYVTHSMNLTDINKAFDLLHEGGCLRCVLATDK

SEQ ID NO: 14312 - DNA, 1601 bp, Oryza sativa
  CDS (107)..(1243)
gaccagaattccaagcaacgaactgcgagtgattcaagaaaaaagaaaacctgagctttcgatctcttcggagtggtttcttgttctttgaaaaagagggggattaatggcgacagccgggaaggtgatcaagtgcaaagcggcggtggcatgggaggccgggaagccgctgtcgatcgaggaggtggaggttgcgccgccgcaggccatggaggtccgcgtcaagatcatctacaccgccctctgccacaccgacgtctacttctgggaggccaaggggcaaacacctgttttccctaggatcttgggccatgaagctggaggcattgtggagagtgtgggagagggtgtgaccgaactcgcgccgggcgaccatgtcctcccggtgttcaccggcgagtgcaaggagtgtgatcactgcaaatcggaggagagcaacatgtgtgacctcctcaggatcaacgtcgaccgcggcgtcatgatcggcgacggcaagtcccgattcaccatcaaggggaagcccatcttccactttgttggcacatccaccttcagcgagtacaccgtcatccatgtcggctgcctcgcgaagatcaacccggaggcgcctctcgacaaggtctgcattctcagctgcggtttctctaccggttttggtgcaacagtgaatgtcgcgaaaccgaaaaagggccagaccgtggctattttcggtcttggagctgttggtcttgctgctatggaaggtgccaggctgtctggagcatcgaggatcattggtgtggacctgaaccctgcgaaattcgaacaagctaagaagtttggctgcactgacttcgtaaaccccaaggaccacagcaagccagtgcacgaggtgctgattgagatgaccaacggtggactcgacagggccgttgaatgcacgggcaacatcaacgccatgatatcctgcttcgaatgtgtccatgatggatggggcgttgcggtgctggtcggcgtgccgaccaaggatgatgtgttcaagacccacccgatgaacttcctcaacgagaagacgctcaaggggacgttcttcggtaactacaagccgcgcaccgacctgcccaacgtcgtcgagctgtacatgaagaaggagctggagctggagaagttcatcacgcacagcgtgccgttctcggagatcaacacggcgttcgatctcatgctcaaggggggagagtctccgctgcgtcatgaggatggatgagtagagatgatgatgatctatctctctctctctctctcttgcagtttcagtgcatacaagaaaccaaaaatgaaagcaaaaaaatggatgagaagtttgaggttttccatttaagtttaataatggtcgtgagacagggcttgtgtggagtcagctctgtttactccctcctttcatggcttgatcttgtttattgtcagcattgtggcttagcagattttcaccagttttaccctgtaaattagtaccattctgaaatcgtaataaactactagcagtgtgaggtactattgctggaactgaattgattgtgcagtaaagaggtgaatagcagccagtatgaaggttttacaatttg

SEQ ID NO: 14313 - protein, 378 aa, Oryza sativa
MATAGKVIKCKAAVAWEAGKPLSIEEVEVAPPQAMEVRVKIIYTALCHTDVYFWEAKGQTPVFPRILGHEAGGIVESVGEGVTELAPGDHVLPVFTGECKECDHCKSEESNMCDLLRINVDRGVMIGDGKSRFTIKGKPIFHFVGTSTFSEYTVIHVGCLAKINPEAPLDKVCILSCGFSTGFGATVNVAKPKKGQTVAIFGLGAVGLAAMEGARLSGASRIIGVDLNPAKFEQAKKFGCTDFVNPKDHSKPVHEVLIEMTNGGLDRAVECTGNINAMISCFECVHDGWGVAVLVGVPTKDDVFKTHPMNFLNEKTLKGTFFGNYKPRTDLPNVVELYMKKELELEKFITHSVPFSEINTAFDLMLKGGESPLRHEDG

SEQ ID NO: 14314 - DNA, 1526 bp, Sorghum bicolor
  CDS (81)..(1226)
acagccgcaccatcctctccattgctccattccatcacatccaccacccacacccaaaaccctactccccccaggaagcaatggcttcctccacccagggtcaggtcatcacctgcaaagcggcggtagcgtacgagccgaacaagccgctcgtgatcgaggacgtgcaggtggcgccgccgcaggccggcgaggtccgcgtcaagatcctcttcaccgcgctctgccacaccgaccactacacctggagcggcaaggatcctgagggtctgtttccttgcattcttggccacgaagctgccggagttgtggaaagtgtcggcgaaggagtaactgaggtgcagcctggggatcatgtcattccttgttaccaagcagaatgcaaagaatgcaagttttgcaagagcggaaagaccaacctctgtggtaaggttcgtagtgccacaggcgtaggtgtcatgatgaatgatatgaagagcaggttctctgtaaatggaaagcccatttaccatttcatggggacatcaacattcagccagtacactgtggtgcatgatgtcagtgttgcaaagatcaacccacaggcccccctagataaagtctgcctgcttggttgtggtgttcctactggtcttggagcagtgtggaatactgcaaaggttgaagctggctctattgttgctgtttttggccttggcacagttggacttgcagttgctgagggtgcaaaagctgctggtgcttctcgaatcattggcattgacattgacaataaaaagtttgacgttgcaaagaactttggagttacagaatttgttaacccaaaagatcatgacaaaccaatacagcaggtcttagttgatcttacagatggtggcgtggattacagttttgaatgcattggaaatgtttcagttatgcgggctgcactggaatgctgccacaagggctggggaacctctgtcatcgttggcgtcgctgcttctggccaggagattgccacacggccattccagctcgtgactggtcgtgtctggaagggaacagctttcggtggcttcaagagccgaacccaggtcccatggcttgttgataagtacatgaacaaggaaattaaggtggacgagtacattacccacaacatgaacctggctgacatcaacgacgcgttccacctgctccacgaaggtggctgcctgcgctgcgtgctggcaatgcaaatttgaaattcctaagcaaagcagtttgcatatatgtcgtcatagacttcttttggaactagaactcctttgccctcgtttgtcctgttggaactagagctccgtttgcctcgtttgctgtgtgctaggtatgtggtacttattgatctgtatcacggttgtaaacaagtgctgtttctaaaataagtttatgcgtgtcaaatttcctggcatggataattgaacggtatcaagcatccgtcattttatctagcttagcccaaatgagacatgtaaaacacggttgaccaaagggtggagtataat

SEQ ID NO: 14315 - protein, 381 aa, Sorghum bicolor
MASSTQGQVITCKAAVAYEPNKPLVIEDVQVAPPQAGEVRVKILFTALCHTDHYTWSGKDPEGLFPCILGHEAAGVVESVGEGVTEVQPGDHVIPCYQAECKECKFCKSGKTNLCGKVRSATGVGVMMNDMKSRFSVNGKPIYHFMGTSTFSQYTVVHDVSVAKINPQAPLDKVCLLGCGVPTGLGAVWNTAKVEAGSIVAVFGLGTVGLAVAEGAKAAGASRIIGIDIDNKKFDVAKNFGVTEFVNPKDHDKPIQQVLVDLTDGGVDYSFECIGNVSVMRAALECCHKGWGTSVIVGVAASGQEIATRPFQLVTGRVWKGTAFGGFKSRTQVPWLVDKYMNKEIKVDEYITHNMNLADINDAFHLLHEGGCLRCVLAMQI

SEQ ID NO: 14316 - DNA, 1452 bp, Triticum aestivum
  CDS (127)..(1272)
ccagtccacctccccccctatccccaccgcctccacaaccccaccccccccctccgctgcccctcccatcgcattcgcatccacctccgcgccccaagcacagcacaggggaagaagcgatcggcaatggcgtcctccacccagggccaggtcatcacctgcaaagcggcggtggcgtacgaggcgaacaagccgctggtggtggaggacgtgcaggtggcgccgccgcaggccggcgaggtccgcatcaagatcctctccaccgcgctctgccacaccgactactacacctggagcggcaaggatcctgagggtctctttccttgcattctcggtcatgaggctgctggaatcgttgagagcgttggcgaaggggtgaccgatgtgcagcctggggaccatgtcatcccttgctaccaagcggaatgcaagaactgcaagatgtgcaacagcgggaagaccaacctctgcggcaaagttcgtggcgccacaggggtaggggtcatgatgagcgaccgcaagagccgcttctcggtgaatgggaagcccatctaccatttcatggggacgtcgacgttcagtcagtacactgttgtgcatgacgtcagtgttgcgaagatcaacccgcaggcgcccctggataaggtctgcctgctcggctgtggtgtttccactggtcttggagcagtatggaatactgcaaaggttgaagcaggttcagttgttgctgtttttgggcttggcacagttggacttgcagttgctgagggggcaaaatcagctggtgcttctcggattattggcattgacattgatgccaagaagtttgatgttgctaagaactttggagtcacagagtttgtgaacccaaaagaccatgacaaaccaatccagcaggtcctagttgaccttacagatggtggtgtggattacagttttgagtgcatcggaaatgtttctatcatgagggctgcactcgaatgctgccacaagggctggggtacctctgttgtcgttggtgtagctgcatctggccaggagattgccacacggccattccagcttgtcactggccgtgtctggaagggaacagcttttggtggcttcaagagtcggagccaggttccatggctcgtcgagaagtacatgaacaaggaaatcaaggtggacgagtacatcacccacaacatgaaccttaccgatatcaacaaggcgttcgacctgctgcacgaaggcggctgcctgcggtgcgtgctggccatggagcactgaggatcctgctatgtgtctcgccctgcctcgaagcggagcagtttgtgtcgtgtgaagttgtaatgcagatctatcctccgccctgggactatagaactcgtttggcctagaaactcttgaacacgaaccgctgctataataatatgttgtgttggatggttgcctctggttggggtcatt

SEQ ID NO: 14317 - protein, 381 aa, Triticum aestivum
MASSTQGQVITCKAAVAYEANKPLVVEDVQVAPPQAGEVRIKILSTALCHTDYYTWSGKDPEGLFPCILGHEAAGIVESVGEGVTDVQPGDHVIPCYQAECKNCKMCNSGKTNLCGKVRGATGVGVMMSDRKSRFSVNGKPIYHFMGTSTFSQYTVVHDVSVAKINPQAPLDKVCLLGCGVSTGLGAVWNTAKVEAGSVVAVFGLGTVGLAVAEGAKSAGASRIIGIDIDAKKFDVAKNFGVTEFVNPKDHDKPIQQVLVDLTDGGVDYSFECIGNVSIMRAALECCHKGWGTSVVVGVAASGQEIATRPFQLVTGRVWKGTAFGGFKSRSQVPWLVEKYMNKEIKVDEYITHNMNLTDINKAFDLLHEGGCLRCVLAMEH

SEQ ID NO: 14318 - DNA, 1403 bp, Helianthus annuus
  CDS (74)..(1219)
ttcggcacgagccaaaactcacaatttaatctcatttcaagaatattctctctttcaccgatcaaacaaaagtatgtcgtcgaccactacaggccaagttattcgatgcaaagccgcggtgacgtgggaagccggaaaaccgctggtgatcgaagaagtggaggtggcgccaccgcagaaaatggaagtccggattaagatcctcttcacttccctctgccacactgatgtttacttctgggaagccaaaggacaaaatcctgtattcccaagaattttaggacatgaagctggaggggttgtggagagtgttggggaaggagtgactgatcttcagccaggggatcatgttcttcccgttttcaccggagaatgcaaagagtgtgctcactgtaagtccgaagagagcaacatgtgtgaccttctcaggatcaacaccgacaggggagtcatgcttcacgatcagaaatctcgattctcgatcaacggcaaacccatcttccattttgtggggacttctactttcagcgagtacacggttgttcatgttggatgtcttgcaaagatcaaccctcttgcccctcttgataaagtttgtgttctcagctgtgggatctccacagggctgggtgctactttgaatgttgcaaaaccgaaaaaaggctcttcggtggcggttttcggtctgggggcagtgggacttgctgctgctgaaggtgcaagaatttctggggcttcaagaatcattggtgttgatctcaatgccaatagattcgagcttgcaaagaaatttggggttacagagtttgtgaacccaaaagattataagaagccggtgcaagaagtgattgcagagatgacaaatggaggagttgacaggagtgttgaatgcactggtcatattgatgctatgatctctgcttttgaatgtgttcatgatgggtggggtgttgctgttctagtaggtgttccgcataaagatgccgtgttcaagaccagtcccatgaatctgttgaacgaaaggactctgaagggtaccttctttggaaactataaaccgcgatctgatattccttcggttgtcgaaaagtatatgaacaaggaacttgaggtggagaagttcataacacatgaagtgccattttcagagatcaataagccctttgacttgatgcttaaaggtgaaggtcttcgttgcattattcgaatggatgcctaaataatttcaaactgtgcaagagagagcagtaggagtcgtctattcgtaaagatatatgtgtgtgttctcgtctctcatcgtcgtaaatgtgtccttaagatcttggtttgttaattgttacccataaaagattttgaatttgaataacaatagaaattgatgtctaaaaaaaaaaaaaaaaaaa

SEQ ID NO: 14319 - protein, 381 aa, Helianthus annuus
MSSTTTGQVIRCKAAVTWEAGKPLVIEEVEVAPPQKMEVRIKILFTSLCHTDVYFWEAKGQNPVFPRILGHEAGGVVESVGEGVTDLQPGDHVLPVFTGECKECAHCKSEESNMCDLLRINTDRGVMLHDQKSRFSINGKPIFHFVGTSTFSEYTVVHVGCLAKINPLAPLDKVCVLSCGISTGLGATLNVAKPKKGSSVAVFGLGAVGLAAAEGARISGASRIIGVDLNANRFELAKKFGVTEFVNPKDYKKPVQEVIAEMTNGGVDRSVECTGHIDAMISAFECVHDGWGVAVLVGVPHKDAVFKTSPMNLLNERTLKGTFFGNYKPRSDIPSVVEKYMNKELEVEKFITHEVPFSEINKPFDLMLKGEGLRCIIRMDA

SEQ ID NO: 14320 - DNA, 1140 bp, Arabidopsis thaliana
  CDS (1)..(1140)
atgtctaccaccggacagattattcgatgcaaagctgctgtggcatgggaagccggaaagccactggtgatcgaggaagtggaggttgctccaccgcagaaacacgaagttcgtatcaagattctcttcacttctctctgtcacaccgatgtttacttctgggaagctaagggacaaacaccgttgtttccacgtatcttcggccatgaagctggagggattgttgagagtgttggagaaggagtgactgatcttcagccaggagatcatgtgttgccgatctttaccggagaatgtggagattgtcgtcattgccagtcggaggaatcaaacatgtgtgatcttctcaggatcaacacagagcgaggaggtatgattcacgatggtgaatctagattctccattaatggcaaaccaatctaccatttccttgggacgtccacgttcagtgagtacactgtggttcactctggtcaggtcgctaagatcaatccggatgctcctcttgacaaggtctgtattgtcagttgtggtttgtctactgggttaggagcaactttgaatgtggctaaacccaagaaaggtcaaagtgttgccatttttggtcttggtgctgttggtttaggcgctgcagaaggtgctagaatcgctggtgcttctaggatcatcggtgttgattttaactctaaaagattcgaccaagctaaggaattcggtgtgaccgagtgtgtgaacccgaaagaccatgacaagccaattcaacaggtgatcgctgagatgacggatggtggggtggacaggagtgtggaatgcaccggaagcgttcaggccatgattcaagcatttgaatgtgtccacgatggctggggtgttgcagtgctggtgggtgtgccaagcaaagacgatgccttcaagactcatccgatgaatttcttgaatgagaggactcttaagggtactttcttcgggaactacaaacccaaaactgacattcccggggttgtggaaaagtacatgaacaaggagctggagcttgagaaattcatcactcacacagtgccattctcggaaatcaacaaggcctttgattacatgctgaagggagagagtattcgttgcatcatcaccatgggtgcttga

SEQ ID NO: 14321 - protein, 379 aa, Arabidopsis thaliana
MSTTGQIIRCKAAVAWEAGKPLVIEEVEVAPPQKHEVRIKILFTSLCHTDVYFWEAKGQTPLFPRIFGHEAGGIVESVGEGVTDLQPGDHVLPIFTGECGDCRHCQSEESNMCDLLRINTERGGMIHDGESRFSINGKPIYHFLGTSTFSEYTVVHSGQVAKINPDAPLDKVCIVSCGLSTGLGATLNVAKPKKGQSVAIFGLGAVGLGAAEGARIAGASRIIGVDFNSKRFDQAKEFGVTECVNPKDHDKPIQQVIAEMTDGGVDRSVECTGSVQAMIQAFECVHDGWGVAVLVGVPSKDDAFKTHPMNFLNERTLKGTFFGNYKPKTDIPGVVEKYMNKELELEKFITHTVPFSEINKAFDYMLKGESIRCIITMGA

SEQ ID NO: 14322 - DNA, 1140 bp, Zea mays
  CDS (1)..(1140)
atggcgaccgcggggaaggtgatcaagtgcaaagctgcggtggcatgggaggccggcaagccactgtcgatcgaggaggtggaggtagcgcctccgcaggccatggaggtgcgcgtcaagatcctcttcacctcgctctgccacaccgacgtctacttctgggaggccaaggggcagactcccgtgttccctcggatctttggccatgaggctggaggtatcatagagagtgttggagagggtgtgactgacgtagctccgggcgaccatgtccttcctgtgttcactggggagtgcaaggagtgcgcccactgcaagtcggcagagagcaacatgtgtgatttgctcaggatcaacactgaccgcggtgtgatgattggcgatggcaagtcgcggttttcaatcaatgggaagcctatctaccactttgttgggacttccaccttcagcgagtacaccgtcatgcatgtcggttgtgttgcaaagatcaaccctcaggctccccttgataaagtttgcgtccttagctgtggtatttctactggtcttggtgcatcaattaatgttgcaaaacctccgaagggttcgacagtggctgttttcggtttaggagccgttggtcttgccgctgcagaaggtgcaaggattgctggagcgtcaaggatcattggtgtcgacctgaaccccagcagattcgaagaagctaggaagttcggttgcactgaatttgtgaacccaaaagaccacaacaagccggtgcaggaggtacttgctgagatgaccaacggaggggtcgaccgcagcgtggaatgcactggcaacatcaatgctatgatccaagctttcgaatgtgttcatgatggctggggtgttgccgtgctggtgggtgtgccgcataaggacgctgagttcaagacccacccgatgaacttcctgaacgaaaggaccctgaaggggaccttctttggcaactataagccacgcactgatctgccaaatgtggtggagctgtacatgaaaaaggagctggaggtggagaagttcatcacgcacagcgtcccgttcgcggagatcaacaaggcgttcaacctgatggccaagggggagggcatccgctgcatcatccgcatggagaactag

SEQ ID NO: 14323 - protein, 379 aa, Zea mays
MATAGKVIKCKAAVAWEAGKPLSIEEVEVAPPQAMEVRVKILFTSLCHTDVYFWEAKGQTPVFPRIFGHEAGGIIESVGEGVTDVAPGDHVLPVFTGECKECAHCKSAESNMCDLLRINTDRGVMIGDGKSRFSINGKPIYHFVGTSTFSEYTVMHVGCVAKINPQAPLDKVCVLSCGISTGLGASINVAKPPKGSTVAVFGLGAVGLAAAEGARIAGASRIIGVDLNPSRFEEARKFGCTEFVNPKDHNKPVQEVLAEMTNGGVDRSVECTGNINAMIQAFECVHDGWGVAVLVGVPHKDAEFKTHPMNFLNERTLKGTFFGNYKPRTDLPNVVELYMKKELEVEKFITHSVPFAEINKAFNLMAKGEGIRCIIRMEN

SEQ ID NO: 14324 - DNA, 1140 bp, Arabidopsis thaliana
  CDS (1)..(1140)
atggcgactcaaggtcaggttatcacttgcaaagctgcggtggcttacgagccgaacaagcctctggtcatcgaagatgtgcaagtggctccacctcaagctggtgaggttcggatcaagatcctctacactgctctttgtcacaccgacgcttacacttggagcggcaaggatcctgaaggtctctttccttgtattctaggtcatgaggctgctgggattgttgagagtgttggtgaaggagtaactgaagttcaagctggagatcatgttatcccttgttatcaagctgagtgtcgtgaatgcaagttttgcaaatctgggaagactaacctttgtggcaaggtgagatctgctactggtgttgggattatgatgaatgaccgtaagtcgaggttctcggttaatgggaaacccatttatcacttcatgggtacttccacgtttagtcagtatactgttgttcatgatgttagcgtcgccaaaattgatcctactgctcctttggataaagtttgccttcttggatgtggtgttcccactggccttggagcagtttggaatactgcaaaagtagaaccagggtcaaatgttgccattttcggtcttggcactgttggacttgctgttgccgagggtgcgaaaacagctggtgcttcaaggatcattggcattgacatcgatagcaagaagtatgaaactgcaaagaagtttggtgttaacgaatttgtgaacccaaaggatcacgacaagccaattcaggaagtgattgtcgatctcactgatggcggtgttgactacagctttgagtgcatcgggaatgtctccgtgatgagagctgcattggagtgctgtcacaagggatggggaacttcggtcatagttggtgttgcagcatcaggacaagagatatcaactcgtccgttccaactcgtgactggccgtgtgtggaaaggaacagcttttggtggtttcaagagtcgaacccaagtgccttggcttgttgaaaagtacatgaacaaggagataaaagtggatgaatacataacacacaacttgagcttgggagaaatcaataaggctttcgatctattgcacgaaggtacttgccttcgttgtgtcctcgataccagcaaatga

SEQ ID NO: 14325 - protein, 379 aa, Arabidopsis thaliana
MATQGQVITCKAAVAYEPNKPLVIEDVQVAPPQAGEVRIKILYTALCHTDAYTWSGKDPEGLFPCILGHEAAGIVESVGEGVTEVQAGDHVIPCYQAECRECKFCKSGKTNLCGKVRSATGVGIMMNDRKSRFSVNGKPIYHFMGTSTFSQYTVVHDVSVAKIDPTAPLDKVCLLGCGVPTGLGAVWNTAKVEPGSNVAIFGLGTVGLAVAEGAKTAGASRIIGIDIDSKKYETAKKFGVNEFVNPKDHDKPIQEVIVDLTDGGVDYSFECIGNVSVMRAALECCHKGWGTSVIVGVAASGQEISTRPFQLVTGRVWKGTAFGGFKSRTQVPWLVEKYMNKEIKVDEYITHNLSLGEINKAFDLLHEGTCLRCVLDTSK

SEQ ID NO: 14326 - DNA, 1134 bp, Ciona intestinalis
  CDS (1)..(1134)
atgttagatacagctggaaaggtcattacttgttctgcagcagtggcatggggtccaaaaaagccactgtctattgagaaaattcaagtggcaccacctaaagcccatgaagtgcgtataaaggtaatggctactggagtttgccatactgatgcctttacactcagtggtgaagacccagaggctgctttccctgtaatacttggccatgaaggtggtggcattgtagaaagtgtgggtgaaggggtaactgaattcaatgaaagtgatcatgttattccactctacataccacagtgtaaggattgcaacttctgcagacaccccaaaacaaatctgtgtcagaaaataagaacaactcaaggcaaaggttttctacccgatggaacatctcgttttacatgcaatggtcagatggtttatcattacatgggaacttccacatttagcgagtatactgttgttgcggatatttcgctttgtaaggttgatgaaagcgctccacttgacaaagtctgtttgcttggatgtggaataccaacgggttatggcgcagcacttaacactgccaaggttgaacctgggtcaacatgtgctgtgtggggtcttggggcagtgggtcttgctgtagtgatgggttgcaaagcagctggagctaccaggatcattggagttgacatcaatgagtcaaagtttgaaattgccaagcagtttggtgccacagagtgcttcaacccaaaagaatctaaagtttcagcagatgaagctattgttgctttaactgatggtggatgtgatttcacatttgaatgcattggtaatattcatacaatgagagctgcacttcaagctgcccacaaaggctggggtgtctcagttattattggagtggctggcagaggacaagaaatttcaacacgaccattttaccttgttactggtcgtacatggaagggaactgcatttggaggatacaagagcgttgaaggcgtgccaaaactggtgcaggattacttgaacaaaaaactgaaggttgatgagtttgtgactcacacaatgcccctttgtgacatcaacaaagcattcgattttatgcatgaaggaaaaagtcttcgttcagtgatcaacttctaa

SEQ ID NO: 14327 - protein, 377 aa, Ciona intestinalis
MLDTAGKVITCSAAVAWGPKKPLSIEKIQVAPPKAHEVRIKVMATGVCHTDAFTLSGEDPEAAFPVILGHEGGGIVESVGEGVTEFNESDHVIPLYIPQCKDCNFCRHPKTNLCQKIRTTQGKGFLPDGTSRFTCNGQMVYHYMGTSTFSEYTVVADISLCKVDESAPLDKVCLLGCGIPTGYGAALNTAKVEPGSTCAVWGLGAVGLAVVMGCKAAGATRIIGVDINESKFEIAKQFGATECFNPKESKVSADEAIVALTDGGCDFTFECIGNIHTMRAALQAAHKGWGVSVIIGVAGRGQEISTRPFYLVTGRTWKGTAFGGYKSVEGVPKLVQDYLNKKLKVDEFVTHTMPLCDINKAFDFMHEGKSLRSVINF

SEQ ID NO: 14328 - DNA, 1131 bp, Bombyx mori
  CDS (1)..(1131)
atgtcaacagtcggtaaagtgattaagtgcttggccgcagtcgcgtgggaagcaggcaagccgctgtccatcgaggagattgaagtggacccgccaaaagccggtgaagtgcgcgttaagatcacggccaccggagtctgccatactgacgcgtatacactctccggaaaagatcctgagggagtgtttcctgtagtactgggacatgaaggcggcggaatcgtggagagtgtcggtgagggagtcacttcagtcaagcccggggaccacgtagtacctctgtacgtcccacagtgcaacacatgtaaattctgcttgaatccgaaaactaatttgtgccagaaggttcgttctactcaaggtcaaggtgtgatgccagatggcactaggcgattccgctgtaaaggacaggaactctaccatttcatgggttgttcaacattcagtcagtacacagttgttctagaaatttctctctgtaaagttgcagaggctgctccattagataaagtttgtttgctgggatgcggtgtacctacaggttatggagccgccttgaatactgccaaagttgaaccaggatcaaattgcgctatttttggtcttggtgctgttggtttagctgttgctcttggatgcaaagcggcaggtgccaatcgcattattggtgttgacatcaaccctgacaagtttgaggtagctaagaaatttggagtcaatgaatttgtcaaccctaaggattatgataaaccaattcaacaagtactggtggatttgactgatggtggtctagaatacacttttgaatgtattggaaatgtaggcaccatgagagctgcactagaagcttgccataagggatggggtgtgtcagtgatcattggtgtagctgctgctggagaagagatcagcactcgtccattccaacttgttacaggtcgcacctggaagggaacagcttttggaggttacaaaagtagagaaagtgtaccaaagcttgtagatgagtacttggagaagaagctgcctttagacgaatttgtcactcacaatgtgccgctgaaggagatcaatgaggcattccatttgatgcatgctggaaaatctatccgtgcagtagttgacatgtaa

SEQ ID NO: 14329 - protein, 376 aa, Bombyx mori
MSTVGKVIKCLAAVAWEAGKPLSIEEIEVDPPKAGEVRVKITATGVCHTDAYTLSGKDPEGVFPVVLGHEGGGIVESVGEGVTSVKPGDHVVPLYVPQCNTCKFCLNPKTNLCQKVRSTQGQGVMPDGTRRFRCKGQELYHFMGCSTFSQYTVVLEISLCKVAEAAPLDKVCLLGCGVPTGYGAALNTAKVEPGSNCAIFGLGAVGLAVALGCKAAGANRIIGVDINPDKFEVAKKFGVNEFVNPKDYDKPIQQVLVDLTDGGLEYTFECIGNVGTMRAALEACHKGWGVSVIIGVAAAGEEISTRPFQLVTGRTWKGTAFGGYKSRESVPKLVDEYLEKKLPLDEFVTHNVPLKEINEAFHLMHAGKSIRAVVDM

SEQ ID NO: 14330 - DNA, 1212 bp, Oryza sativa (japonica cultivar-group)
  CDS (1)..(1212)
atggatgccactgccatcggcaacggcgccctgcactccaatggcgccggcgccgacaccaaagggaagccgatcaaatgcaaagcggcggtggcgcacggccccggcgaggcgctggtgatggaggaggtggaggtggcgccgccggcgaggatggaggtgcgcctcaaggtgctcttcacctctatctgccataccgacctcagcgcctggaaaggagagaacgagcttcagcgaaagtttcctcgcatattgggtcatgaggcagcaggggtggtggagagcgtgggagagggtgtggaggatcttgcccctggagatcatgttgtccccatcttcaccggcgagtgtggtgcgtgcacctactgcgagtccagcaagagcaacctatgcaaaacctaccgtgtcaacccattcaagagcaccatggtcaccgatggtggcacgaggttcaccatgatcgaccgctcctccggtgcacgcaacccggtctaccattttctcaacacttccacctttgctgagtacactgtgattgactccgcttgcgctgtcaagatcaaccctaaggctcccttggagaagatgagtctcctcagctgtggggtctccacaggagtgggagctgcatggaacactgcaaacgtctccaaggggtccacagtggcaatatttgggcttggtgccattggtcttgcggttgccgaaggtgccagattgagaggagcatctcgaatcatcggagttgacataaaccctgaaaaattctccaaaggcaaagagatgggcatcactgacttcatcaactcgaaggcatctggcaagcctgtccacgaggttatcatggagatgacagatggcggtgtcgactacagcttcgagtgcaccggcatcaccgatgttctacgggaggccttcgtttccacacatgatggatggggcctgaccgttgtgctggggatccatgcaacgcccaggatgctgccgctgcatccaatggagttatttgacggccgtcggatcactggctgcgtttttggtgacttcaagggaaagtcccagctgcctgaaatcgtggagaagtgcatgcagggtgagattaacataaattttgatgggttcataacacaagagttgcccttcgccgacatcaacaaagctttccagctgctggaagaggggaagtcactcagatgtctgctccatgtctga

SEQ ID NO: 14331 - protein, 403 aa, Oryza sativa (japonica cultivar-group)
MDATAIGNGALHSNGAGADTKGKPIKCKAAVAHGPGEALVMEEVEVAPPARMEVRLKVLFTSICHTDLSAWKGENELQRKFPRILGHEAAGVVESVGEGVEDLAPGDHVVPIFTGECGACTYCESSKSNLCKTYRVNPFKSTMVTDGGTRFTMIDRSSGARNPVYHFLNTSTFAEYTVIDSACAVKINPKAPLEKMSLLSCGVSTGVGAAWNTANVSKGSTVAIFGLGAIGLAVAEGARLRGASRIIGVDINPEKFSKGKEMGITDFINSKASGKPVHEVIMEMTDGGVDYSFECTGITDVLREAFVSTHDGWGLTVVLGIHATPRMLPLHPMELFDGRRITGCVFGDFKGKSQLPEIVEKCMQGEININFDGFITQELPFADINKAFQLLEEGKSLRCLLHV

SEQ ID NO: 14332 - DNA, 1113 bp, Pseudomonas aeruginosa PAO1
  CDS (1)..(1113): transl_table=11
atgatcaagtcccgtgccgccgtcgccttcgcccccaacaagccgttggaaatcgtcgaggtggatgtggcgccgccgcagaagggcgaggtactggtgcgcatcgtcgccaccggcgtctgccataccgacgcgtacaccctgtccggccaggattccgagggggtgttcccgtgcatcctgggccacgaaggtggcggcatcgtcgaagcggtgggcgagggcgtgacctccctgcaggtgggcgaccatgtcatcccgctctacaccgccgagtgcggcaagtgcaaattctgcctgtccggcaagaccaacctctgccaggccgtgcgcgccacccagggcaagggcctgatgcccgacggcaccagccgtttctcctacaagggcgagccggtcttccactacatgggctgctcgaccttctccgaatacaccgtgctgccggaaatctccctggcgaagattcccaaggatgccccgctggagaaggtctgcctgcttggctgcggcgtcaccaccgggatcggtgccgtgctgaacaccgccaaggtggaagagggcgctaccgttgccatcttcggcctgggcggcatcggcctggcagcgatcatcggggcgaagatggccaaggccgcgcgcatcatcgcggtcgacatcaacccgggcaagttcgatatcgccagggaactgggcgccaccgacttcatcaatccgaaggactacgacaagccgatccaggacgtcatcgtcgaactgaccgatggcggcgtcgactactccttcgagtgcgtcggcaacgtgcagttgatgcgcgccgcgctggaatgctgccacaagggctggggcgagtcggtgatcatcggtgtcgccggtgccggccaggaaatcagcacccggccgttccaactggtcaccggccgcgtctggcgcggttcggcgttcggcggggtgcgcgggcgcagcgagctgccgagctatgtcgagaaggcgcagaagggcgagatcccgctggataccttcatcacccacaccatggggctggaggacatcaacgaggccttcgagctgatgcacgaaggcaagagcatccgcaccgtcattcattactga

SEQ ID NO: 14333 - protein, 370 aa, Pseudomonas aeruginosa PAO1
MIKSRAAVAFAPNKPLEIVEVDVAPPQKGEVLVRIVATGVCHTDAYTLSGQDSEGVFPCILGHEGGGIVEAVGEGVTSLQVGDHVIPLYTAECGKCKFCLSGKTNLCQAVRATQGKGLMPDGTSRFSYKGEPVFHYMGCSTFSEYTVLPEISLAKIPKDAPLEKVCLLGCGVTTGIGAVLNTAKVEEGATVAIFGLGGIGLAAIIGAKMAKAARIIAVDINPGKFDIARELGATDFINPKDYDKPIQDVIVELTDGGVDYSFECVGNVQLMRAALECCHKGWGESVIIGVAGAGQEISTRPFQLVTGRVWRGSAFGGVRGRSELPSYVEKAQKGEIPLDTFITHTMGLEDINEAFELMHEGKSIRTVIHY

SEQ ID NO: 14334 - DNA, 1137 bp, Neisseria meningitidis MC58
  CDS (1)..(1137): transl_table=11
atggaaatgaaacaagccgattcaaccatcaaatctcgtgcggcggtggcattcgcccctaaccaacccttacaaattgtggaaatcgacgtagaaatgccgcgtaaaggcgaggtgttaatccgcaatacccacactggcgtgtgccatactgatgcgtttacgttatcaggaagcgatcctgaaggcgtattccctgtggtgcttggacacgaaggtgcgggtgtggtcgttgctgtgggcgaaggtgtgtcaagcgtaaaaccgggtgatcacgtgattccgctttacaccgccgaatgtggcgaatgtgagttttgttgttcaggtaaaaccaacttgtgcgtctcagtgcgtgatacacaaggtaaaggcttaatgccggacggcacgacgcgtttttcttatcaaggtcagccaatctatcactatatgggctgttcgactttcagtgaatactccgttgttgccgaagtttcactggcgaaaatcaaccctgaagccaaccatgaacaagtatgtttgctcggctgcggcgttaccacaggtattggtgcggtacataatacggcaaaagtgcaagaaggcgactctgttgccgtgtttggtttgggggcgattggtttggcggtggtgcaaggtgcgcgtcaagccaaagccggccgcattatcgccattgataccaatccatcaaaatttgagttggcaaaacagttcggtgcaacggattgtttgaacccgaacgattacgataaaccgatcaaagatgtgttgttagacattaataaatggggcattgaccatacctttgaatgtatcggcaatgtaaacgtaatgcgtcaggcattagaaagtgcacatcgtggttggggtcaatccattatcatcggcgtagcaggtgcaggacaagaaatttcaacgcgtccgttccagttggtaacaggtcgtgtttggaaaggttcagcatttggcggtgtgaaaggtcgctctgaactgccgaaaatggtggaagattcaatgaaaggcgacattgagttagaaccgtttgtaacccacacaatgacactcgatcaaatcaataaagcctttgacttaatgcacgaaggtaaatcgatccgcgccgttattcactactaa

SEQ ID NO: 14335 - protein, 378 aa, Neisseria meningitidis MC58
MEMKQADSTIKSRAAVAFAPNQPLQIVEIDVEMPRKGEVLIRNTHTGVCHTDAFTLSGSDPEGVFPVVLGHEGAGVVVAVGEGVSSVKPGDHVIPLYTAECGECEFCCSGKTNLCVSVRDTQGKGLMPDGTTRFSYQGQPIYHYMGCSTFSEYSVVAEVSLAKINPEANHEQVCLLGCGVTTGIGAVHNTAKVQEGDSVAVFGLGAIGLAVVQGARQAKAGRIIAIDTNPSKFELAKQFGATDCLNPNDYDKPIKDVLLDINKWGIDHTFECIGNVNVMRQALESAHRGWGQSIIIGVAGAGQEISTRPFQLVTGRVWKGSAFGGVKGRSELPKMVEDSMKGDIELEPFVTHTMTLDQINKAFDLMHEGKSIRAVIHY

SEQ ID NO: 14336 - DNA, 1134 bp, Yersinia pestis CO92
  CDS (1)..(1134): transl_table=11
atgattaaaacccgcgccgctgtcgcatgggggccaaaccagccactgtccgttgaagaagttgatttgatgccaccacagaaaggcgaagtgttagtgcggattgtcgccagtggcgtttgtcacactgacgcttataccctttcgggggccgatcctgaaggcgtattcccgaccattttaggtcatgaaggcggtggaattgttgaagccattggcgaaggtgtcaccagtgttgccgtagtggaccacgttattccgctgtacacaccagagtgtggcgagtgcaagtactgccgctccggtaaaaccaacctgtgccaggcaatccgcagcactcagggtaaaggtttgatgcccgatggtaccacccgcttctctaaaaatggtcaacccatcttccactacatggggacgtcaaccttctccgaactgaccgttgtaccggaaatatcactcgcgaaaatcaataaagaagccccgttggaagaagtatgcctgctgggctgcggcgtcaccactgggatgggtgcggtgatgaataccgcaaaagttaaaccaggtgataccgtcgcaatcttcggccttggcggtatcggtttatcggcggtgattggtgcacagatggcgggggcgagccgaattattgggatcgatctcaataccagcaaattcgagctggcccgcaaattgggcgcgacagacctgatcaatccgaaagactatgataaacctatccaggaagtgatcgttgaactgaccgacggcggtgtagatttctcatttgaatgcattggtaacgtcaatgtcatgcgttcagcattagagtgctgccataaaggttggggagagtcggtgattattggtgtcgccggtgccggtgaagaaatttcaacccgcccgttccaattggttacgggccgcgtatggcggggttctgcatttggtggcgtcaaaggccgctcagaattgccgggcattgtgcagcaatatttggacggtaaattcgcgttgaacgacttcattacccacacaatggcgctggatcaaatcaacgaagcctttgatttaatgcacgagggtaaatctatccgcagtgtgatccattttaatcactcttccgaaagcaaataa

SEQ ID NO: 14337 - protein, 377 aa, Yersinia pestis CO92
MIKTRAAVAWGPNQPLSVEEVDLMPPQKGEVLVRIVASGVCHTDAYTLSGADPEGVFPTILGHEGGGIVEAIGEGVTSVAVVDHVIPLYTPECGECKYCRSGKTNLCQAIRSTQGKGLMPDGTTRFSKNGQPIFHYMGTSTFSELTVVPEISLAKINKEAPLEEVCLLGCGVTTGMGAVMNTAKVKPGDTVAIFGLGGIGLSAVIGAQMAGASRIIGIDLNTSKFELARKLGATDLINPKDYDKPIQEVIVELTDGGVDFSFECIGNVNVMRSALECCHKGWGESVIIGVAGAGEEISTRPFQLVTGRVWRGSAFGGVKGRSELPGIVQQYLDGKFALNDFITHTMALDQINEAFDLMHEGKSIRSVIHFNHSSESK

SEQ ID NO: 14338 - DNA, 1110 bp, Caulobacter crescentus CB15
  CDS (1)..(1110): transl_table=11
atgaagacccgcgccgctgttgcgttcgaagccaagaagccgctggagatcgtcgaggtcgacctggaaggccccaaggccggcgaggtgatggtcgagatcaaggccaccggcgtctgtcacaccgacgcctacactctggacggcttcgacagcgagggcatcttcccctcgatcctgggccacgagggcgcgggcgtggtggtcgaggtcggggcgggcgtgaccagcgtggcggtcggcgatcacgtgatcccgctctacacgcccgaatgccgccagtgcaaaagctgcctgtcgggcaagaccaacctgtgcacggcgatccgcgccacccagggcaagggcctgatgccggacggcaccagccgcttctcctacaagggtcagccgatctatcactatatgggctgctcgaccttctcgaactacacggtgctgcccgagatcgcggtggccaagatccgccgcgacgcgccgttcaagaccgcctgctactgcgggtgcggcgtgaccacgggcgtgggcgcggtgaccaacaccgccaaggtcgagccgggcgccaacgccatcgtctttggcctgggcggcatcggcctgaacgtcatccagggcctgaagctggtcggcgccaacatgatcgtcggtgtcgacatcaatcctgaccgcgaagaatggggccgcaagttcggcatgacccacttcgtcaacccaaaggacgtccagggcgatctcgtcgcgcacctggtggccctgaccgacggcggcgctgactacaccttcgacgccaccggcaatacgggcgtcatgcgcacggcgctggaagcctgccaccgcggctggggcgagagcatcatcatcggcgtggccgaggcggggaaggaaatctcgacccgtccgttccagctggtcaccggccgggtctggaagggcacggccttcggcggcgcgcgcggccgcaccgacacgcccaagatcgtcgactggtacatggacgggaagattcagatcgacccgatgatcacccacgtcctgccgctggaagagatcaacaaggcgtttgatctgatgcacgcgggcgagagcatccggaccgtggtgacgttctag

SEQ ID NO: 14339 - protein, 369 aa, Caulobacter crescentus CB15
MKTRAAVAFEAKKPLEIVEVDLEGPKAGEVMVEIKATGVCHTDAYTLDGFDSEGIFPSILGHEGAGVVVEVGAGVTSVAVGDHVIPLYTPECRQCKSCLSGKTNLCTAIRATQGKGLMPDGTSRFSYKGQPIYHYMGCSTFSNYTVLPEIAVAKIRRDAPFKTACYCGCGVTTGVGAVTNTAKVEPGANAIVFGLGGIGLNVIQGLKLVGANMIVGVDINPDREEWGRKFGMTHFVNPKDVQGDLVAHLVALTDGGADYTFDATGNTGVMRTALEACHRGWGESIIIGVAEAGKEISTRPFQLVTGRVWKGTAFGGARGRTDTPKIVDWYMDGKIQIDPMITHVLPLEEINKAFDLMHAGESIRTVVTF

SEQ ID NO: 14340 - DNA, 1119 bp, Salmonella typhimurium LT2
  CDS (1)..(1119): transl_table=11
atgaaatcacgtgcagcagttgcttttggtcccggtcagccgttaaaaattgtcgagattgacgttgcgccgccgaaaaaaggcgaagttctggtcaaaatcactcataccggcgtttgccataccgatgcttttaccctttccggcgatgatccggaaggcgtattcccggcagtcctgggtcacgaaggcggcggcgtggtagtcgaggtcggcgagggggtcaccagcctgaaacccggcgatcatgttattccactgtatacggcggaatgcggcgagtgtaagttctgtaagtccggtaaaactaacctttgtcaggccgtacgcgccactcagggaaaagggctgatgccggatggcactacccgcttttcttataacggcgaacccgtttatcactatatgggaaccagcacgttcagcgaatataccgtttgcgcggaaatttctctggcgaaagtgaacccgcaggcgccgctggataaagtgtgtctgttgggctgtggcgtgacgactggtattggcgccgtccataacaccgctaaagtgaaagcgggcgacaccgttgccgtttttggtttaggcggtattgggctggcggttattcagggcgcggttcaggctaaagccgggcgtattttagctgtcgacacgaatccggaaaaatttacgctggcgggcgaaatgggggccacggactttattaatccgaatgattacgacaaaccgatccaggacgttattgttgagcttactgatggcggcgtagatttcagttttgaatgtatcggcaacgttaacgtgatgcgagcagcgctggaatgttgtcataaaggctggggcgaaagcattattattggcgtagcgggggcagggcaggaaatcaaaacccgtcccttccagctagtgaccggtcgcgtctggcgtggctccgcctttggcggcgtgaaagggcgcacgcagctgccagggatggtcgaagatgcgatgaacggtaaaatccgtttagatccttttattactcaccgcctgccgctggagcagattaacgatgcctttgaactgatgcatcagggtaaatccatccgtactgttatccactttggcgataactga

SEQ ID NO: 14341 - protein, 372 aa, Salmonella typhimurium LT2
MKSRAAVAFGPGQPLKIVEIDVAPPKKGEVLVKITHTGVCHTDAFTLSGDDPEGVFPAVLGHEGGGVVVEVGEGVTSLKPGDHVIPLYTAECGECKFCKSGKTNLCQAVRATQGKGLMPDGTTRFSYNGEPVYHYMGTSTFSEYTVCAEISLAKVNPQAPLDKVCLLGCGVTTGIGAVHNTAKVKAGDTVAVFGLGGIGLAVIQGAVQAKAGRILAVDTNPEKFTLAGEMGATDFINPNDYDKPIQDVIVELTDGGVDFSFECIGNVNVMRAALECCHKGWGESIIIGVAGAGQEIKTRPFQLVTGRVWRGSAFGGVKGRTQLPGMVEDAMNGKIRLDPFITHRLPLEQINDAFELMHQGKSIRTVIHFGDN

SEQ ID NO: 14342 - DNA, 1185 bp, Arabidopsis thaliana
  CDS (1)..(1185)
atggcggagactcaaggaaaggtcatcacttgtaaagctgctgtcgtatggggtccaaaagtgccgcttgtaattcaagaaatatgcgtcgatcctcctcagaaaatggaagtccgtgttaaaattctttactcctccatttgccacaccgatctcggatgttggaacggcacgaacgaagctgaacgagcatttccaaggattcttggccatgaagctgtcgggattgtagagagtgttggagaaggagtaaaagatgtgaaagaaggagactacgtgattccgactttcaatggagaatgtggtgaatgtaaagtgtgtaagagagaagaaagtaatctctgtgagcgatatcatgtggatcctatgaagagggtgatggtgaatgatggagggacgagattctcaaccaccataaacaaggacggtggttcgagccaaagccaacctatatatcacttccttaacacctccacgttcaccgaatacactgtcttggactcggcttgcgtcgtcaagatcgatcctaattctcctctcaagcaaatgagcctcttgagttgtggtgtctcaactggggttggagcagcttggaacattgcaaatgtgaaggaaggaaaaagcactgctgtctttggattgggttccgttggactcgctgttgctgaaggtgcaagagctagaggagcttctaggatcattggtgttgatgctaatgcttccaaatttgagaaaggtaaactgatgggagtaacagatttcataaaccctaaagacttaactaagccagtacatcagatgatacgagagataacgggaggaggcgtggactatagctttgaatgtacaggaaacgttgatgttcttcgcgaagcctttttatccactcacgtcggttggggatcgacagtacttgttgggatctatccgacgccaagaacattgcctcttcacccaatggagcttttcgacggccgtagaatcaccggttctgtgtttggtggcttcaagcccaaatctcagcttccaaatttcgcccaacaatgcatgaaaggggttgtgaaattggaaccttttattaccaatgagcttccatttgagaagataaacgatgcgtttcagctgcttcgcgatggaaaatctcttcggtgcattcttcaaatctctaaacttctcaagagatga

SEQ ID NO: 14343 - protein, 394 aa, Arabidopsis thaliana
MAETQGKVITCKAAVVWGPKVPLVIQEICVDPPQKMEVRVKILYSSICHTDLGCWNGTNEAERAFPRILGHEAVGIVESVGEGVKDVKEGDYVIPTFNGECGECKVCKREESNLCERYHVDPMKRVMVNDGGTRFSTTINKDGGSSQSQPIYHFLNTSTFTEYTVLDSACVVKIDPNSPLKQMSLLSCGVSTGVGAAWNIANVKEGKSTAVFGLGSVGLAVAEGARARGASRIIGVDANASKFEKGKLMGVTDFINPKDLTKPVHQMIREITGGGVDYSFECTGNVDVLREAFLSTHVGWGSTVLVGIYPTPRTLPLHPMELFDGRRITGSVFGGFKPKSQLPNFAQQCMKGVVKLEPFITNELPFEKINDAFQLLRDGKSLRCILQISKLLKR

SEQ ID NO: 14344 - DNA, 1110 bp, Proteus vulgaris
  CDS (1)..(1110): transl_table=11
atgaaatcacgtgctgccgttgcatttgcaccagggaagcccctggagattgttgaaattgatgttgcaccacctaaaaaaggcgaggtgctgattaaaaatacccacaccggtgtctgccacacagatgcctttaccctctccgggaacgatcctgagggcgttttcccggtggttctcggccacgaaggggccggtgtcgtcgtggaggtcggtgaaggcgtgaccagcgtgaagccgggagaccatgtgattccgctttacactgccgaatgcggggagtgtgaattctgtcagtccgggaaaacgaacctctgtgtatcggttcgcgaaactcagggaaaaggactgatgcctgacggaaccacccgcttttcttacaatggccagcctctttaccactacatgggatgctccaccttcagtgagtatacggtagtggccgaggtttctctggcaaaaattaacccggaggcaaaccatgaacacgtctgcctgctgggctgtggcgtgactaccgggattggcgctgttcacaacacagcgaaagtacagcctggagattctgtcgctatttttggtcttggcgcaatcggtctggctgccgttcagggggctcgccaggcaaaagcaggacgcattatcgctatcgacaccaacccggccaaattcgaacttgcccgtcagttcggtgcaaccgactgcattaacccgaacgaccatgacaaaccgattaaagatgtgctgcttgaaatcaacaaatggggcattgaccacacttttgaatgtatcggtaacgtcaacgttatgcgtgcggcgctggaaagtgctcaccgtggctggggccagtccattgtcatcggcgtggccggcgccgggcaggagatatccacccgtccattccagctcgttaccgggcgcgtatggaaaggttctgctttcggcggagtgaaaggccgtacgcaacttccggccatggtagaagatgccatgaagggtgaaattgaactggagccatttgttacccacacgatgacgctggatgaaatcaatgaggccttcgatcttatgcatgaaggtaaatcaatccgtacggtaatccgttactga

SEQ ID NO: 14345 - protein, 369 aa, Proteus vulgaris
MKSRAAVAFAPGKPLEIVEIDVAPPKKGEVLIKNTHTGVCHTDAFTLSGNDPEGVFPVVLGHEGAGVVVEVGEGVTSVKPGDHVIPLYTAECGECEFCQSGKTNLCVSVRETQGKGLMPDGTTRFSYNGQPLYHYMGCSTFSEYTVVAEVSLAKINPEANHEHVCLLGCGVTTGIGAVHNTAKVQPGDSVAIFGLGAIGLAAVQGARQAKAGRIIAIDTNPAKFELARQFGATDCINPNDHDKPIKDVLLEINKWGIDHTFECIGNVNVMRAALESAHRGWGQSIVIGVAGAGQEISTRPFQLVTGRVWKGSAFGGVKGRTQLPAMVEDAMKGEIELEPFVTHTMTLDEINEAFDLMHEGKSIRTVIRY

SEQ ID NO: 14346 - DNA, 1110 bp, Xanthomonas axonopodis pv. citri str. 306
  CDS (1)..(1110): transl_table=11
atgaaatcccgtgcagcagtcgcatttgggcccggcaagccgctggaaatcgtcgaaatcgacgtcgcgccgccgaaagccggggaagtgctggtccgcatcacccacaccggcgtgtgccacaccgatgccttcacgctgtctggcgacgacccggaaggcatcttcccgtcggtgctcgggcatgaaggcggcggcatcgtcgaacaggtcggcgaaggcgtgacaagcgtcaagatcggcgatcacgtgatcccgctgtacacggccgaatgccgcaagtgcaaattctgtttgtccggcaagaccaacctgtgccaggccgtgcgcgccacccagggcaagggcctgatgcccgacggcaccacgcgcttctcctacaacggcgagcctatttatcactacatgggctgcagcaccttcagcgaatacaccgtcgtgccggaaatttcgctggccgtggtcaacccggaggcaccgctggagaaggtctgcctgctcggctgcggcgtcaccaccggtatcggcgcggtgcacaacaccgccaaggtcaagcccggcgagagtgttgccgtgttcggcctgggcggcatcggtcttgcggtaatccagggcgcggtacaggccaaggccgggcgcatcctggccatcgacaccaatccgggcaagttcgatctggcgcgcagcatgggtgccaccgactgcatcaaccccaaggactacgacaagccgattcaggaggtcatcgtcgagttgaccgatggcggcgtggacttcagcttcgaatgcatcggcaacgtcaatgtgatgcgttcggcgctggagtgttgccacaagggctggggcgagagcgtcatcatcggcgtggctggcgccggccaggaaatcagcacgcgtcccttccagctggtgactggtcgcgtatggcgcggcagcgccttcggtggcgtcaagggacgtacgcaattgccgggcatggtggagcagtcgatgaagggcgcgatcgacctggacccattcatcacccacaccatgccgttggaagagatcaacgaggccttccacctgatgcacgagggcaagtcgatccgcaccgtgatccatttctga

SEQ ID NO: 14347 - protein, 369 aa, Xanthomonas axonopodis pv. citri str. 306
MKSRAAVAFGPGKPLEIVEIDVAPPKAGEVLVRITHTGVCHTDAFTLSGDDPEGIFPSVLGHEGGGIVEQVGEGVTSVKIGDHVIPLYTAECRKCKFCLSGKTNLCQAVRATQGKGLMPDGTTRFSYNGEPIYHYMGCSTFSEYTVVPEISLAVVNPEAPLEKVCLLGCGVTTGIGAVHNTAKVKPGESVAVFGLGGIGLAVIQGAVQAKAGRILAIDTNPGKFDLARSMGATDCINPKDYDKPIQEVIVELTDGGVDFSFECIGNVNVMRSALECCHKGWGESVIIGVAGAGQEISTRPFQLVTGRVWRGSAFGGVKGRTQLPGMVEQSMKGAIDLDPFITHTMPLEEINEAFHLMHEGKSIRTVIHF

SEQ ID NO: 14348 - DNA, 1131 bp, Shewanella oneidensis MR-1
  CDS (1)..(1131): transl_table=11
atgacagcacaaatacttaaatctaaagccgcagtcgcctgggctgtaggcgagccactatcgatcgaaatcgtcgatgttatgccaccacagaagggtgaagtacgcgtcaagatgatcgcgactggcgtttgtcataccgatgcctttactctttctggtgatgatccagagggtatcttcccttgtattcttggccatgaaggcggcggtatcgtcgagtccattggtgagggcgtgactagtgttcaagtaggtgaccatgttattccactctacacacctgagtgtggcgaatgtaaattctgtaagtctggcaagactaacctttgtcagaagatccgcgaaacccaaggtaaaggtttgatgccagacggtactagccgtttttcgaaagatggccagataatctaccactacatgggaacctcgaccttctctgaatacacagtattaccagagatctcactagcaaaagtgaaccctgatgcgccacttgaagaagtatgcttgttgggttgtggtgtgactaccggtatgggcgcggtaatgaatacggctaaagttgaagagggtgctacggttgctatcttcggtatgggtggtatagggctatcggcagttatcggtgcgactatggctaaggcgtctcgcatcatagttattgacattaacgaaagtaagtttgagttagccggtaaattgggtgctacggactttattaacccgaaagactacgacaagccaattcaagacgtgattgttgagttgaccgacggcggcgtcgattactcgtttgagtgtatcggtaacgttaatgtgatgcgctctgcacttgagtgctgccataaaggttggggtgagtcagtagttattggtgttgcaggtgcaggtcaagagatttcgactcgtccattccagttagtcacgggtcgtgtatggaaaggcagtgcatttggtggtgttaaaggtcgctctgaactaccagaatatgtcgaacgttacctggcgggtgagtttaagttgagtgacttcatcactcacaccatgagtcttgagcaggtcaatgatgcgtttgatcttatgcaccaaggtaagagtatccgtactgttattcattttgataagtaa

SEQ ID NO: 14349 - protein, 376 aa, Shewanella oneidensis MR-1
MTAQILKSKAAVAWAVGEPLSIEIVDVMPPQKGEVRVKMIATGVCHTDAFTLSGDDPEGIFPCILGHEGGGIVESIGEGVTSVQVGDHVIPLYTPECGECKFCKSGKTNLCQKIRETQGKGLMPDGTSRFSKDGQIIYHYMGTSTFSEYTVLPEISLAKVNPDAPLEEVCLLGCGVTTGMGAVMNTAKVEEGATVAIFGMGGIGLSAVIGATMAKASRIIVIDINESKFELAGKLGATDFINPKDYDKPIQDVIVELTDGGVDYSFECIGNVNVMRSALECCHKGWGESVVIGVAGAGQEISTRPFQLVTGRVWKGSAFGGVKGRSELPEYVERYLAGEFKLSDFITHTMSLEQVNDAFDLMHQGKSIRTVIHFDK

SEQ ID NO: 14350 - DNA, 1119 bp, Streptococcus mutans UA159
  CDS (1)..(1119): transl_table=11
atgaatactatcaaaacacgagcagcagttgcttgggcacccaatgaacccttgaaaattgaagagttggacctgatgatgccacaaaagggagaggttatggtgcatattacagcgacaggagtctgtcataccgatgcctataccctatcaggaaaagatgcagaaggggttttcccttgcgttttgggacatgaaggtgctggtatcgttgaagcagtgggcgaaggcgtaacagagtttcaggtcggtgatcatgtgatcccgctttatacagccgaatgcggtaaatgtgagttctgcctttcaggaaagaccaacctatgctcagccgttcgtgagacacaaggccgcggtgtcatgcctgacgggacagttcgtttctttaaggatggtcaacctatttatcattatatgggaacctcaacatttgcagaacatactgttgtttcagagtattctttggttaaaatacaggacaatgcgccgcttgaagaagtctgtttgctgggctgcggtgtaacaactggcatgggggctgttttgaatacagctaaagtcgaagagggagcaactgtggccatttttggtctaggcggtatcggactagctgctattattggtgctcgtatggctaaagcctctcgaatcattgctattgatattaatcccgataagtttgacaaggctagaaaattgggagctaccgatttagtcaatcccaataatcatgctaaaccaattcaggaagtcattattgacataaccaacggcggtgttgattattcctttgaatgtatcggaaacgtagaagtcatgcgggctgccttggaatgctgccacaagggttggggagagagtactatcatcggtgtagcaccagctggtgctgaaattcatactcgtccatttcaattggttacaggtcgtgtctggcgtggttcagctttcggtggtgttaaaggcaaaacacagctgccgggaattgttggacaatatatggctggcgagtttgcattgagtgattttattacccataccatgcctctagagcagattaacgatgcctttgacttgatgcatgaaggcaaatctattcgcacagtcattcattactga

SEQ ID NO: 14351 - protein, 372 aa, Streptococcus mutans UA159
MNTIKTRAAVAWAPNEPLKIEELDLMMPQKGEVMVHITATGVCHTDAYTLSGKDAEGVFPCVLGHEGAGIVEAVGEGVTEFQVGDHVIPLYTAECGKCEFCLSGKTNLCSAVRETQGRGVMPDGTVRFFKDGQPIYHYMGTSTFAEHTVVSEYSLVKIQDNAPLEEVCLLGCGVTTGMGAVLNTAKVEEGATVAIFGLGGIGLAAIIGARMAKASRIIAIDINPDKFDKARKLGATDLVNPNNHAKPIQEVIIDITNGGVDYSFECIGNVEVMRAALECCHKGWGESTIIGVAPAGAEIHTRPFQLVTGRVWRGSAFGGVKGKTQLPGIVGQYMAGEFALSDFITHTMPLEQINDAFDLMHEGKSIRTVIHY

SEQ ID NO: 14352 - DNA, 1116 bp, Pseudomonas putida KT2440
  CDS (1)..(1116): transl_table=11
ttgatgatcaagtcccgtgctgccgtagccttcgaagccaagaaacccctggaaatcgtcgaagtcgacgtggccatgccaaaggccggtgaagtgctgctgcgcgtggtcgccagcggtgtctgccacaccgatgcctataccctgtccggtgctgacccggaaggtatcttcccgtcgatccttggccacgaaggcggtgccatcgtcgaagcggtaggcgagggggtgacctcgctcgccgtgggtgaccacgtcatcccgctgtacaccccggaatgcggcaagtgcaagttctgcctctcgggcaagaccaacctgtgccaggccatccgcgccactcagggcaagggcctgatgccggacggcaccacgcgcttctcgtacaagggccagcagctgttccactacatgggcacctcgacgttctccgaatacaccgtgctgccggaaatttccgtggccaagatccagaaagaagcacccctggaaaaggtctgcctgctgggttgcggcgtcaccaccggtatcggcgcggtgctcaacactgccaaggtcaagcccggtgataccgtggccatcttcggcctcggtggcatcggcctgtcggccgtgatcggtgcggtcaaggccaaggcctcgcgtatcatcgccatcgacatcaacccggccaagttcgaaatcgcccgccagttgggtgccaccgattgcgtcaacccgaaggactacgatcgcccgatccaggaagtgatcgtcgacctcaccgatggtggcgtggacttctccttcgagtgcatcggcaacgttcaactgatgcgcgccgccctggaatgctgccacaagggctggggagagtcggtcatcatcggtgtggccggtgccggccaggaaatttccacgcgtccattccagctggttaccggtcgggtttggcgtggttcggcgttcggcggcgtgcgtggccgcagcgagctgccgagctacgtggaaatgtccgagaaaggcgagatcccgctggacaccttcatcacccacacgatggggctggaagacatcaacaaggccttcgacctgatgcatgaaggcaagagcatccgtagcgtgatccacttctga

SEQ ID NO: 14353 - protein, 371 aa, Pseudomonas putida KT2440
MMIKSRAAVAFEAKKPLEIVEVDVAMPKAGEVLLRVVASGVCHTDAYTLSGADPEGIFPSILGHEGGAIVEAVGEGVTSLAVGDHVIPLYTPECGKCKFCLSGKTNLCQAIRATQGKGLMPDGTTRFSYKGQQLFHYMGTSTFSEYTVLPEISVAKIQKEAPLEKVCLLGCGVTTGIGAVLNTAKVKPGDTVAIFGLGGIGLSAVIGAVKAKASRIIAIDINPAKFEIARQLGATDCVNPKDYDRPIQEVIVDLTDGGVDFSFECIGNVQLMRAALECCHKGWGESVIIGVAGAGQEISTRPFQLVTGRVWRGSAFGGVRGRSELPSYVEMSEKGEIPLDTFITHTMGLEDINKAFDLMHEGKSIRSVIHF

SEQ ID NO: 14354 - DNA, 1110 bp, Escherichia coli CFT073
  CDS (1)..(1110): transl_table=11
  misc_feature (273)..(273): n is a, g, c or t
  misc_feature (279)..(279): n is a, g, c or t
  misc_feature (330)..(330): y is t or c
atgaaatcacgtgctgccgttgcatttgctcccggtaaaccgctggaaatcgttgaaattgacgttgcaccaccgaaaaaaggtgaagtgctgattaaagtcacccataccggtgtttgccataccgacgcatttaccctctccggcgatgacccggaaggtgtcttcccggtggttctcggtcacgaaggggccggggttgtagttgaagtcggtgaaggggtaaccagcgtcaaacctggcgaccatgtgatcccgctttacaccgaaaantgcggngagtgtgagttctgtcgttctggcaaaactaacctgtgtgtcgcggttcgygaaacgcagggcaaaggcttgatgccagacggcaccacccgtttttcttacaacgggcagccgctttatcactacatgggatgctcaacattcagtgaatacaccgtggtagcggaagtgtctctggccaaaattaatccagaagcgaaccatgaacacgtctgcctgctgggctgtggcgtgaccaccggtattggcgcggtacacaacacagctaaagtccagccaggtgattctgttgccgtgtttggtcttggcgcgattggtctggcagtggttcagggcgcgcgtcaggcgaaagcgggacggattatcgctatcgataccaacccgaagaaattcgaactggcgcgtcgcttcggtgccaccgactgcattaacccgaatgactacgacaaaccgattaaagatgtcctgctggatatcaacaaatggggtatcgaccatacctttgaatgcatcggtaacgtcaacgtgatgcgtgcggcgctggaaagtgcgcaccgcggctggggtcaatcggtgatcatcggtgtcgcaggatctggtcaggaaatctccacccgtccattccagttggtcaccggtcgcgtatggaaaggttccgcgtttggcggcgtgaaaggtcgttcccagttaccgggtatggttgaagatgcgatgaaaggtgatatcgatctggaaccgtttgtcacgcataccatgagcctggatgaaattaatgacgccttcgacctgatgcatgaaggtaaatccattcgaaccgtaattcgttactga

SEQ ID NO: 14355 - protein, 369 aa, Escherichia coli CFT073
  misc_feature (91)..(91): The Xaa at location 91 stands for Asn, or Lys.
MKSRAAVAFAPGKPLEIVEIDVAPPKKGEVLIKVTHTGVCHTDAFTLSGDDPEGVFPVVLGHEGAGVVVEVGEGVTSVKPGDHVIPLYTEXCGECEFCRSGKTNLCVAVRETQGKGLMPDGTTRFSYNGQPLYHYMGCSTFSEYTVVAEVSLAKINPEANHEHVCLLGCGVTTGIGAVHNTAKVQPGDSVAVFGLGAIGLAVVQGARQAKAGRIIAIDTNPKKFELARRFGATDCINPNDYDKPIKDVLLDINKWGIDHTFECIGNVNVMRAALESAHRGWGQSVIIGVAGSGQEISTRPFQLVTGRVWKGSAFGGVKGRSQLPGMVEDAMKGDIDLEPFVTHTMSLDEINDAFDLMHEGKSIRTVIRY

SEQ ID NO: 14356 - DNA, 1131 bp, Vibrio vulnificus CMCP6
  CDS (1)..(1131): transl_table=11
atgactcaagataaattcatcaaatctcgcgccgctgtagcttgggggccaaaacaaccactgagcatcgaagaagtcgatgtcatgctgcccagaaaaggcgaagtccttgttcgcatcgtcgcgactggggtttgtcacacggatgcttttacgctgtcaggagatgatccagaaggggtttttccagcgattttaggtcatgaaggtggcggtattgtcgaaatggttggcgaaggggtaaccagcgtctcagtcggtgatcacgtcattcccctttacaccgcagagtgtggtcaatgtaagttctgtctgtctggtaaaaccaacttgtgccaagccgtgcgagaaacacaaggtaaaggcttaatgcctgatggcacgacgcgattttataaagatggcaagcctatcttccactatatgggctgctcaaccttttcggagtacaccgtgttacctgaaatctcactagcaaaagtaaataaagaagcgccgctggaagagatctgcttacttggctgtggtgtcacgactgggatgggcgcggtaatcaatacagcaaaagtgaagcaaggtgatacggttgcgatcttcggcttaggtgggatcggcttatcagcgattattggtgcgcgtatggctggtgcgagtcgcattattgccgttgatatcaacgatagaaaatttgaattagccaagcagctgggtgccacagattgcattaaccctaaagaacatgctcagccgatccaagaggtaatcatcgagatgactgacggcggtgtggatttttctttcgaatgcatcggtaatgtcaacgtcatgcgccaagcgctcgaatgctgccataagggctggggggaatctgtcatcatcggggtcgcaggagcagggcaagaaatctcaacacgccctttccaactggtcacaggtcgagtttggcgtggtagcgcttttggcggcgtgaaaggtcgttctcaactgcctgcgattgttgaacaataccttgctggtgaatttggtttacaagaattcatcacgcatacaatgccactagaagggatcaacgacgcctttgaactgatgcactcaggagagagcattcgctcagtagttcacttcgaataa

SEQ ID NO: 14357 - protein, 376 aa, Vibrio vulnificus CMCP6
MTQDKFIKSRAAVAWGPKQPLSIEEVDVMLPRKGEVLVRIVATGVCHTDAFTLSGDDPEGVFPAILGHEGGGIVEMVGEGVTSVSVGDHVIPLYTAECGQCKFCLSGKTNLCQAVRETQGKGLMPDGTTRFYKDGKPIFHYMGCSTFSEYTVLPEISLAKVNKEAPLEEICLLGCGVTTGMGAVINTAKVKQGDTVAIFGLGGIGLSAIIGARMAGASRIIAVDINDRKFELAKQLGATDCINPKEHAQPIQEVIIEMTDGGVDFSFECIGNVNVMRQALECCHKGWGESVIIGVAGAGQEISTRPFQLVTGRVWRGSAFGGVKGRSQLPAIVEQYLAGEFGLQEFITHTMPLEGINDAFELMHSGESIRSVVHFE

SEQ ID NO: 14358 - DNA, 1110 bp, Bradyrhizobium japonicum USDA 110
  CDS (1)..(1110): transl_table=11
atgaagacacgtgccgccgttgctttcgaagccaagaaaccactcgagatcgtcgaagtcgatctggaaggaccgaaggccggcgaagtcctggtcgagatcaaggcgacgggcatctgccataccgacgcctacacgctcgacggcttcgacagcgaaggaatcttcccgtcgatcctcggccatgagggcgccggaatcatccgcgagatcggccccggcgtgacctcggtcaagccgggcgaccacgtcatcccgctgtacacgccggaatgccggcagtgcaaaagctgcctgagccagaagaccaatctctgcaccgcgatccgcgcgacgcagggcaagggcgtgatgcccgacggcaccagccgcttctcctacaagggcaagccgatctaccactacatgggctgctcgaccttctcgaacttcaccgtgctgcccgagatcgccgtcgccaagatccgcgaagacgcgccgttcgacaagagctgctacatcggttgcggcgtcaccaccggcgtcggcgcggtcgtcaacactgccaaggtcgagccgggcgccaacgtggtcgtgttcggcctcggcggcatcggactgaatgtgatccagggcgccaagatggccggcgccgacaagatcatcggcgtcgacgtcaatgattccaaggaagattggggccgccggttcggcatgacccacttcgtcaacccgaagaagatcaccggcgacatcgttccgcatctcgtcaacctcaccgacggcggcgccgactacaccttcgactgcaccggcaacaccaccgtgatgcgccaggcgctggaagcctgccatcgcggctggggcacctcgatcatcatcggcgtcgccgaagccggcaaggagatcgccacccgcccgttccagctcgtcaccggccgcaattggcgcggcacggctttcggcggcgcgcgcggccgcaccgacgtgccgaagatcgtcgactggtacatgaacggaaagatccagatcgatccgatgatcacccacgtgctcaagctcgaagagatcaacaagggctttgacctcatgcatgagggcaaatccatccgttccgtcgtcgtctactag

SEQ ID NO: 14359 - protein, 369 aa, Bradyrhizobium japonicum USDA 110
MKTRAAVAFEAKKPLEIVEVDLEGPKAGEVLVEIKATGICHTDAYTLDGFDSEGIFPSILGHEGAGIIREIGPGVTSVKPGDHVIPLYTPECRQCKSCLSQKTNLCTAIRATQGKGVMPDGTSRFSYKGKPIYHYMGCSTFSNFTVLPEIAVAKIREDAPFDKSCYIGCGVTTGVGAVVNTAKVEPGANVVVFGLGGIGLNVIQGAKMAGADKIIGVDVNDSKEDWGRRFGMTHFVNPKKITGDIVPHLVNLTDGGADYTFDCTGNTTVMRQALEACHRGWGTSIIIGVAEAGKEIATRPFQLVTGRNWRGTAFGGARGRTDVPKIVDWYMNGKIQIDPMITHVLKLEEINKGFDLMHEGKSIRSVVVY

SEQ ID NO: 14360 - DNA, 1113 bp, Pseudomonas syringae pv. tomato str. DC3000
  CDS (1)..(1113): transl_table=11
atgatcaagtcacgcgccgctgtcgcctttgaagccaaaaagccactggagatcgttgaagtcgatgtcgccatgcccaaagcgggagaagtgctgctcaaagtagtggcatccggcgtctgccataccgatgcgtacacgctttccggcgccgaccctgaggggatctttccgtcgattctcggccatgaaggcggcgcgattgtcgaagccatcggcgagggcgtgacctctgtggcggtcggtgatcacgtcattccgctgtacaccccggaatgccgtcagtgcaaattctgccggtcggggaaaaccaacctgtgtcaggcgatccgttcgacccaaggcaaaggcctgatgccggatggcaccacgcgcttctcttataagggcgagccgattttccactacatgggcacctcgaccttctccgaatacaccgtgctgccagaaatctcggtggccaaaatcgacaagaaagcccccctggaaaaagtctgcctgctgggttgcggcgtcaccaccggtattggcgcagtgctcaacaccgccaaggtcaagccgggcgataccgtagcggtcttcggtctgggcggtatcggcctctcggcggtgattggcgcggtcaaagccaaggcggcgcgaatcatcgccatcgacatcaacccggccaagttcgagattgccaaacagctcggcgcgaccgattgcgtcaatccgaaggatttcgaccgtccgatccaggaagtcatcgttgacatgaccgatggcggcgtcgacttttcgttcgagtgcatcggcaatgtgcagctcatgcgttcagcgctggaatcctgccacaagggctggggtgagtcggtgatcattggcgtggccggtgccggtcaggaaatctcgacccgtccattccagttggtgaccgggcgcgtctggcgcggttcggcgttcgggggcgtgcgtggccgtaccgaattgccaagctacgtcgacatggcgcagaccggcgaaattccgctggacacgttcatcacccacacaatgggcctggaagacatcaacaaggcattcgatctgatgcatgaaggcaaaagcatccgcaccgtcattcatttttga

SEQ ID NO: 14361 - protein, 370 aa, Pseudomonas syringae pv. tomato str. DC3000
MIKSRAAVAFEAKKPLEIVEVDVAMPKAGEVLLKVVASGVCHTDAYTLSGADPEGIFPSILGHEGGAIVEAIGEGVTSVAVGDHVIPLYTPECRQCKFCRSGKTNLCQAIRSTQGKGLMPDGTTRFSYKGEPIFHYMGTSTFSEYTVLPEISVAKIDKKAPLEKVCLLGCGVTTGIGAVLNTAKVKPGDTVAVFGLGGIGLSAVIGAVKAKAARIIAIDINPAKFEIAKQLGATDCVNPKDFDRPIQEVIVDMTDGGVDFSFECIGNVQLMRSALESCHKGWGESVIIGVAGAGQEISTRPFQLVTGRVWRGSAFGGVRGRTELPSYVDMAQTGEIPLDTFITHTMGLEDINKAFDLMHEGKSIRTVIHF

SEQ ID NO: 14362 - DNA, 1149 bp, Vibrio parahaemolyticus RIMD 2210633
  CDS (1)..(1149): transl_table=11
atgactcttgaaatcaaacctggtcaaactcacatcaaatccaaggcaatggttgcgtgggcggctggcgagccactgaaaatggaagaagtggatgtacagcttcctaaagcgggtgaagtgctagtgcgcatcgtcgcgacaggtgtttgtcatactgatgcgttcactctgtcaggcgacgatccagaaggcatcttcccttcgattcttggtcacgaaggcggcggtattgttgaaatggttggcgaaggtgttaccagcgttgaggttggcgaccacgtgattcctctttacaccgcagaatgtggcgagtgtaagttctgtaaatcgggcaaaaccaacctttgccaggccgttcgtgaaacacaaggtaaaggtctgatgccagatggtacaagccgtttttctatcaacggtgaaaccatcttccactacatgggttgttctactttctctgagtacacagtgctgcctgaaatttcattagccaaagtgaacaagcaagcgcctcttgaagaagtgtgtctactcggttgtggcgtaacgactggtatgggcgcggttctgaacactgcaaaagttgaaaaaggcgacacggttgcgatctttggtctgggcggcatcggtctttcagcgatcatcggtgcgcgcatggcaggagcaagccgcatcatcggtatcgacatcaacgaaagcaaattcgacctagcgaaacaacttggtgctacagacgtcatcaacccacaaaaattcgacaagccaattcaagaagtgattgttgaaatgacggatggcggtgtggactactcattcgaatgtatcggtaacgtcaacgtaatgcgtcaagcgcttgagtgctgtcacaaaggttggggtgagtcggtgatcatcggtgttgcgggtgcaggtcaagagatctcaactcgtccattccagctggttacgggtcgtgtatggcgcggcagtgcgttcggtggcgtgaaaggtcgctcagagcttccagaaatcgtaaaccgctacatggcaggtgagtttggcttacaagagttcattactcacacgatgggcttggaagacgtaaacaaagcatttgatctgatgcacgaaggtaagagcatccgtaccgttatccatatggataagtaa

SEQ ID NO: 14363 - protein, 382 aa, Vibrio parahaemolyticus RIMD 2210633
MTLEIKPGQTHIKSKAMVAWAAGEPLKMEEVDVQLPKAGEVLVRIVATGVCHTDAFTLSGDDPEGIFPSILGHEGGGIVEMVGEGVTSVEVGDHVIPLYTAECGECKFCKSGKTNLCQAVRETQGKGLMPDGTSRFSINGETIFHYMGCSTFSEYTVLPEISLAKVNKQAPLEEVCLLGCGVTTGMGAVLNTAKVEKGDTVAIFGLGGIGLSAIIGARMAGASRIIGIDINESKFDLAKQLGATDVINPQKFDKPIQEVIVEMTDGGVDYSFECIGNVNVMRQALECCHKGWGESVIIGVAGAGQEISTRPFQLVTGRVWRGSAFGGVKGRSELPEIVNRYMAGEFGLQEFITHTMGLEDVNKAFDLMHEGKSIRTVIHMDK

SEQ ID NO: 14364 - DNA, 1140 bp, Chromobacterium violaceum ATCC 12472
  CDS (1)..(1140): transl_table=11
atgagccatgacatcatccgctgccaggctgccgtagcctgggccgccggccaaccgttgagcatcgaagagatcgaggtgcatccgcccaaggccggcgaggtgcgcgtgaagatggtggccaccggcgtctgccacaccgacgccttcaccctgtccggcgcggacccggaaggcgtgttcccctgcatcctgggccatgagggcggcggcgtcgtcgaatccgtcggccccggcgtcaccagcgtggcggtgggcgaccacgtgatcccgctatacacgccggaatgccgcgagtgcaagttctgcctgtccggcaagaccaatctgtgccagaaaatccgcgccacccagggcaagggcctgatgccggatggcaccagccgcttttccaaggacggcaaaccgatctaccactacatgggcacctccaccttcagcgagtacacggtgctgccggaaatctcgctggccaaggtgaacaaggccgcgccgctggaagaagtgtgcctgctgggctgcggcgtcaccaccggcatgggcgcggtggtcaacaccgccaaggtgaaggccggcgacaacgtggccgtcttcggcctgggcggcatcggcctgtccgccatcatcggcgcgcggatggccggcgccggccgcatcatcggcatcgacatcaatgaaggcaagttcgagctggcgaaaaaactgggcgccaccgattgcgtcaatccgaatggcttcgacaagccgatccaggacgtgatcgtggaaatgaccgacggcggcgtcgatttctccttcgagtgcatcggcaacgtcaaggtgatgcgcgcggcgctggaatgctgccacaagggctggggcgaatcggtgatcatcggcgtggccggcgccgggcaggaaatctccacccgtccgttccagctggtcaccggccgggtatggcgcggctccgccttcggcggcgtgcgcggccgcaccgagctgccggaatacgtggagcgctatctgaaaggcgaattccgcctggacgacttcatcacccataccatgccgctggagcgcgtcaacgaagccttcgacctgatgcatgaaggcaagagcatacgctccgtcatccattacgcggcggagccggcatga

SEQ ID NO: 14365 - protein, 379 aa, Chromobacterium violaceum ATCC 12472
MSHDIIRCQAAVAWAAGQPLSIEEIEVHPPKAGEVRVKMVATGVCHTDAFTLSGADPEGVFPCILGHEGGGVVESVGPGVTSVAVGDHVIPLYTPECRECKFCLSGKTNLCQKIRATQGKGLMPDGTSRFSKDGKPIYHYMGTSTFSEYTVLPEISLAKVNKAAPLEEVCLLGCGVTTGMGAVVNTAKVKAGDNVAVFGLGGIGLSAIIGARMAGAGRIIGIDINEGKFELAKKLGATDCVNPNGFDKPIQDVIVEMTDGGVDFSFECIGNVKVMRAALECCHKGWGESVIIGVAGAGQEISTRPFQLVTGRVWRGSAFGGVRGRTELPEYVERYLKGEFRLDDFITHTMPLERVNEAFDLMHEGKSIRSVIHYAAEPA

SEQ ID NO: 14366 - DNA, 1110 bp, Photorhabdus luminescens subsp. laumondii TTO1
  CDS (1)..(1110): transl_table=11
atgaaatcaagagctgctgttgcattcggaccgggccgtccccttgaagtcgttgaaatcgatgtagccccgccccaagccggtgaagtgctggtcaaaatcagtcataccggtgtgtgtcatacggatgccttcaccctgtcaggggatgatccagagggcgtttttcctgtcatactcgggcatgaaggcgctggcgtagtcgttgaggttggtgaaggcgtcactagcgtcaaacccggtgaccacgttatccctctttataccgcagaatgcggagagtgcttgttctgcaaatcaggaaaaaccaatctgtgtgtggccgtacggacaactcaaggaaaaggtgtaatgccggacggcacaacccgtttttcctacaaagggcagcctatttatcattatatgggatgctccacattcagcgaatatacagtcgtagccgaagtatcactggcaaaaatcaacccggaagcaaatcatgaagaagtgtgcctgctaggctgcggtgtcactaccggcatcggtgcagtgcataataccgctaaagtacagtccggtgattccgttgccgtctttgggctcggcggcattggccttgccgttatccagggcgctcgtcaggcaaaagcaggcaagatcattgccatcgatacaaatccggcaaaatttgagctggcaaggcagttcggtgcaaccgactgcctgaacccaaatgattatgacaaacctattcagcaagtcattatcgagatgacggaatggggagtggatcataccttcgaatgtattggtaatgtcaatgtgatgcgtgctgcgctcgaaagcgcacaccgtggctgggggcaatcagtgattattggtgtggccggtgcaggacaggaaatatcaacccgaccattccaactggtcaccggtcgttcatggcgaggcaccgcctttggtggtgttaaaggccgcagtcagttgcctaaaatggtggaagaggcaatgaaaggtgaaattgagttaaaaccttttgttactcacaccttgccgctcgaacgcattaatgaagcattcgatctaatgcatgagggaaaatccattcgcacagtcatccattactaa

SEQ ID NO: 14367 - protein, 369 aa, Photorhabdus luminescens subsp. laumondii TTO1
MKSRAAVAFGPGRPLEVVEIDVAPPQAGEVLVKISHTGVCHTDAFTLSGDDPEGVFPVILGHEGAGVVVEVGEGVTSVKPGDHVIPLYTAECGECLFCKSGKTNLCVAVRTTQGKGVMPDGTTRFSYKGQPIYHYMGCSTFSEYTVVAEVSLAKINPEANHEEVCLLGCGVTTGIGAVHNTAKVQSGDSVAVFGLGGIGLAVIQGARQAKAGKIIAIDTNPAKFELARQFGATDCLNPNDYDKPIQQVIIEMTEWGVDHTFECIGNVNVMRAALESAHRGWGQSVIIGVAGAGQEISTRPFQLVTGRSWRGTAFGGVKGRSQLPKMVEEAMKGEIELKPFVTHTLPLERINEAFDLMHEGKSIRTVIHY

SEQ ID NO: 14368 - DNA, 1131 bp, Vibrio vulnificus YJ016
  CDS (1)..(1131): transl_table=11
atgactcaagataaattcatcaaatctcgcgccgctgtagcttgggggccaaaacaaccactgagcatcgaagaagtcgatgtcatgctgcccagaaaaggcgaagtccttgttcgcatcgtcgcgactggggtttgtcacacggacgcttttacgctgtcaggagatgatccagaaggggtttttccagcgattttaggtcatgaaggtggcggtattgttgaaatggttggcgaaggggtaaccagcgtctcagtcggtgatcacgtcattcccctttacaccgcagagtgtggtcaatgtaagttctgtctgtctggtaaaaccaacttgtgccaagcagtgcgagaaacacaaggtaaaggcttaatgcctgatggcacgacgcgattttataaagatggcaagcctatcttccactatatgggctgctcaaccttttcggagtacaccgtgttacctgaaatctcactagcaaaagtaaataaagaagcgccgctggaagagatctgcttacttggctgtggtgttacgactgggatgggcgcggtaatcaatacagcgaaagtgaagcaaggggatacggttgcgatcttcggcttaggtgggatcggcttatcagcgattattggtgcgcgtatggctggtgcgagtcgcattattgccgttgatatcaacgatagaaaatttgaattagctaagcagttgggggccacagattgcattaacccgaaagaacatgatcaaccgatccaagaagtgatcatcgagatgactgacggcggcgtggatttttctttcgaatgtatcggtaatgtcaacgtcatgcgtcaagcgctcgaatgctgccataaaggctggggggaatcggtcatcatcggggtagcaggagcagggcaagaaatctcaacacgccctttccaactggtcacaggtcgagtttggcgtggtagcgcttttggcggcgtgaaaggtcgctctcaactgcctgcgattgttgagcaataccttgctggtgaatttggtttacaagaattcatcacgcatacaatgccactggaagggatcaacgacgcctttgaactgatgcactcaggagagagcattcgctcagtggttcacttcgaataa

SEQ ID NO: 14369 - protein, 376 aa, Vibrio vulnificus YJ016
MTQDKFIKSRAAVAWGPKQPLSIEEVDVMLPRKGEVLVRIVATGVCHTDAFTLSGDDPEGVFPAILGHEGGGIVEMVGEGVTSVSVGDHVIPLYTAECGQCKFCLSGKTNLCQAVRETQGKGLMPDGTTRFYKDGKPIFHYMGCSTFSEYTVLPEISLAKVNKEAPLEEICLLGCGVTTGMGAVINTAKVKQGDTVAIFGLGGIGLSAIIGARMAGASRIIAVDINDRKFELAKQLGATDCINPKEHDQPIQEVIIEMTDGGVDFSFECIGNVNVMRQALECCHKGWGESVIIGVAGAGQEISTRPFQLVTGRVWRGSAFGGVKGRSQLPAIVEQYLAGEFGLQEFITHTMPLEGINDAFELMHSGESIRSVVHFE

SEQ ID NO: 14370 - DNA, 1119 bp, Serratia marcescens
  CDS (1)..(1119): transl_table=11
atgaaatcacgtgcagccgtcgcatttggccctggcaagccgctggaaattgtggaaattgacgtcgcgccgccacagaagggcgaagtgctggtcaaaatcacccacaccggggtatgccataccgatgcctttaccttgtcgggtgacgatccggaaggcgttttcccggcggtgctgggccatgaaggcggcggaattgtggttgaagtcggcgagggcgtcaccagcctgaagccgggcgatcacgttattccgctgtataccgccgaatgcggcgagtgtaagttctgtaaatccggtaaaactaacctctgccaggccgtgcgcgccacccagggtaaaggcctgatgccggatggcaccacccgtttttcttataacggcgagccgatttatcactacatgggcaccagtaccttcagtgagtacacggtctgcgctgaaatttcactggcaaaagttaacccacaggcgccgctggataaagtctgcctgctgggctgtggcgtgaccaccggcattggcgcggtgcacaataccgcaaaagtgaaagagggcgacagcgtggccgtctttgggctgggcggtatcggtctggcggtgattcagggcgcggcccaggcgaaagcaggccgcatcatcgctgtggacaccaatccggaaaaattcaaactggccggtgaaatgggcgcgacggatttcgttaaccccaacgattatgacaaacctatccaggacgtcattgtcgaactcaccgacggcggcgttgattttagtttcgaatgcatcggcaacgttaacgtgatgcgtgcggcgctggaatgctgccataaaggctggggcgaaagcgtcattatcggcgtggccggcgcaggccaggagatccggacccgtccgttccaactggtgaccggccgggtatggcgcggttcagcattcggcggcgtgaaaggacgcagccagttaccaggtatggtggaagacgcgatggcgggcaaaatccgtctggacccgttcatcacccatcgcctgccgcttgagaaaatcaacgaagcctttgatctgatgcatgaaggcaagtctattcgcaccgttattcacttcggcgacaaataa

SEQ ID NO: 14371 - protein, 372 aa, Serratia marcescens
MKSRAAVAFGPGKPLEIVEIDVAPPQKGEVLVKITHTGVCHTDAFTLSGDDPEGVFPAVLGHEGGGIVVEVGEGVTSLKPGDHVIPLYTAECGECKFCKSGKTNLCQAVRATQGKGLMPDGTTRFSYNGEPIYHYMGTSTFSEYTVCAEISLAKVNPQAPLDKVCLLGCGVTTGIGAVHNTAKVKEGDSVAVFGLGGIGLAVIQGAAQAKAGRIIAVDTNPEKFKLAGEMGATDFVNPNDYDKPIQDVIVELTDGGVDFSFECIGNVNVMRAALECCHKGWGESVIIGVAGAGQEIRTRPFQLVTGRVWRGSAFGGVKGRSQLPGMVEDAMAGKIRLDPFITHRLPLEKINEAFDLMHEGKSIRTVIHFGDK

SEQ ID NO: 14372 - DNA, 1110 bp, Rhodopseudomonas palustris CGA009
  CDS (1)..(1110): transl_table=11
atgaagacacgggccgccgtcgcgttcgaggccaagaagccgctcgaaatcgtcgagctggatctcgaagggccgaaggccggcgaggtgctggtcgagatcaaggccaccggcatctgccacaccgacgcctacacgctcgacggcttcgatagcgaaggcatcttcccgtcgatcctcggccatgaaggcgcgggcatcgtgcgcgagatcggccccggcgtcacctcggtgaagccgggcgatcacgtcattccgctgtacacgccggaatgccggcagtgcaaaagctgcctgagccagaagaccaatctctgcaccgcgatccgcgccacgcagggcaagggcctgatgccggacggcacctcgcgcttttcctacaagggccagaccatctatcactacatgggctgctcgacgttctcgaacttcaccgtgctgccggagatcgcagtcgcgaagatccgcgacgacgcgccgttcgacaagagctgctacatcggctgcggtgtcaccaccggcgtcggcgccgtggtcaacaccgccaaggtcacgcccggctccaacgtcgttgtgttcggcctcggcggcatcggcctcaacgtgatccagggcgccaagatggtcggcgccgataaaatcgtcggcgtcgacatcaacgacgacaaggaagaatggggccgccgcttcggcatgacgcacttcgtcaacccgaagaaaatcgacggcgacatcgtccagcacctcgtcgggctcaccgatggcggcgccgactacaccttcgactgcaccggcaacaccaatgtgatgcgccaggcgctggaagcctgccatcgcggctggggcgtctcggtggtgatcggcgtggcggaagccggcaaggaaatctcgacccgcccgttccagctcgtcaccggccgagtctggaagggcagcgccttcggcggcgcccgcggccgcaccgacgtgccgaagatcgtcgactggtacatgaacggcaagatcgagatcgacccgatgatcacccacgtgctgaaactcgaagagatcaacaagggtttcgacctgatgcaccagggcaagtcgatccgctcggtggtggtgtactaa

SEQ ID NO: 14373 - protein, 369 aa, Rhodopseudomonas palustris CGA009
MKTRAAVAFEAKKPLEIVELDLEGPKAGEVLVEIKATGICHTDAYTLDGFDSEGIFPSILGHEGAGIVREIGPGVTSVKPGDHVIPLYTPECRQCKSCLSQKTNLCTAIRATQGKGLMPDGTSRFSYKGQTIYHYMGCSTFSNFTVLPEIAVAKIRDDAPFDKSCYIGCGVTTGVGAVVNTAKVTPGSNVVVFGLGGIGLNVIQGAKMVGADKIVGVDINDDKEEWGRRFGMTHFVNPKKIDGDIVQHLVGLTDGGADYTFDCTGNTNVMRQALEACHRGWGVSVVIGVAEAGKEISTRPFQLVTGRVWKGSAFGGARGRTDVPKIVDWYMNGKIEIDPMITHVLKLEEINKGFDLMHQGKSIRSVVVY

SEQ ID NO: 14374 - DNA, 1110 bp, Bdellovibrio bacteriovorus HD100
  CDS (1)..(1110): transl_table=11
atgaaaatcaaagccgcagtcgcctggaaagccggagcccccttgtctatcgaagaagtggatctggaaggacccaaaaaaggcgaagtcctgatcagggttgttgccacgggcgtatgccatacggacgccttcacattgtccggggcggatcctgaaggtttgtttccggtgattctgggccacgaaggtggtggtatcgttgaggaggtcggagaaggtgtgaccactttgaaaaaaggcgatcacgtgattccgctttatactcctgaatgcaaagagtgcaaattctgtctgtctggtaagaccaatctgtgcgtgcgcatccgtgcgactcaaggcaaagggctgatgccggatgggacgtcccgcttttctaaagacggaaaaatgattcatcactatatgggctgctccactttcgcggaatacaccgtcgttccggaaatcgctttggcgaaagtcaatccggccgcaccgctggacaaagtatgtttgctggggtgcggagtcaccaccgggatcggtgctgttttgaacacggcgaaggttgaaaagggtgcgactgtggcggtctttggtttgggcggcatcggtctgtctgtcattcagggcgcaaaaatggcgggggcttcccgtatcatcgcgatcgacatcaacgacgcgaaatgggaaatggcgcaaaaattcggcgccacggactttgtaaatcccaagaagcacgacaaacccattcagcaggtgattgtggaaatgaccgaatggggcgtggactattccttcgagtgtgtggggaatactcagttgatgcgtgcggcattggaatgtgcgcaccgtggctgggggcagtccatcgtgattggtgtggctggcgccgggcaggagatttcaacccgtccattccaactggtcacgggccgcgtgtggaagggctctgcattcggtggcgtaaaaggacgtaccgaacttccaggttatgtggagcaatacatgtctggcgaaatcaacattgatgacatggtgaccttcacaatgccacttgaagatatcaacaaagcctttgattatatgcatgaaggaaaaagcatccgttctgtcatcaagatgtag

SEQ ID NO: 14375 - protein, 369 aa, Bdellovibrio bacteriovorus HD100
MKIKAAVAWKAGAPLSIEEVDLEGPKKGEVLIRVVATGVCHTDAFTLSGADPEGLFPVILGHEGGGIVEEVGEGVTTLKKGDHVIPLYTPECKECKFCLSGKTNLCVRIRATQGKGLMPDGTSRFSKDGKMIHHYMGCSTFAEYTVVPEIALAKVNPAAPLDKVCLLGCGVTTGIGAVLNTAKVEKGATVAVFGLGGIGLSVIQGAKMAGASRIIAIDINDAKWEMAQKFGATDFVNPKKHDKPIQQVIVEMTEWGVDYSFECVGNTQLMRAALECAHRGWGQSIVIGVAGAGQEISTRPFQLVTGRVWKGSAFGGVKGRTELPGYVEQYMSGEINIDDMVTFTMPLEDINKAFDYMHEGKSIRSVIKM

SEQ ID NO: 14376 - DNA, 1113 bp, Strongylocentrotus purpuratus
  CDS (1)..(1113)
atgaagtcacgtgctgctgttgcgtttggtcctggtcagcctcttcaaattgttgaagttgatgttgcaccaccgaagaaaggtgaagtattaatcaagatctcccataccggtgtgtgtcatacagatgcattcactttgtctggcgatgatcctgaaggcgtttttccggctattctcgggcatgaaggtgctggcgttgtggttgaggttggtgaaggcgtgactagtgtcaaaccaggtgatcatgtaattccactttacaccgctgaatgtggcgagtgcgtattctgtaaatctggaaaatcgaacttgtgtattgccgttcgcgaaactcaaggtagaggcgtaatgccagatggtaccactcgtttttcttacaatggtcaaccgatttaccattatatgggctgctcaacgttcagtgaatacacggtagtggcagaagtatcattggctaaaatcaatcctgaagccaatcatgaacatgtatgcttactgggttgtggggtaacaacgggtatcggtgcagtacacaacacggctaaagtacaagaaggtgatagtgttgcggtttttggtttaggtggtattggtttggcagtcgtacaagccgcacgtcaagctaaagcagggcgtattattgtggttgacatgaatcctgataaatttgcgctggcaaaagagtttggtgcaacggacttcttgaaccctaaagattacgataaaccaatccagcaagtaattgtcgaaatgactggctggggtgtagatcattcatttgaatgtattggtaacgtgaatgtgatgcgctcagcccttgaaagtgcacaccgtggctggggacaatccgtaattattggtgttgctggcgcaggtcaggaaatctctacccgtccattccaactggttactggtcgtaaatggctaggttctgcctttggtggcgtaaaaggtcgtacgcaacttccaggaatggttgaagatgccatgaaaggtaaaattcaattagaaccatttgtgacacatacgatgggcttggatcagatcaatgaagcctttgatctaatgcatgaaggtaagtcaattcgtactgtaattcattacgaataa

SEQ ID NO: 14377 - protein, 370 aa, Strongylocentrotus purpuratus
MKSRAAVAFGPGQPLQIVEVDVAPPKKGEVLIKISHTGVCHTDAFTLSGDDPEGVFPAILGHEGAGVVVEVGEGVTSVKPGDHVIPLYTAECGECVFCKSGKSNLCIAVRETQGRGVMPDGTTRFSYNGQPIYHYMGCSTFSEYTVVAEVSLAKINPEANHEHVCLLGCGVTTGIGAVHNTAKVQEGDSVAVFGLGGIGLAVVQAARQAKAGRIIVVDMNPDKFALAKEFGATDFLNPKDYDKPIQQVIVEMTGWGVDHSFECIGNVNVMRSALESAHRGWGQSVIIGVAGAGQEISTRPFQLVTGRKWLGSAFGGVKGRTQLPGMVEDAMKGKIQLEPFVTHTMGLDQINEAFDLMHEGKSIRTVIHYE

SEQ ID NO: 14378 - DNA, 1134 bp, Strongylocentrotus purpuratus
  CDS (1)..(1134)
atggctggtacagttggaaagaccatcacatgtcgtgcagcagttgcatgggagcctaataaggatcttagcatcgagcaggtggaggtagcacctcctaaggccggtgaagttcgcatcaagctcctagctactggtgtctgccacacagatgcctatactctgagcggagcagactctgaggggaaattcccctgcatcctgggtcatgagggaggtggcactgtggagagtattgggccagaggtcacttctcttaaacctggtgaccatgttgtacccctttacattcctcaatgccgtgagtgcaagttctgcatgagcaagaagaccaacctttgcagcgttgtcaggtccactcagggcgctggagttatgcctgatggaacatctcgtttcacctgtaagggaaagactctctaccacttcatgggaacatccaccttcagtgaatacactgtcgttgctgagatatcagttgccaaggtgaatgagaaggccccattggaaaaggtgtgtctgttagggtgtggtatcaccaccggttacggagctgccatcaacactgcacaggtggaggaaggatcgacctgtgccgtgtggggggttggatgtgtaggtcttgctgtgctcatgggatgtaaggtcagcaaagcttcaaagatcattgccattgatatcaacccacagaaggaagagcttgccaggcagtttggagcaacccactttgtcaatcccaaaactttggacaaacctacacagcaggcgctagtggaaatgactgatggcggcctggattatacgtttgagtgcatcggtaatgtcaataccatgcgtgaagctcttgagagctgccacaagggttggggcgtgtcgaccatcatcggagtagctgcggccggtaaggagatctctacccgcccattccaactcgtcactggacgcacctggaagggaacagcttttggtgggtacaagtcccgtgatggagtgcctcagctagtcgaggagtacttggctggaacgctcaaagttgatgagtttgtgacacacaatgtgagattagatgagatcaacaaagccttcaaactgatgcatgatggagaaagtatccgagcaattgtaaacttctag

SEQ ID NO: 14379 - protein, 377 aa, Strongylocentrotus purpuratus
MAGTVGKTITCRAAVAWEPNKDLSIEQVEVAPPKAGEVRIKLLATGVCHTDAYTLSGADSEGKFPCILGHEGGGTVESIGPEVTSLKPGDHVVPLYIPQCRECKFCMSKKTNLCSVVRSTQGAGVMPDGTSRFTCKGKTLYHFMGTSTFSEYTVVAEISVAKVNEKAPLEKVCLLGCGITTGYGAAINTAQVEEGSTCAVWGVGCVGLAVLMGCKVSKASKIIAIDINPQKEELARQFGATHFVNPKTLDKPTQQALVEMTDGGLDYTFECIGNVNTMREALESCHKGWGVSTIIGVAAAGKEISTRPFQLVTGRTWKGTAFGGYKSRDGVPQLVEEYLAGTLKVDEFVTHNVRLDEINKAFKLMHDGESIRAIVNF

SEQ ID NO: 14380 - DNA, 1134 bp, Nasonia vitripennis
  CDS (1)..(1134)
atggcagacacgaccggcaaggttatcaagtgccgtgctgcagttgcatgggaggcaaagaaaccgctgacactggaagtcattgaggtagctccaccaaaagctcatgaagttagagttaaaattaatgctgttgcactgtgtcacactgatgcctacactcttgatggcttagatcccgaaggactttttccatgtgttttaggacatgaaggagctggaatagtcgaaagtgttggagacgatgttacagaatttaagccaggtgaccatgtcattccactgtatgttccccagtgccgtgactgcaagttttgtagatcaccaaaaaccaatgtgtgcagtaaaattaggatgacccagggcaagggaataatgcctgatggtacttcacgttttacatgcaatgggcaaactttgtaccactttatggggtgctccacattctctgagtatactgtagttgctgaaattgcgctagccaagattgacccatctgctcccttggacaaagtgtgcctattgggttgtggtgtatcgactggctatggagctgccttaaatactgcaaaagtagagccaggaagcacctgtgctatttggggattaggagctgttggtttggcagtagctttaggttgtaaaactgctggagcttctagaattattggtgttgatattaatccagctaaatttgagaaagccaaagcttttggatgcaccgagtttgtcaatccaaaggatcataccagaccgattcaagatgtgctcattgaaatgactgatggaggactagattttacctttgaatgtgttggtaacgtccatacaatgagagctgctcttgagtcatgccacaagggttggggtgtgtctgtcattgttggagtagctgccgcgggtcaggaaattagtacacgtccattccagctggttactggccgaacatggaagggaactgcctttggaggatggaagtcaaaggacagtgtccctcaacttgtacatgaatacatgacaaaaaaactgattttagatgaattcattactcacaacttgccttttgacaaaatcaatgaaggttttgaacttttgcattctggaaagtgcttgagagcagttttacattactaa

SEQ ID NO: 14381 - protein, 377 aa, Nasonia vitripennis
MADTTGKVIKCRAAVAWEAKKPLTLEVIEVAPPKAHEVRVKINAVALCHTDAYTLDGLDPEGLFPCVLGHEGAGIVESVGDDVTEFKPGDHVIPLYVPQCRDCKFCRSPKTNVCSKIRMTQGKGIMPDGTSRFTCNGQTLYHFMGCSTFSEYTVVAEIALAKIDPSAPLDKVCLLGCGVSTGYGAALNTAKVEPGSTCAIWGLGAVGLAVALGCKTAGASRIIGVDINPAKFEKAKAFGCTEFVNPKDHTRPIQDVLIEMTDGGLDFTFECVGNVHTMRAALESCHKGWGVSVIVGVAAAGQEISTRPFQLVTGRTWKGTAFGGWKSKDSVPQLVHEYMTKKLILDEFITHNLPFDKINEGFELLHSGKCLRAVLHY

SEQ ID NO: 14382 - DNA, 1134 bp, Anopheles gambiae str. PEST
  CDS (1)..(1134)
atggcttccaccactggacaggtgatcaagtgcaaggcggccgttgcctgggagccgaagcaaccgctttcgatcgaaacgatcgaggtggcaccaccgaaagcgggcgaagtgcgcattaaggtgaccgcatccggtgtgtgtcacacggacgcgtacacgctgggcggcctagactcggagggcgtgttccccgtgattctcggccacgaaggtgccggcgtggtggagagtgttggcgagggtgtgaccaagttccagccgggcgatcacgtcatcccgctgtacattccgcaatgcttcgagtgccggttctgcaagagccccaaaaccaacctctgcccgaaggtgcgcgctacgcagggtaaaggcgtgctaccggacggtacgacgcggttcacgtgcaacggcaaacagatctaccatttcatgggcacgtccacgtttgccgagtacacggtagtggcggaggtatcgctggccaagatcgatccaagcgcaccgttggagaaggtgtgcctgctcggttgcggcattccgaccggttacggtgcggcgctgaatacggccaaggtagagccgggcagctcctgcgccatctggggactgggagctgtcgggctggcggttgcgatgggatgcaaggcggccggtgccagccgcattattggcgtcgacatcaatccggccaagttcgagattgcaaagcagttcggctgcacggagtttgtcaatccgaatgactacaaggagccgattcagcaggtgttggtcgaaaagacggacggcgggttggattacacgtttgagtgtgtgggcaatgtgaacacgatgcgtgcggccctcgagtcctgtacgcgcgggtggggcgtgtcggtaattgtcggtgtggcggaggctggtacggagatttccacccgcccattccagctggtaaccgggcgcacctggaagggaacggctttcggtggctggaagagtgtggagagcgtaccgaagctggtcacctcatatttgcagaaggagctaaaggtggacgaatttatcacgcacacgatggagctggagaagatcaacgacgcatttacgctcatgcatgaaggtaaaagcattcgttcagtggtgaccctttag

SEQ ID NO: 14383 - protein, 377 aa, Anopheles gambiae str. PEST
MASTTGQVIKCKAAVAWEPKQPLSIETIEVAPPKAGEVRIKVTASGVCHTDAYTLGGLDSEGVFPVILGHEGAGVVESVGEGVTKFQPGDHVIPLYIPQCFECRFCKSPKTNLCPKVRATQGKGVLPDGTTRFTCNGKQIYHFMGTSTFAEYTVVAEVSLAKIDPSAPLEKVCLLGCGIPTGYGAALNTAKVEPGSSCAIWGLGAVGLAVAMGCKAAGASRIIGVDINPAKFEIAKQFGCTEFVNPNDYKEPIQQVLVEKTDGGLDYTFECVGNVNTMRAALESCTRGWGVSVIVGVAEAGTEISTRPFQLVTGRTWKGTAFGGWKSVESVPKLVTSYLQKELKVDEFITHTMELEKINDAFTLMHEGKSIRSVVTL

SEQ ID NO: 14384 - DNA, 1170 bp, Magnaporthe grisea 70-15
  CDS (1)..(1170)
atgtctacagtcggaaaggtaagcaaagcaaacacccgcatgaccatcacctgcaaggccgccgtcgcctgggaggcgggcaaggacctgagcattgaggacatcgaggttgcacccccaaaggcgcacgaggtccgtatcgagatctaccacaccggtgtgtgccacacagatgcgtacacgctgtccggcaaggaccccgagggtgccttccccatcgtcctggggcacgagggagctggtatcgtcgagtcggttggtgagggcgtgaccaacgtcaaggttggcgaccatgtcgttgctctttacacccccgagtgcaaagagtgcaagttctgcaagtccggcaagaccaacctctgcggcaagatccgcgccacccagggcaagggtctcatgcccgacggcacctcaaggttcaagtgcaagggcaaggacctgctgcacttcatgggcacctcaaccttctcccagttcactgtcgtagccgacatctcggtcgtcgccgtgcagccagaggccccgatggaccgcacctgtctgctgggctgcggtatcaccaccggctacggcgccgcccgcgtgacggccaacgtcgaggagggatccagccttgccgtcttcggcgcaggctgcgtgggtctgtcggtcgtgcagggtgccgtgatcaacaaggccggcaagatcatcgtcgttgacgtgaaccccgcaaaggaggagtgggctcgcaagttcggcgctacagactttgtcaacccgaccaagctgcccgagggcaagacagtggtggacgcccttgtcgagctgaccgatggcggctgcgactacactttcgactgcacaggcaacgtccaggtgatgagggccgcgctcgaggcttgccacaagggctggggtgaaagcatcattatcggtgtggcggccgctggtcaggagatcagcaccaggccattccagctcgtcactggccgtgtctggaagggatgcgcgtttggtggcatcaagggtcggtcgcaactgccgggcctggttgacgactatctccagggcaggctcaaggtcgacgagttcatcacccaccgcaagaagctggttgagatcaacaatgcgttcgagactatgaagcagggagactgtatccgtgcagttgtcgacatgagggccgtctaa

SEQ ID NO: 14385 - protein, 389 aa, Magnaporthe grisea 70-15
MSTVGKVSKANTRMTITCKAAVAWEAGKDLSIEDIEVAPPKAHEVRIEIYHTGVCHTDAYTLSGKDPEGAFPIVLGHEGAGIVESVGEGVTNVKVGDHVVALYTPECKECKFCKSGKTNLCGKIRATQGKGLMPDGTSRFKCKGKDLLHFMGTSTFSQFTVVADISVVAVQPEAPMDRTCLLGCGITTGYGAARVTANVEEGSSLAVFGAGCVGLSVVQGAVINKAGKIIVVDVNPAKEEWARKFGATDFVNPTKLPEGKTVVDALVELTDGGCDYTFDCTGNVQVMRAALEACHKGWGESIIIGVAAAGQEISTRPFQLVTGRVWKGCAFGGIKGRSQLPGLVDDYLQGRLKVDEFITHRKKLVEINNAFETMKQGDCIRAVVDMRAV

SEQ ID NO: 14386 - DNA, 1155 bp, Gibberella zeae PH-1
  CDS (1)..(1155)
atgtctactgctggcaagactattacctgtaaggccgccgtcgcctgggaggccggcaagcctctgtccattgaggatatcgaggttgctcctccaaaggccaacgaggtccgaatccagatctactacactggtgtttgccacacagatgcctacacactctctggcaaggaccccgagggtgctttccccattgtccttggacacgagggtgccggtattgtcgagtccattggtgagggcgtcaccaacgtcaaggttggtgaccacgtcgtcgctctctacacccccgaatgcaaggagtgcaagttctgcaagtccggaaagaccaacctttgcggtaagatccgagccacccagggcaagggtctgatgcccgacggcacctctcgattcaagtgcaagggcaaggatctgcttcacttcatgggcacttccaccttctcccagtacaccgtcgtcgccgatatctccgtcgttgccattgagcacgacgctcccatggaccgaacctgtctgctcggctgcggtatcaccaccggttacggtgctgccaccatcaccgccaacgtccaggctggcgacaacgttgccatcttcggtgccggctgtgtcggtctctcagttgtccagggtgctgccgctcgcaaggctggcaagatcatcgttgttgacgtcaacccttccaagaaggagtggggtgagaagttcggtgctactgacttcgtgaaccccaccgagctcggtgaccagtccatccaggacaagcttatcgagatgaccgacggtggttgtgactacacctttgactgcactggtaatgttggtgtcatgcgcgctgccctcgaggcctgccacaagggttggggtgagtccatcgttatcggtgttgccgctgctggccaagagatttccacacgaccattccagcttgttactggccgagtgtggcgaggatgtgctttcggcggtgtcaagggccgttctcagctgaacgatctcgttgccgactacaagaagggtgacctcaaggttgacgagttcatcacccaccgcaagaccctcggcgagattaacaacgctttcgacacaatgaagcagggtgactgcatccgtgctgtcgtcgacatgcaaaagctcgagcctaagatttaa

SEQ ID NO: 14387 - protein, 384 aa, Gibberella zeae PH-1
MSTAGKTITCKAAVAWEAGKPLSIEDIEVAPPKANEVRIQIYYTGVCHTDAYTLSGKDPEGAFPIVLGHEGAGIVESIGEGVTNVKVGDHVVALYTPECKECKFCKSGKTNLCGKIRATQGKGLMPDGTSRFKCKGKDLLHFMGTSTFSQYTVVADISVVAIEHDAPMDRTCLLGCGITTGYGAATITANVQAGDNVAIFGAGCVGLSVVQGAAARKAGKIIVVDVNPSKKEWGEKFGATDFVNPTELGDQSIQDKLIEMTDGGCDYTFDCTGNVGVMRAALEACHKGWGESIVIGVAAAGQEISTRPFQLVTGRVWRGCAFGGVKGRSQLNDLVADYKKGDLKVDEFITHRKTLGEINNAFDTMKQGDCIRAVVDMQKLEPKI

SEQ ID NO: 14388 - DNA, 1134 bp, Apis mellifera
  CDS (1)..(1134)
atgtcgaatactgctggaaagataatcaaatgtaaagctgctgtagcatggaaagaaaaagaacctctttcacttgaagaaattgaagttgcacctccaaaagctcatgaagtaagaattaaaattatatttgtggctttatgtcatacagatgcttatactttagatggattagatccagaaggaatttttccttgtattcttggtcatgaaggtagtggtattgttgaaagtgtaggagaagaagttacagaatttcaacctggtgaccatgtgattccattatatgttcctcaatgtggggattgcaaattttgtaaatccccaaaaacaaatctatgtagtaagatccgtaccacacaaggcaaaggtgtaatgcctgatgggacttctagatttacatgcaaaggtcaaactcttgctcatttcatgggttgttctactttttctgaatatactgtagttgcagatatttctcttgctaagattgatcctactgcaccacttgataaagtatctttgttgggatgtggagtatctactggatatggtgctgctttaaatactgctaaagtagaatctggaagtacatgtgctatatggggattaggtgcagttggattggcagttgcatttggttgtaaaaaagctggtgccaaacgtattattggaatagatgtgaatccaaataaatctgaagttgctaaaaaatttggatgtaccgaatttattaatcctaaagattacaataaaccaattcaggaagtcctaatagaactaactgatggtggattagattatacttttgaatgtgttggtaatgtgaatactatgagagctgcattagaatcttgtcataaaggttggggtacatccgttattgtaggtgtagctgcagcgggtcaagaaatcagtactcgtccatttcagttggtaacaggacgtgtatggaaaggaactgcatttggtggttggaaatctaaagaaagtgttcctaaattggtgaaagaatatatgtcaaaatcattaatacttgatgaatttgttacacatactctaccctttgaaaagataaatgaaggttttgatttattgcactcaggcaattgtttaagagctgtgctcaaatattaa

SEQ ID NO: 14389 - protein, 377 aa, Apis mellifera
MSNTAGKIIKCKAAVAWKEKEPLSLEEIEVAPPKAHEVRIKIIFVALCHTDAYTLDGLDPEGIFPCILGHEGSGIVESVGEEVTEFQPGDHVIPLYVPQCGDCKFCKSPKTNLCSKIRTTQGKGVMPDGTSRFTCKGQTLAHFMGCSTFSEYTVVADISLAKIDPTAPLDKVSLLGCGVSTGYGAALNTAKVESGSTCAIWGLGAVGLAVAFGCKKAGAKRIIGIDVNPNKSEVAKKFGCTEFINPKDYNKPIQEVLIELTDGGLDYTFECVGNVNTMRAALESCHKGWGTSVIVGVAAAGQEISTRPFQLVTGRVWKGTAFGGWKSKESVPKLVKEYMSKSLILDEFVTHTLPFEKINEGFDLLHSGNCLRAVLKY

SEQ ID NO: 14390 - DNA, 1146 bp, Candida glabrata CBS 138
  CDS (1)..(1146)
atgactgaaggtaagccaattgaatgtctagctgctgttgcttatgaagctggtaaaccacaagtggtcgaacagatcgttgttgatccaccaaaggctcatgaagtccgtatcaaaattgtcaacaccgcagtgtgccacacagatgcttacacattgtccggtgccgaccctgagggtttgttcccttgtgtcctaggtcatgaaggtgctggtattgttgaatctgttggtgatggtgttaccaatgtgaagcctggtgaccatgtcattgctctttacactgctgagtgtcagaagtgtaagttctgcttgagtggtaagaccaacttgtgtggtgctgttagagctactcaaggtaaaggtgtcatgccagatggtacttctagattccacaacaagaagggtgagtccctgtaccactttatgggatgttctactttttctgaatatactgttgtcgccgatgtaagtgttgtagcaattgaccaaactgctccattagaaagtgtatgtttgttgggttgtggtgttaccactggttatggtgctgctgttaagaccgctaatgttcaaaagggcgacactgttgcggttttcggttgtggtactgtcggtttgtctgttctgcaaggtgctcatcaaagaggggcttctcgtattattgcaatcgacactaatgatcagaagaaggatttctgtacccaatttggtgccactgatttcattaatccaactaaggacttgaaagagaatgaaactattgttgccaaactaattgaaatgacagatggtggtctagatcacacttttgactgtacaggtaatgttaatgttatgagaagcgcactggaagcttgtcacaagggctggggtcaatctgttatcattggtgtcgcggctgctggtcaagaaatctctactagacctttccaattggttactggtagagtttggaagggttctgcctttggtggtgtcaagggtagatctgaaatggccggtttaatcgaacaatacaagaagggtgaattgaaggttgatgagttcattacacacagaagatcatttaatgaaatcaatgaggcatttgacgacttgcacaatggtttgtgtttaagaaccgttctatctttctcaaagtaa

SEQ ID NO: 14391 - protein, 381 aa, Candida glabrata CBS 138
MTEGKPIECLAAVAYEAGKPQVVEQIVVDPPKAHEVRIKIVNTAVCHTDAYTLSGADPEGLFPCVLGHEGAGIVESVGDGVTNVKPGDHVIALYTAECQKCKFCLSGKTNLCGAVRATQGKGVMPDGTSRFHNKKGESLYHFMGCSTFSEYTVVADVSVVAIDQTAPLESVCLLGCGVTTGYGAAVKTANVQKGDTVAVFGCGTVGLSVLQGAHQRGASRIIAIDTNDQKKDFCTQFGATDFINPTKDLKENETIVAKLIEMTDGGLDHTFDCTGNVNVMRSALEACHKGWGQSVIIGVAAAGQEISTRPFQLVTGRVWKGSAFGGVKGRSEMAGLIEQYKKGELKVDEFITHRRSFNEINEAFDDLHNGLCLRTVLSFSK

SEQ ID NO: 14392 - DNA, 1155 bp, Kluyveromyces lactis NRRL Y-1140
  CDS (1)..(1155)
atgacttctgctactgctggtaaacctattgagtgtgttgctgctgttgcctatgaagctggcaagcctttaactgtggagaaaattatcgttgatgctccaaaggcccatgaagtgcgtgttcaagtgactcatacagctgtatgtcacactgatgcttacactctgtctggtgtcgatccagaaggtgcgttcccaagtatcttgggtcatgagggtgctggtatcgttgaatcggttggtgacggagtcaccaacgttaaggtcggtgatcacgtggtcttattgtatactgcggaatgtggtaagtgtaagttctgtaagagtaacaagaccaacttgtgtggttctgtgagggccacccagggtaaaggtgtgatgccagatggtaccactcgtttccataatttgaagggtgaacctttgttgcatttcatgggttgctccactttctcacagtataccgttgttgcagatgtttcattggtgacaattgatccaagtgctccgttatccagcgtgtgtttgttgggttgtggtgtcaccactggttatggtgctgctgttaagactgctaacgttcaagaaggcgataccgttgctgtgtttggtgctggtactgttggtttgtcagtggttcaaggtgccaaatccagaggtgcttccaagatcatcgttgtcgatgtcaacgatcaaaagaagcaatggtctatggattttggtgcgactggtttcgttaacccactgaaggacttgaaagagggagaaactatcgtttcaaaattgattgatatgaccgatggtgggttggatttcaccttcgattgtaccggtaacgttaaagtgatgagagatgctttggaagcatgtcataaaggttggggtcaatcaatcattatcggtgtcgctgcagctggtgaggaaatttctactagacctttccaattgatcaccggtagagtgtggaagggttctgcatttggtggtatcaagggtagatcagagatgggtcaattggtgactagttaccaaaagggtgatttgaaagtcgacgatttcattactcacaaaagaccgttcactgaaatcaacaacgcctttgaagatttgcatcatggtgactgtttgagaacagttctagacttggctaactga

SEQ ID NO: 14393 - protein, 384 aa, Kluyveromyces lactis NRRL Y-1140
MTSATAGKPIECVAAVAYEAGKPLTVEKIIVDAPKAHEVRVQVTHTAVCHTDAYTLSGVDPEGAFPSILGHEGAGIVESVGDGVTNVKVGDHVVLLYTAECGKCKFCKSNKTNLCGSVRATQGKGVMPDGTTRFHNLKGEPLLHFMGCSTFSQYTVVADVSLVTIDPSAPLSSVCLLGCGVTTGYGAAVKTANVQEGDTVAVFGAGTVGLSVVQGAKSRGASKIIVVDVNDQKKQWSMDFGATGFVNPLKDLKEGETIVSKLIDMTDGGLDFTFDCTGNVKVMRDALEACHKGWGQSIIIGVAAAGEEISTRPFQLITGRVWKGSAFGGIKGRSEMGQLVTSYQKGDLKVDDFITHKRPFTEINNAFEDLHHGDCLRTVLDLAN

SEQ ID NO: 14394 - DNA, 1143 bp, Debaryomyces hansenii CBS767
  CDS (1)..(1143)
atgtcagactctaccactggtaaaactattatatgtaaggctgcaattgcctgggaagcaggtaagccattaactattgaagatattgaagttgctccaccaaaggcccacgaagttcgtatcaaaattttgcacaccggtgtttgtcacactgatgcttacacattgagtggtgttgacccagaaggtgctttcccagttgttttgggacacgaaggtgccggaattgtggaaagtgttggtgaaggggttgacaatgtcaaggtaggtgatagtgttgttgctttatacactcctgaatgtaaggaatgtaagttctgtaagtcaggaaagaccaacttatgtggtaagatcagatccacccaaggtaagggtgttatgcctgatggcacttcaagatttaagtgcaagggtaaggagttgttgcacttcatgggatgttcgactttctcccaatacacggtcgtagctgacatctcagttgttgctgttaatccaaaggctcagccagacaagacctgtttgttgggttgtggtattacaactggttatggtgctgctaccatcactgcgaatgttggcgagggtgacaacattgctgttttcggtgctggatgtgttggtttatcggttgttcagggtgcccttcaaagaaaggcagcaaagattatagtcgttgatatcaatgactccaagaaagaatgggctgaaaaattcggtgccactgactttgtaaactctgccaaattacctagcgacaccaccattgtcgacaaattagtcgaaatgaccgatggtggctgtgacttcactttcgactgtactggtaacgtcaacgtcatgagaaatgccttagaagcgtgccataaaggttggggtacctctgtcgttatcggagttgctgctgctggtaaagaaatctccaccagacctttccaattggtcaccggtagagtatggaagggtgctgcattcggtggtgtcaagggcagatctcaattgccagacatagtcgaaaactacatgaatggcggtttgaaggttgacgaattcatcactcacagacacgagttagagaatatcaacaccgcgtttgatgatatgcatgctggtgactgtatcagagctgttattaacatgtaa

SEQ ID NO: 14395 - protein, 380 aa, Debaryomyces hansenii CBS767
MSDSTTGKTIICKAAIAWEAGKPLTIEDIEVAPPKAHEVRIKILHTGVCHTDAYTLSGVDPEGAFPVVLGHEGAGIVESVGEGVDNVKVGDSVVALYTPECKECKFCKSGKTNLCGKIRSTQGKGVMPDGTSRFKCKGKELLHFMGCSTFSQYTVVADISVVAVNPKAQPDKTCLLGCGITTGYGAATITANVGEGDNIAVFGAGCVGLSVVQGALQRKAAKIIVVDINDSKKEWAEKFGATDFVNSAKLPSDTTIVDKLVEMTDGGCDFTFDCTGNVNVMRNALEACHKGWGTSVVIGVAAAGKEISTRPFQLVTGRVWKGAAFGGVKGRSQLPDIVENYMNGGLKVDEFITHRHELENINTAFDDMHAGDCIRAVINM

SEQ ID NO: 14396 - DNA, 1146 bp, Yarrowia lipolytica CLIB122
  CDS (1)..(1146)
atgtctaccgaaggaaagaccatcacttgcaaggccgccgttgcctgggaggccggcaagcccctgacccttgaagacgtcgaggttgctcctccccaggcccacgaggttcgagtcaaggtcacctacactggtgtctgccacaccgacgcctacactctcagtggctctgatcccgagggaatcttcccctctgttctgggccacgagggtgccggtatcgtcgagtctatcggcgagggcgtcaccagcgtcaagcccggagactccgtcattctgctctacactgccgagtgcaaggagtgcaagttctgcaagtccggcaagaccaacctgtgccagaaggtgcgagccacccagggtaagggtgttctgccagacggaaccacccggttcaagtgcaagggcaaggatctctattcgtatatgggctgctcttccttctcccagtacactgtggttgctgacgtctccctcgtcgccgtcgacccctctgctccccaggaccgaacctgtctgctcggctgcggtgtcaccaccggctacggagctgccaccgtcaccgccaatgtccagaagggcgacaatgttgctgtcttcggcgctggctgtgtcggtctggccgtcgtgatgggcgccaaggagcgaggagccgccaagatcattgtcattgacatcaatggcaacaaggaggcttgggcttacaagtttggtgccactgactttgtcaaccccaccaagctacccgagggcaccactattgttgacaagctggtggagatgaccgacggaggttgcgacttcacctttgactgtaccggaaacgtgactgtcatgcgacaggctctggaggcctgccataagggctggggtgagtcgatcatcatcggcgttgctgctgctggccaggagattgccacccgacctttccagctcgtcaccggccgagtgtggaagggctctgcctttggcggtgtcaagggccgaacgcagctgcccgagattgtcaagcgatacaaggacggctctttcgagattgacaacttcatcacccactccaagcccctcaaggacatcaactctgccttcaccgacctgcacaagggcgactgcattcgaaccgtcgtcgacatgtggcaggtttag

SEQ ID NO: 14397 - protein, 381 aa, Yarrowia lipolytica CLIB122
MSTEGKTITCKAAVAWEAGKPLTLEDVEVAPPQAHEVRVKVTYTGVCHTDAYTLSGSDPEGIFPSVLGHEGAGIVESIGEGVTSVKPGDSVILLYTAECKECKFCKSGKTNLCQKVRATQGKGVLPDGTTRFKCKGKDLYSYMGCSSFSQYTVVADVSLVAVDPSAPQDRTCLLGCGVTTGYGAATVTANVQKGDNVAVFGAGCVGLAVVMGAKERGAAKIIVIDINGNKEAWAYKFGATDFVNPTKLPEGTTIVDKLVEMTDGGCDFTFDCTGNVTVMRQALEACHKGWGESIIIGVAAAGQEIATRPFQLVTGRVWKGSAFGGVKGRTQLPEIVKRYKDGSFEIDNFITHSKPLKDINSAFTDLHKGDCIRTVVDMWQV

SEQ ID NO: 14398 - DNA, 1140 bp, Aspergillus nidulans FGSC A4
  CDS (1)..(1140)
atggctagcactgttggcaagaccatcacttgtaaggcggcgatcgcgtgggccgccggtgagcccctctccattgaggacgttgaggtcgcacctcccaaggcccatgaggttcgcatccaggtccttcacactggtgtctgccacacagatgcctacactctctccggaaaggaccccgaaggagcgtttcccgtcatcctcggacacgagggtgccggtattgtcgagtccgtcggtgagggtgtcacgtctgtgaagcccggtgaccacgtcattgctctctacacccccgagtgccgagaatgcaagttctgcaagtccggcaagaccaacctctgcggcaagatccgcgctacccagggcaagggtgtcatgcccgacggcacatcccgcttcaaggcccgcggcaaggacctcctgcacttcatgggcacctccaccttctcacagtacactgttgttgccgacatctccgtcgtcgccgttaccgacaagatccctactgaccgatcgtgcctgctcggttgcggtatcacgaccggctacggtgccgccgtcgtcaccgccaaggttgaggagggctccaacatcgctgtcttcggtgctggatgtgttggtctctccgtcatgcagggtgccgtcaagaacaaggccggcaagatcatcgccgtcgacgtcaacgatgccaaggaggaatggtcccgcaagttcggtgccactgacttcgtcaacccgaccaagctcaacggccagactattcaggagaagctcattgagatgaccgacggtggctgcgactatactttcgactgcaccggaaacgttggcgttatgcgcgctgccctcgaggcctgccacaagggctggggtgagagtatcgtcattggtgtcgctgctgcaggccaggagatttccacacgaccattccagctcgtcaccggtcgtgtatggcgcggctgtgctttcggtggtatcaagggccgcactcaactccctggcctggtggatgactatctggatggcaagctcaaggtggatgagttcatcacccaccgtgagcccctcgccaacatcaacactgcctttgagcagatgaaggcgggtgactgcatccgctgcgttgttgacctgtcataa

SEQ ID NO: 14399 - protein, 379 aa, Aspergillus nidulans FGSC A4
MASTVGKTITCKAAIAWAAGEPLSIEDVEVAPPKAHEVRIQVLHTGVCHTDAYTLSGKDPEGAFPVILGHEGAGIVESVGEGVTSVKPGDHVIALYTPECRECKFCKSGKTNLCGKIRATQGKGVMPDGTSRFKARGKDLLHFMGTSTFSQYTVVADISVVAVTDKIPTDRSCLLGCGITTGYGAAVVTAKVEEGSNIAVFGAGCVGLSVMQGAVKNKAGKIIAVDVNDAKEEWSRKFGATDFVNPTKLNGQTIQEKLIEMTDGGCDYTFDCTGNVGVMRAALEACHKGWGESIVIGVAAAGQEISTRPFQLVTGRVWRGCAFGGIKGRTQLPGLVDDYLDGKLKVDEFITHREPLANINTAFEQMKAGDCIRCVVDLS

SEQ ID NO: 14400 - DNA, 1110 bp, Acinetobacter sp. ADP1
  CDS (1)..(1110): transl_table=11
atgaaatcacgtgcagcagttgcatttggcccaggtcaacctttacagattgttgaagtggatgtcgaaccacctaaagctggtgaagttctgattaaagtcacccattcaggtgtatgccatacagatgcttttaccttatctggtgatgatcctgaaggtgtttttcccgcaattttaggacatgaaggcgctggtattgttattgaagtcggtgaaggtgtcaccagtgtacaacctggcgatcatgtcattccgctttatactgccgaatgtggtgaatgtttattctgtaagtcgaataaaaccaacttgtgtgtttccgttcgagcgacacaggggaaaggtgtgatgccagatggaacgactcgtttttcttataacggcgaacctatttatcactatatgggatgttcaacttttagcgaatataccgttgtggcagaagtatcacttgccaagattaatcctgaagcaaatcacgaacaggtttgcttacttggctgtggtgtaaccacaggaattggtgctgtgcataacactgctaaagttcaggaaggtgatagtgttgccgtctttggtttaggtggtattggtttagccgtggtacaaggcgcgcgtcaagcaaaagcaggacgcatcattgttgtagacatgaacccagaaaaattcgaactcgcaaaagaatttggtgcgacagattttcttaatccaaaagattatgacaagccgattcagcaagtcattgttgaaatgacaggctggggagtcgatcattcatttgaatgtattggtaatgtgaatgttatgcgttcggcattagagtgtgcacatcgtggttggggtcaatcagtcatcattggggttgctggtgcgggacaggaaatttcaactcgaccttttcagctcgttacaggacgtaaatggttggggactgcttttggtggtgtcaaagggcgtagtcagcttccgaaaatggttgaagatgcaatgaaaggcgacatccagcttgagccatttgttacgcataccatgccgctggatgaaattaaccatgcatttgatttaatgcatgaaggtaagtctattcgtagcgtaattcatttttag

SEQ ID NO: 14401 - protein, 369 aa, Acinetobacter sp. ADP1
MKSRAAVAFGPGQPLQIVEVDVEPPKAGEVLIKVTHSGVCHTDAFTLSGDDPEGVFPAILGHEGAGIVIEVGEGVTSVQPGDHVIPLYTAECGECLFCKSNKTNLCVSVRATQGKGVMPDGTTRFSYNGEPIYHYMGCSTFSEYTVVAEVSLAKINPEANHEQVCLLGCGVTTGIGAVHNTAKVQEGDSVAVFGLGGIGLAVVQGARQAKAGRIIVVDMNPEKFELAKEFGATDFLNPKDYDKPIQQVIVEMTGWGVDHSFECIGNVNVMRSALECAHRGWGQSVIIGVAGAGQEISTRPFQLVTGRKWLGTAFGGVKGRSQLPKMVEDAMKGDIQLEPFVTHTMPLDEINHAFDLMHEGKSIRSVIHF

SEQ ID NO: 14402 - DNA, 1122 bp, Erwinia carotovora subsp. atroseptica SCRI1043
  CDS (1)..(1122): transl_table=11
atgcaaatgattaaaacccgcgccgccatcgcttggggtccaaaccaacctctttcggttgaagaagtggatctgatgccaccgcagaaaggtgaagtgttggtgcgcatcgtcgccactggcgtatgccacacggatgcctatacgctgtcaggtaaagatcctgagggtgtattcccagcgattctgggccatgaaggcggcggtattgtggaagcgattggcgaaggcgtgaccagcgttgccgttggcgaccacgttattccgctttacaccccggaatgtggcgaatgtaaattctgtcgctccggcaaaacaaacctgtgtcaggctattcgctccacacagggcaaaggcttgatgccagatggcaccacccgcttctctaaaaatggccaaccgattttccactacatgggaacctccacgttcgccgagcacaccgtcgtgcctgaaatttcgctagcaaaagtgaataaagaagcgccgctggaagaagtctgcctgctgggctgtggtgtcaccaccggcatgggtgccgttctgaataccgcaaaagttaaagcaggcgatactgttgctatttttggcctcggcggcatcggtttgtcggcgattatcggcgcacacatggccggtgcaggtcgcatcatcggtatcgatctcaacaccagcaaattcgatctggcacgtaaactgggtgctaccgatctgctcaacccgaaagattacgacaagccaattcaggacgtcattgttgaactgaccgatggcggcgtggacttctccttcgaatgtatcggtaacgttaacgttatgcgttccgcgctagagtgctgtcataaaggttggggtgaatccatcatcatcggtgtggccggtgcaggcgaagaaatcgccacgcgtccgttccaactggtaaccggtcgcgtatggcgcggttctgctttcggcggcgtgaaaggccgtagcgaactaccgggccttgtcgatcgttacctaaaaggcgaattcccgctgaatgacttcatcacccacaccatggggctggacgacatcaacaccgcattcgatttaatgcacgaaggcaaatcgattcgcactgtgattcatttcggttaa

SEQ ID NO: 14403 - protein, 373 aa, Erwinia carotovora subsp. atroseptica SCRI1043
MQMIKTRAAIAWGPNQPLSVEEVDLMPPQKGEVLVRIVATGVCHTDAYTLSGKDPEGVFPAILGHEGGGIVEAIGEGVTSVAVGDHVIPLYTPECGECKFCRSGKTNLCQAIRSTQGKGLMPDGTTRFSKNGQPIFHYMGTSTFAEHTVVPEISLAKVNKEAPLEEVCLLGCGVTTGMGAVLNTAKVKAGDTVAIFGLGGIGLSAIIGAHMAGAGRIIGIDLNTSKFDLARKLGATDLLNPKDYDKPIQDVIVELTDGGVDFSFECIGNVNVMRSALECCHKGWGESIIIGVAGAGEEIATRPFQLVTGRVWRGSAFGGVKGRSELPGLVDRYLKGEFPLNDFITHTMGLDDINTAFDLMHEGKSIRTVIHFG

SEQ ID NO: 14404 - DNA, 1140 bp, Yersinia pseudotuberculosis IP 32953
  CDS (1)..(1140): transl_table=11
atggagatgattaaaacccgcgccgctgtcgcatgggggccaaaccagccactgtccgttgaagaagttgatttgatgccaccacagaaaggcgaagtgttagtgcggattgtcgccagtggcgtttgtcacactgacgcttataccctttcgggggccgatcctgaaggcgtattcccgaccattttaggtcatgaaggcggtggaattgttgaagccattggcgaaggtgtcaccagtgttgccgtaggggaccacgttattccgctgtacacacctgagtgtggcgagtgcaagtactgccgctccggtaaaaccaacctgtgccaggcaatccgcagcactcagggtaaaggtttgatgcccgatggtaccacccgcttctctaaaaatggtcaacccatcttccactacatggggacgtcaaccttctccgaactgaccgttgtaccggaaatatcactcgcgaaaatcaataaagaagccccgttggaagaagtatgcctgctgggctgcggcgtcaccactgggatgggtgcggtgatgaataccgcaaaagttaaaccaggtgataccgtcgcaatcttcggccttggcggtatcggtttatcggcggtgattggtgcacagatggcgggggcgagccgaattattgggatcgatctcaataccagcaaattcgagctggcccgcaaattgggcgcgacagacctgatcaatccgaaagactatgataaacctatccaggaagtgatcgttgaactgaccgacggcggtgtagatttctcatttgaatgcattggtaacgtcaatgtcatgcgttcagcattagagtgctgccataaaggttggggagagtcggtgattattggtgtcgccggtgccggtgaagaaatttcaacccgcccgttccaattggttacgggccgcgtatggcggggttctgcatttggtggcgtcaaaggccgctcagaattgccgggcattgtgcagcaatatttggacggtaaattcgcgttgaacgacttcattacccacacaatggcgctggatcaaatcaacgaagcctttgatttaatgcacgagggtaaatctatccgcagtgtgatccattttaatcactcttccgaaagcaaataa

SEQ ID NO: 14405 - protein, 379 aa, Yersinia pseudotuberculosis IP 32953
MEMIKTRAAVAWGPNQPLSVEEVDLMPPQKGEVLVRIVASGVCHTDAYTLSGADPEGVFPTILGHEGGGIVEAIGEGVTSVAVGDHVIPLYTPECGECKYCRSGKTNLCQAIRSTQGKGLMPDGTTRFSKNGQPIFHYMGTSTFSELTVVPEISLAKINKEAPLEEVCLLGCGVTTGMGAVMNTAKVKPGDTVAIFGLGGIGLSAVIGAQMAGASRIIGIDLNTSKFELARKLGATDLINPKDYDKPIQEVIVELTDGGVDFSFECIGNVNVMRSALECCHKGWGESVIIGVAGAGEEISTRPFQLVTGRVWRGSAFGGVKGRSELPGIVQQYLDGKFALNDFITHTMALDQINEAFDLMHEGKSIRSVIHFNHSSESK

SEQ ID NO: 14406 - DNA, 1122 bp, Mannheimia succiniciproducens MBEL55E
  CDS (1)..(1122): transl_table=11
atgagcaatacaattaaatcccgtgcggcggtggcatttgcaccgaacgaaccacttaaaatggtagaaattgatgtagaacgcccgaaaaaaggcgaagtattagtaaaaatcactcataccggcgtatgccatacggacgctttcactttatcgggcgctgatccggaaggcgtattccctgtggttcttggtcacgaaggtgccggagttgttgtagaagtgggcgaaggcgtgaccagtgttgcggtgggcgatcatgtaattccgctctataccgcggaatgtcgcgaatgtgaattctgtaaatcaggcaaaagtaacctgtgtgtatcagtgcgtgaaacacagggtaaaggcttaatgccggatggcacaacccgtttctcttacaacggccagccgattttccactatatgggttgttcaaccttcagtgaatatactgtagtagcggatgtttcattagcaaaaatcaatccgcaagcaaatccggaagaagtgtgcttactgggttgtggtgtaaccacgggtatcggtgcggtacacaatacggcaaaagtacaagaaggcgattcagtagcggtgttcggtttgggcggtatcggcttggcggtaatccaaggagcgaaacaggcaaaagcgggacgtattattgccatagataccaacccggcaaaatttgagctggcgcgggaatttggtgcaaccgaatgtttaaacccgaatgatttcgacaaaccgatccaacaggtaattatcgaaatgaccaaatggggggtggatcatacttttgaatgtatcggtaatgtgaatgtgatgcgcgcagccttggaatcggcgcatcgtggctggggccaatcaatcattatcggtgtggcaggtgcgggacaagagatttcaacccgtccgttccaattggttaccggcagaacctggaaaggttcggcattcggcggcgtgaaaggcagaacacagttgccgggcatggttgaagatgcgatgaaaggcattattcgtttacgtccgtttgtcactcacaccatgccgattgaacgcattaacgaagctttcgatttaatgcatgaaggtaaatcaattcgtacagtggtgcactactaa

SEQ ID NO: 14407 - protein, 373 aa, Mannheimia succiniciproducens MBEL55E
MSNTIKSRAAVAFAPNEPLKMVEIDVERPKKGEVLVKITHTGVCHTDAFTLSGADPEGVFPVVLGHEGAGVVVEVGEGVTSVAVGDHVIPLYTAECRECEFCKSGKSNLCVSVRETQGKGLMPDGTTRFSYNGQPIFHYMGCSTFSEYTVVADVSLAKINPQANPEEVCLLGCGVTTGIGAVHNTAKVQEGDSVAVFGLGGIGLAVIQGAKQAKAGRIIAIDTNPAKFELAREFGATECLNPNDFDKPIQQVIIEMTKWGVDHTFECIGNVNVMRAALESAHRGWGQSIIIGVAGAGQEISTRPFQLVTGRTWKGSAFGGVKGRTQLPGMVEDAMKGIIRLRPFVTHTMPIERINEAFDLMHEGKSIRTVVHY

SEQ ID NO: 14408 - DNA, 1116 bp, Azoarcus sp. EbN1
  CDS (1)..(1116): transl_table=11
atgaccatcaagtcacgcgccgcggtcgccttcgggccgaagcaaccgctgcagatcgtcgaagtcgatgtcgagccgcccaaggcgggcgaagcgctggtgcgcatcgtcgcgaccggcgtgtgccacacggatgcgttcacgctgtcgggcgacgacccggaaggtatcttcccggcgatcctcggccacgagggcggcggcatcgtcgaggcggtcggcgaaggcgtcacgtcgcttgaggtgggcgatcacgtgatcccgctctacacggccgagtgccgcgagtgcaagttctgcaagtcgggcaagacgaacctgtgccaggcggtgcgcgcgacgcagggcaagggattgatgccggacggcacgacacgcttctcgtacaacggccagccgatctaccactatatgggcacgtcgacgttttccgaatacacggtcgtgccggagatctcgctcgcgaagatcccgaaggaggcgccgctcgacaaggtatgcctgctcggctgcggcgtgacgaccggcatcggcgcagtgctcaacaccgcgaaggtcgaggccggcgccacggtcgcgatcttcggcctcggcggtatcgggctcgcggcgatcctcggcgcgaaaatggcgaaggcctcgcgcatcatcggcatcgacctcaatccggcgaagtccgatctcgcgcggcaactgggcgcaaccgacatcgtcaatccgaacgatcacgcgaagccgatccaggacgtcatcgtcgagatgaccgacggcggcgtcgactactcgttcgagtgcgtcggcaacgtcaagctgatgcgtgcggcgctcgagtgctgccacaagggctggggcgaatcgacgatcatcggcgtggccggtgccggccaggagatctgcacgcgcccgtttcagctcgtgaccggccgcgtgtggcgcggcagcgcgttcggtggggtcaggggccgcaccgagctgccgggttatgtcgagaaggcacaacgcggcgagatcccgctcgacgtcttcatcacgcaccacctaccgctagaagacatcaaccgcgcgttcgagctcatgcacgaaggccagagcatccgcagcgtgatccgtttctga

SEQ ID NO: 14409 - protein, 371 aa, Azoarcus sp. EbN1
MTIKSRAAVAFGPKQPLQIVEVDVEPPKAGEALVRIVATGVCHTDAFTLSGDDPEGIFPAILGHEGGGIVEAVGEGVTSLEVGDHVIPLYTAECRECKFCKSGKTNLCQAVRATQGKGLMPDGTTRFSYNGQPIYHYMGTSTFSEYTVVPEISLAKIPKEAPLDKVCLLGCGVTTGIGAVLNTAKVEAGATVAIFGLGGIGLAAILGAKMAKASRIIGIDLNPAKSDLARQLGATDIVNPNDHAKPIQDVIVEMTDGGVDYSFECVGNVKLMRAALECCHKGWGESTIIGVAGAGQEICTRPFQLVTGRVWRGSAFGGVRGRTELPGYVEKAQRGEIPLDVFITHHLPLEDINRAFELMHEGQSIRSVIRF

SEQ ID NO: 14410 - DNA, 1113 bp, Pseudomonas syringae pv. syringae B728a
  CDS (1)..(1113): transl_table=11
atgatcaagtcgcgcgctgctgtcgcttttgaagccaaaaagccattggagatcgttgaagtcgatgtggccatgcccaaggcgggagaagtgctgctcagagtagtagcctccggcgtttgccacaccgatgcctacacattgtccggggctgaccctgaagggatttttccgtcgatcctcggccacgaaggtggtgcgattgtcgaagcggtgggtgagggcgtgacctcggtggtggtcggcgaccacgtgattccgctgtacaccccggaatgccgtcagtgcaagttctgccgctcgggcaagaccaacctgtgccaggcgattcgtgccacgcagggtaaaggcctgatgccggatggcaccacgcgcttttcctacaagggcgagccgattttccattacatgggcacctcgaccttctccgaatacaccgtactgccggaaatctcggtggccaaaatcgacaagcaggcaccgctggaaaaagtctgcctgctgggatgtggcgtcaccaccggtatcggtgcggtgctcaacaccgccaaggtcaagcctggtgataccgtggccatcttcggtctgggcggtattggcctctcggcattgatcggtgcggtcaaagccaaggcggctcgaatcatcgccatcgacatcaacccggccaagttcgagatcgccaaacagctgggcgcgactgattgcgtcaatccgaaggatttcgaccgtccgatccaggaagtcatcgtcgacatgaccgatggcggcgtcgacttctcgtttgagtgcatcggtaatgtgcaactgatgcgtgcagcgctggaatcctgccacaagggctggggcgagtcggtcatcatcggcgtggccggcgccggtcaggaaatcgctacccgtccgttccagctggtgaccgggcgcgtctggcgcggttcggcatttggcggcgtgcgtggccgtaccgaattgccgagctatgtggacatggcgcagaccggagaaatcccgctggatacgttcatcacccacaccatgggcctggagggaatcaacaaggcgttcgacctgatgcatgaaggcaaaagcatccgcaccgtcattcatttttaa

SEQ ID NO: 14411 - protein, 370 aa, Pseudomonas syringae pv. syringae B728a
MIKSRAAVAFEAKKPLEIVEVDVAMPKAGEVLLRVVASGVCHTDAYTLSGADPEGIFPSILGHEGGAIVEAVGEGVTSVVVGDHVIPLYTPECRQCKFCRSGKTNLCQAIRATQGKGLMPDGTTRFSYKGEPIFHYMGTSTFSEYTVLPEISVAKIDKQAPLEKVCLLGCGVTTGIGAVLNTAKVKPGDTVAIFGLGGIGLSALIGAVKAKAARIIAIDINPAKFEIAKQLGATDCVNPKDFDRPIQEVIVDMTDGGVDFSFECIGNVQLMRAALESCHKGWGESVIIGVAGAGQEIATRPFQLVTGRVWRGSAFGGVRGRTELPSYVDMAQTGEIPLDTFITHTMGLEGINKAFDLMHEGKSIRTVIHF

SEQ ID NO: 14412 - DNA, 1110 bp, Pseudomonas syringae pv. syringae B728a
  CDS (1)..(1110): transl_table=11
atgaagtctcgtgctgcagttgcatttgaacctggcaagccgctccagatcgtcgagatcgacgtcgagccgccacgcaagggcgaagtgctgatcaagatcaccgataccggtgtatgccatacggatgctttcacactttcgggcgatgatccggaaggcctgttcccggtagtactgggccatgaaggcgccggcatcgtcatggaagtaggcgaaggcgtgaccagcgtgaaagtcggtgaccacgtcattccgctgtacaccgccgaatgcggcgagtgcctgttctgtaaatcgggcaaaaccaacctgtgcaccgctgtgcgcgccactcagggcaaaggcgtgatgccggacggcacttcacgcttctcctacaacggccaacccctgtaccactacatgggttgctcgaccttcagcgagtacactgttgtcgctgaagtttctgtcgcgaagatcaatccagacgccaaccccgagcacgtctgcctgctcggctgcggcgtgactaccggcattggcgcggtgcacaacacggccaaagtccagcctggcgacacagtcgcggtatttggcctgggcggcatcggtctggcggcgattcagggtgcgcgtcaggccaaggcaggacgcatcatcgctatcgacaccaaccctgccaagttcgaactggcccgttcgtttggcgctaccgactgtgtgaatccaaaagatcacgaacagccgatccagcaggtgatcattgagatgactggctggggtgtcgaccactccttcgaatgtatcggtaacgtgcatgtgatgcgcgctgcgctcgaatgtgcccaccgcggctggggccaatcgatcgtcattggtgttgccggtgccggtcaggaaatctcgacccgtcccttccagctggtcaccggccgtacctggaaaggctcggcgtttggcggcgtaaaaggccgtagccaactgccgaagatggttgaagacgcgatgaaaggcgagatcgagctggcaccttttgtcactcacaccatgggcctggatcgcatcaatgaagcgtttgacttgatgcacgaaggcaagtcgatccgcaccgtcatcaaatactga

SEQ ID NO: 14413 - protein, 369 aa, Pseudomonas syringae pv. syringae B728a
MKSRAAVAFEPGKPLQIVEIDVEPPRKGEVLIKITDTGVCHTDAFTLSGDDPEGLFPVVLGHEGAGIVMEVGEGVTSVKVGDHVIPLYTAECGECLFCKSGKTNLCTAVRATQGKGVMPDGTSRFSYNGQPLYHYMGCSTFSEYTVVAEVSVAKINPDANPEHVCLLGCGVTTGIGAVHNTAKVQPGDTVAVFGLGGIGLAAIQGARQAKAGRIIAIDTNPAKFELARSFGATDCVNPKDHEQPIQQVIIEMTGWGVDHSFECIGNVHVMRAALECAHRGWGQSIVIGVAGAGQEISTRPFQLVTGRTWKGSAFGGVKGRSQLPKMVEDAMKGEIELAPFVTHTMGLDRINEAFDLMHEGKSIRTVIKY

SEQ ID NO: 14414 - DNA, 1113 bp, Pseudomonas fluorescens Pf-5
  CDS (1)..(1113): transl_table=11
atgatcaagtcacgtgctgccgtagccttcgaggccaagaagccgctggaaatcgtcgaagtggatgtcgccatgcccaaggcgggcgaggtgctgctgcgggtcgtcgcctccggcgtctgccacaccgacgcctacacgctgtctggtgccgaccctgaaggcatcttcccggcgatcctcggccacgaaggcggtgcggtggtggaggcggtgggcgagggcgtgacctcggtggctgtgggtgaccatgtgatcccgctgtacactccggaatgcggcaagtgcaaattctgcctgtcgggcaagaccaacctctgtcaggccattcgcgccacccagggcaagggcctcatgcctgatggcaccacgcgtttttcctacaagggtcagccgattttccactacatgggtacctcgaccttttccgagtacaccgtgctcccggaaatctccgtggccaagattcccaaggaagccccgctggaaaaggtctgcctgctggggtgcggcgtgaccaccgggatcggagcggtgatcaacaccgccaaggtcaaggccggtgataccgtggccatcttcggcctgggcggcattggcctgtcggcggtcatcggtgcggtcaaggccaaggccgggcgtatcatcgccatcgatatcaacccggccaagttcgagatcgccaagcaactgggcgccaccgactgcgtcaatccgaaggatttcgaccgtccgattcaggaggtcattgtcgacatgactgatggcggcgtggatttctccttcgagtgcatcggcaatgtgcaactgatgcgtgcggccctggagtgctgccacaagggctggggcgaatcggtaatcatcggcgtggccggtgccggccaggaaatctccacccgtcccttccaactggtgaccggccgggtatggcgcggctcagcctttggtggcgtgcgcgggcgcagcgagctgccaagctacgtggaaatgtcccagaccggcgagatccccctggataccttcatcacccacaccatgggcctggaagatatcaacaaggcgttcgacctgatgcacgaaggcaagagcattcgctccgtcattcacttctaa

SEQ ID NO: 14415 - protein, 370 aa, Pseudomonas fluorescens Pf-5
MIKSRAAVAFEAKKPLEIVEVDVAMPKAGEVLLRVVASGVCHTDAYTLSGADPEGIFPAILGHEGGAVVEAVGEGVTSVAVGDHVIPLYTPECGKCKFCLSGKTNLCQAIRATQGKGLMPDGTTRFSYKGQPIFHYMGTSTFSEYTVLPEISVAKIPKEAPLEKVCLLGCGVTTGIGAVINTAKVKAGDTVAIFGLGGIGLSAVIGAVKAKAGRIIAIDINPAKFEIAKQLGATDCVNPKDFDRPIQEVIVDMTDGGVDFSFECIGNVQLMRAALECCHKGWGESVIIGVAGAGQEISTRPFQLVTGRVWRGSAFGGVRGRSELPSYVEMSQTGEIPLDTFITHTMGLEDINKAFDLMHEGKSIRSVIHF

SEQ ID NO: 14416 - DNA, 1131 bp, Psychrobacter arcticus 273-4
  CDS (1)..(1131): transl_table=11
atgtcagataaatttattaaatccaaagccgccattgcatggggtccaaatcagccattatcgattgaagaagtagacgtgatgctgccacgtaaaggcgaagtattggtaaaaatcattgccagtggcgtctgtcataccgatgcatttaccttatctggtgaagacccagaaggcgtattcccagcaattttaggtcatgaaggcggcggtatcgttgagcaaatcggcgaaggcgtgaccagcgtccaagttggcgatcatgtcattcctttatatactgcagaatgtggcgaatgtaaattctgtacttcaggtaaaaccaacctatgctcagcggtgcgtgagactcaaggtaaaggtttgatgccagatggcaccacccgtttttataaagacggtcagcccatttatcattacatgggttgttcaactttctctgaatataccgtcttaccagagatctctttagccaaagtcagtaaagaagcgccgttagaaaaagtttgcttgcttggttgtggcgtgaccaccggtatgggcgcggtcatgaatacggctaaggttgaagaaggcgctaccgttgctgtttttggtcttggtggtattggcttagcggccgttatcggtgcaaaaatggcaaaagccagccgtattatcggcgttgatatcaatgaagataaatttgagttggccaaaaaattaggcgcgactgattgcatcaattctaaagactatgacaagcctatccaagaggtcatcgttgagatgactgatggcggcgtagactattcgtttgaatgtatcggtaacgtcgatgtcatgcgctcagcgcttgaatgctgccataaaggctggggcgagtcggtcatcatcggtgttgctggtgcaggcaaagaaatctcaacccgtccattccagctagtgaccggtcgagtctggaaaggctcagcatttggcggcgtcaaaggccgtacggaactgccaggttacgtcgaacgttatctagagggtgagattccattaaatgactttattactcatacgatgccattagaaaacatcaatgaagcgtttgacttgatgcataagggtgagagtattcgtacggttattcatttcgatatgtaa

SEQ ID NO: 14417 - protein, 376 aa, Psychrobacter arcticus 273-4
MSDKFIKSKAAIAWGPNQPLSIEEVDVMLPRKGEVLVKIIASGVCHTDAFTLSGEDPEGVFPAILGHEGGGIVEQIGEGVTSVQVGDHVIPLYTAECGECKFCTSGKTNLCSAVRETQGKGLMPDGTTRFYKDGQPIYHYMGCSTFSEYTVLPEISLAKVSKEAPLEKVCLLGCGVTTGMGAVMNTAKVEEGATVAVFGLGGIGLAAVIGAKMAKASRIIGVDINEDKFELAKKLGATDCINSKDYDKPIQEVIVEMTDGGVDYSFECIGNVDVMRSALECCHKGWGESVIIGVAGAGKEISTRPFQLVTGRVWKGSAFGGVKGRTELPGYVERYLEGEIPLNDFITHTMPLENINEAFDLMHKGESIRTVIHFDM

SEQ ID NO: 14418 - DNA, 1131 bp, Colwellia psychrerythraea 34H
  CDS (1)..(1131): transl_table=11
atgtcagataaatttattaaatcgaaagctgctattgcttggggtcctaatcaacccttatccattgaagaagttgatgtaatgttacctcgtgaaggtgaagtgttagttaaggttgttgcatcgggcgtttgtcataccgatgcttttaccttatcaggcgatgatcctgaaggtattttccctgttattttagggcacgaaggtggtggtattgttgagcaaattggcgcaggcgttactagcgttaaagttggcgatcatgttatcccgttatacacaccagagtgtggtgagtgtaaattctgcttgtcaggtaaaacaaacctttgtcaaaaaattcgtgaaactcagggtaaaggtttaatgcctgatggcaccacgcgtttttataaagacggtcaacctatctttcattacatgggatgttcaaccttttctgaatacacagttctaccagagatctctttagctaaagtcaataaagatgcaccgttagaagaagtttgtttgcttggttgtggtgttactaccggtatgggcgcggtcatgaatacggcgaaagttgaagaaggtgcaacagttgcaatctttggccttggcggcattggtttatcagcggttattggtgcaactatggctaaagcgagtcgtattattgccattgatattaacgaaagtaaatttgagctagcaaaaaaattaggcgcaacagactttattaacccgaaagactatgacaagccaattcaagatgtgattgttgaaatgactgatggcggtgttgattattcttttgaatgtattggtaacgtaaacctaatgcgctcagcgctagagtgttgccataaaggctggggagaatcagtagtcataggtgttgcgggtgcaggacaagaaatctcaactcgtccattccagttagtgactggtcgtgtatggagaggatctgcatttggtggtgttaaaggccgtactgaattacctgattacgtagaacgttatttagcgggtgaattcaaattaagtgactttattactcatactatgcctcttgaagacattaatgaatcatttgaattgatgcataaaggcgaaagtatccgttcagtgattcattttgataaataa

SEQ ID NO: 14419 - protein, 376 aa, Colwellia psychrerythraea 34H
MSDKFIKSKAAIAWGPNQPLSIEEVDVMLPREGEVLVKVVASGVCHTDAFTLSGDDPEGIFPVILGHEGGGIVEQIGAGVTSVKVGDHVIPLYTPECGECKFCLSGKTNLCQKIRETQGKGLMPDGTTRFYKDGQPIFHYMGCSTFSEYTVLPEISLAKVNKDAPLEEVCLLGCGVTTGMGAVMNTAKVEEGATVAIFGLGGIGLSAVIGATMAKASRIIAIDINESKFELAKKLGATDFINPKDYDKPIQDVIVEMTDGGVDYSFECIGNVNLMRSALECCHKGWGESVVIGVAGAGQEISTRPFQLVTGRVWRGSAFGGVKGRTELPDYVERYLAGEFKLSDFITHTMPLEDINESFELMHKGESIRSVIHFDK

SEQ ID NO: 14420 - DNA, 1113 bp, Pseudomonas syringae pv. phaseolicola 1448A
  CDS (1)..(1113): transl_table=11
atgatcaagtcgcgcgctgctgtcgcttttgaagccaaaaagccattggagatcgttgaagtcgatgtcgccatgcccaaggcgggagaagtgctgctcagagtagtggcctccggcgtctgccataccgatgcctacacactttccggtgccgatcccgaggggattttcccgtcgattctcggtcatgaaggcggtgcgattgtcgaagccattggcgaaggtgtcacctctgtcgcggtcggtgatcacgttattccgctgtacaccccggaatgtcgccagtgcaaattctgccgttcgggcaagaccaacctgtgtcaggcgattcgtgccacgcagggtaaaggcctgatgccggatggcaccacgcgtttttcctacaagggcgagccgattttccactacatgggcacttcgaccttctccgaatacaccgtactgccggaaatctcggtggccaaaatcgacaaacaggcaccgctggaaaaagtctgcctgctgggttgtggtgtcaccaccggtatcggtgcggtgctcaacactgccaaggtcaagcctggcgatacagtagcgatcttcggtctgggcggtatcggtctctcagcgttgatcggcgcggtcaaagccaaagcgtctcgaatcatcgccatcgatatcaacccggccaagttcgagatcgccaaacagttgggcgcgactgactgcgtcaatccgaaagatttcgaccgtcctattcaggaagtcattgttgacatgaccgatggcggcgtcgacttctcgtttgagtgcatcggtaatgtgcaactgatgcgtgcagcactggaatcctgccacaagggctggggcgagtcggtcatcatcggcgtggccggtgccggtcaggaaatctctacccgtccgttccagctggtgacaggacgcgtctggcgcggttcggcatttggtggcgtgcgtggccgcaccgaactgccaagctatgtcgacatggcgcagaccggtgaaatcccgctggatacgttcatcacccataccatgggcctggaagacatcaacaaggcgttcgacctgatgcatgaaggcaaaagcatccgcaccgtcattcatttttga

SEQ ID NO: 14421 - protein, 370 aa, Pseudomonas syringae pv. phaseolicola 1448A
MIKSRAAVAFEAKKPLEIVEVDVAMPKAGEVLLRVVASGVCHTDAYTLSGADPEGIFPSILGHEGGAIVEAIGEGVTSVAVGDHVIPLYTPECRQCKFCRSGKTNLCQAIRATQGKGLMPDGTTRFSYKGEPIFHYMGTSTFSEYTVLPEISVAKIDKQAPLEKVCLLGCGVTTGIGAVLNTAKVKPGDTVAIFGLGGIGLSALIGAVKAKASRIIAIDINPAKFEIAKQLGATDCVNPKDFDRPIQEVIVDMTDGGVDFSFECIGNVQLMRAALESCHKGWGESVIIGVAGAGQEISTRPFQLVTGRVWRGSAFGGVRGRTELPSYVDMAQTGEIPLDTFITHTMGLEDINKAFDLMHEGKSIRTVIHF

SEQ ID NO: 14422 - DNA, 1113 bp, Pseudomonas fluorescens PfO-1
  CDS (1)..(1113): transl_table=11
atgatcaagtcgcgcgccgccgttgccttcgaggccaaaaagccgctggaaatcgtagaagtcgatgtcgccatgcccaaggccggtgaagtattgctgcgcgtggtggcttccggggtttgccacactgacgcttacaccctgtccggcgcggacccggaaggtatcttcccgtcgatcctcggccacgaaggcggcgctatcgtcgaagcgatcggcgaaggcgtgacatccgtggccgtcggtgatcacgtgattccgctttacaccccggaatgcggtcagtgcaaattctgtaagtcgggcaagaccaacctgtgtcaggcgattcgcgccacccagggcaagggcctgatgccggacggcacttcgcgcttttcctacaagggccaaacgattttccactacatgggtacttcgacgttctccgagtacaccgtgctgccggaaatctccgtggccaagatctccaaggatgcgccgctggaaaaggtctgcctgctcggttgcggcgtgaccaccggtatcggtgcggtgatcaacaccgccaaggtcaaaccgggtgacaccgtggccatcttcggtctcggcggcatcggactgtcggccgtgatcggcgcggtgaaggccaaggcctcacggatcatcgccatcgacatcaacccggccaagttcgaaatcgccaaacaattgggtgccaccgactgcgtgaacccgaaagacttcgatcgtccgatccaggaagtgatcgtcgacatgaccgatggcggcgtcgacttctccttcgaatgcatcggcaacgtgcaacttatgcgcgcagccctcgagtgctgccataaaggctggggcgagtcggtgatcatcggtgtggccggtgccggccaggaaatctccacccgtccgttccagctggtgaccggtcgcgtctggcgcggttccgcattcggcggcgtgcgtggtcgtaccgaattgccaagctacgtcgacatggcgcaaagcggcgaaatcccgctggatactttcatcactcacaccatgggcctggaagacatcaacaaggccttcgacctgatgcacgaaggcaagagcatccgtaccgtcattcatttctga

SEQ ID NO: 14423 - protein, 370 aa, Pseudomonas fluorescens PfO-1
MIKSRAAVAFEAKKPLEIVEVDVAMPKAGEVLLRVVASGVCHTDAYTLSGADPEGIFPSILGHEGGAIVEAIGEGVTSVAVGDHVIPLYTPECGQCKFCKSGKTNLCQAIRATQGKGLMPDGTSRFSYKGQTIFHYMGTSTFSEYTVLPEISVAKISKDAPLEKVCLLGCGVTTGIGAVINTAKVKPGDTVAIFGLGGIGLSAVIGAVKAKASRIIAIDINPAKFEIAKQLGATDCVNPKDFDRPIQEVIVDMTDGGVDFSFECIGNVQLMRAALECCHKGWGESVIIGVAGAGQEISTRPFQLVTGRVWRGSAFGGVRGRTELPSYVDMAQSGEIPLDTFITHTMGLEDINKAFDLMHEGKSIRTVIHF

SEQ ID NO: 14424 - DNA, 1110 bp, Synechococcus elongatus PCC 7942
  CDS (1)..(1110): transl_table=11
atgaaatcacgcgctgcgatcgcttgggctgcaggtcaaccgctgacgatcgaggaagttgatgttcaggctccacaagccggcgaagtcatggtcaagctggtggcgacgggtgtttgccacactgatgcctttactctgagtggcgccgatcccgagggaatttttccctgtattctcggccacgaaggggcagggatcgtcgttgaagtcggtgagggtgtgacttctgtcgccgttggggatcacgttattccgctctacacgccagaatgcggcgaatgtaagttctgtaaatccggcaagaccaatctttgccaagcgattcgcgctacccaaggcaaaggcctaatgccagacggcaccagccgttttagtctcaacggccagccgatctatcacttcatgggcacgtcaaccttctcggagtacaccgtgctgccggagattgcgatcgccaaaatcaatccagccgccgcactggataaggtctgtttgctgggctgcggcatcaccaccggcatcggtgcggttctgaacaccgctaaagtcgagccgggttcgactgttgcggtctttggtctgggcggcgtcggcctcagcgtcattcaaggggcagtgctagcgaaagcgagtcggattctggcgatcgatatcaaccccgataaagcggagttcgccaaacagttaggcgcgaccgatttcatcaatcccaaggactacgatcgcccgatccaagaagtaattgttgagttgaccgatggcggcgtcgattacagctttgaagcgatcggcaatgtcaacacgatgcgcgctgcgctggaaagctgccacaagggctggggcgaatcgacgatcatcggtgtggccggagccggtcaagaaatttcaacgcgaccgttccaactggtaactggacgggtttggcgcgggagtgcttttggtggcgttaagggtcgtagccaactgccgggttatgtcgagcagtatcttaacggccaaatcaaggtcgatgagttcgtcaccgagacgcgcccactcgaggaaattaacgaagccttcgaggatatgcacgcaggcaaagtgattcgcaccgtcatcaccttttaa

SEQ ID NO: 14425 - protein, 369 aa, Synechococcus elongatus PCC 7942
MKSRAAIAWAAGQPLTIEEVDVQAPQAGEVMVKLVATGVCHTDAFTLSGADPEGIFPCILGHEGAGIVVEVGEGVTSVAVGDHVIPLYTPECGECKFCKSGKTNLCQAIRATQGKGLMPDGTSRFSLNGQPIYHFMGTSTFSEYTVLPEIAIAKINPAAALDKVCLLGCGITTGIGAVLNTAKVEPGSTVAVFGLGGVGLSVIQGAVLAKASRILAIDINPDKAEFAKQLGATDFINPKDYDRPIQEVIVELTDGGVDYSFEAIGNVNTMRAALESCHKGWGESTIIGVAGAGQEISTRPFQLVTGRVWRGSAFGGVKGRSQLPGYVEQYLNGQIKVDEFVTETRPLEEINEAFEDMHAGKVIRTVITF

SEQ ID NO: 14426 - DNA, 1119 bp, Rhodospirillum rubrum ATCC 11170
  CDS (1)..(1119): transl_table=11
atgatcgtctcgcgcgccgctatcgcctgggaagctggcaaacccctgtccgtcgaagaggtcgaggtggcgccgccgcgccaaggcgaggttctggtgcgcatcatcgccaccggtgtttgccatacggatgcttataccctgtcgggcagcgaccccgagggggtgtttccggcgatcctggggcacgagggcggcggcatcgtcgaagagatcggccccggcgtcacctcggtggccgtcggcgatcacgtcatcccgctttacaccccggaatgcggcacctgcaaattctgccgctcgggcaagaccaatctgtgtcaggccatccgcgccacccagggccagggcctgatgcccgatggcaccagccggttttcgatcaagggccgcgagatccgccattacatgggcacctcgaccttctccgaatacaccgtgctgcccgagatcgccctggccaaggtcaacaaggcggcccctttggaaaagatctgcctgctgggctgcggcgtcaccaccggcatgggagcggtgctcaatacggccaaggtcgagccgggggcgacggtggcgatcttcggcctgggcggcatcggcctgtcggcgatcatcggctgtgtcatggccggggccgggcggatcatcggcgttgacatcaatcccgataaattcgagatcgcccgccagcttggcgccaccgatgtgatcaattcgcgcgattacgaccggccgatccaggaggtgctgatcgacatgaccgatggcggcgtcgattattcgttcgaatgcatcggcaatgtcggggtcatgcgctcggccctggaatgctgccacaagggctggggccagtcggtgatcatcggcgtcgccggcgccggccaggagatttccacccggcccttccaactggtcaccggccgggtgtggcggggctcggcctttggcggggtcaagggccgctcggaactgcccgccctggtcgaacgctatctggcgggcgatttcgaactcgataccttcatcacccataccatggggctggccgacatcaaccacgccttcgagctgatgcacgagggcaaaagcatccgctcggtgatccattatgacctgtga

SEQ ID NO: 14427 - protein, 372 aa, Rhodospirillum rubrum ATCC 11170
MIVSRAAIAWEAGKPLSVEEVEVAPPRQGEVLVRIIATGVCHTDAYTLSGSDPEGVFPAILGHEGGGIVEEIGPGVTSVAVGDHVIPLYTPECGTCKFCRSGKTNLCQAIRATQGQGLMPDGTSRFSIKGREIRHYMGTSTFSEYTVLPEIALAKVNKAAPLEKICLLGCGVTTGMGAVLNTAKVEPGATVAIFGLGGIGLSAIIGCVMAGAGRIIGVDINPDKFEIARQLGATDVINSRDYDRPIQEVLIDMTDGGVDYSFECIGNVGVMRSALECCHKGWGQSVIIGVAGAGQEISTRPFQLVTGRVWRGSAFGGVKGRSELPALVERYLAGDFELDTFITHTMGLADINHAFELMHEGKSIRSVIHYDL

SEQ ID NO: 14428 - DNA, 1152 bp, Novosphingobium aromaticivorans DSM 12444
  CDS (1)..(1152): transl_table=11
atgctatcggaccgccacgtcaaagggagaccgcacgaaatgaagacccgcgccgcagttgcgttcgcgcccaagcagccgctcgagatcgtcgaactggacctcgaaggccccaaggctggcgaagtgctggtcgagatcatggcgaccggcgtgtgccacaccgatgcctacacgctcgacgggttcgacagcgaaggcatcttccccagcgtgctgggccacgaaggcgccggtatcgtgcgcgaggtgggccctggggtcacttcggtgaagcccggcgatcacgtgatcccgctctacacgccggaatgccgccagtgcaaatcgtgcctctcgggcaagaccaacctgtgcaccgcgatccgcgccacgcaagggcagggcctgatgcccgacggcaccagccgcttttcgtacaagggccagaccgtgttccactacatgggctgctcgaccttctctaacttcaccgtcctgcccgagatcgcggttgccaagatccgcgaggacgcgccgttcaagacctcgtgctatatcggctgcggcgtgacgacgggcgtcggcgcggtgatcaacaccgccaaggtccaggtcggtgacaacgtcgtggtcttcggcctcggcggcatcggcctcaacgtgatccagggcgcgcggcttgccggtgccggcaagatcatcggcgtcgacatcaaccccgaccgcgaggaatggggccgcaagttcggcatgaccgacttcctcaacagcaagggcatgagccgcgaggacgtcgtcgccaaggtcgtcgccatgaccgacggcggcgcggactacaccttcgacgccaccggcaacaccgaagtgatgcgcacggcgcttgaagcctgccatcgcggctggggcacctccatcatcatcggcgtggccgaggcgggcaaggaaatcagcacgcgtccgttccagctcgtcaccggccgcaactggcgcggcacggccttcggcggcgccaagggccgcaccgacgtgcccaagatcgtcgacatgtacatgaccggcaagatcgagatcgacccgatgatcacccatgtcatgggcctggaagagatcaacaccgccttcgacctgatgcacgccggcaagtcgatccgttcagtcgtggtgttctga

SEQ ID NO: 14429 - protein, 383 aa, Novosphingobium aromaticivorans DSM 12444
MLSDRHVKGRPHEMKTRAAVAFAPKQPLEIVELDLEGPKAGEVLVEIMATGVCHTDAYTLDGFDSEGIFPSVLGHEGAGIVREVGPGVTSVKPGDHVIPLYTPECRQCKSCLSGKTNLCTAIRATQGQGLMPDGTSRFSYKGQTVFHYMGCSTFSNFTVLPEIAVAKIREDAPFKTSCYIGCGVTTGVGAVINTAKVQVGDNVVVFGLGGIGLNVIQGARLAGAGKIIGVDINPDREEWGRKFGMTDFLNSKGMSREDVVAKVVAMTDGGADYTFDATGNTEVMRTALEACHRGWGTSIIIGVAEAGKEISTRPFQLVTGRNWRGTAFGGAKGRTDVPKIVDMYMTGKIEIDPMITHVMGLEEINTAFDLMHAGKSIRSVVVF

SEQ ID NO: 14430 - DNA, 1131 bp, Saccharophagus degradans 2-40
  CDS (1)..(1131): transl_table=11
atgactgatacatttataaaatctagggccgcggtcgcgtgggccgcaggcgaaccattatccatagaagaagtagatgtaatgatgcccaaggccggcgaagtgctggttaaaattgttgctacaggcgtatgccacacagatgcgttcaccctatctggcgaggacccagagggtatattccctgccatattaggccacgaaggcggcggtatagtagaagccctaggcgaaggggtaaccagcgttgcggtgggcgaccatgttatccccctgtatacccctgaatgtggcgagtgtaagttttgtttatctggcaaaactaacctgtgccaaaaaattcgcgccacccaaggtaaaggcttaatgccagatggcactacccgcttttataaagatggccagcccatttaccactatatgggcacctctactttctctgaatacaccgtattaccagaaatatccctagccaaagtaaaccaaaaagcaccgctagaagaggtttgtttactcggctgtggcgtaacaaccggtatgggcgcagtaatgaatactgccaaagtaaaagaaggcgataccgtagccattttcggtttagggggtattggcctatccgccgttattggcgcaaccatggccaaggccagccgtattatcgccattgatattaacgagagtaaatttgagctagccaaaaagctgggcgccacagattgcataaaccccaagctttacgacaagcccatacaagatgtaatagtagagcttaccgatggcggcgtggatttttcgtttgagtgtataggcaacgtgaacgtaatgcgctctgcacttgagtgctgccataagggctggggcgaatcgatcattattggggtagccggtgctgggcaagaaatttctacccgccctttccaactcgttactgggcgcgtatggcggggcacagcctttggcggtgtgaaaggccgctcagaattaccgggcatagtagagcaatatttggcgggcgactttaaattagacgactttattacccacaccatgggcctagaagatattaataccgctttcgatttaatgcatcacggcaaaagtattcgctcggtaattcatttcaacaaatag

SEQ ID NO: 14431 - protein, 376 aa, Saccharophagus degradans 2-40
MTDTFIKSRAAVAWAAGEPLSIEEVDVMMPKAGEVLVKIVATGVCHTDAFTLSGEDPEGIFPAILGHEGGGIVEALGEGVTSVAVGDHVIPLYTPECGECKFCLSGKTNLCQKIRATQGKGLMPDGTTRFYKDGQPIYHYMGTSTFSEYTVLPEISLAKVNQKAPLEEVCLLGCGVTTGMGAVMNTAKVKEGDTVAIFGLGGIGLSAVIGATMAKASRIIAIDINESKFELAKKLGATDCINPKLYDKPIQDVIVELTDGGVDFSFECIGNVNVMRSALECCHKGWGESIIIGVAGAGQEISTRPFQLVTGRVWRGTAFGGVKGRSELPGIVEQYLAGDFKLDDFITHTMGLEDINTAFDLMHHGKSIRSVIHFNK

SEQ ID NO: 14432 - DNA, 1110 bp, Myxococcus xanthus DK 1622
  CDS (1)..(1110): transl_table=11
atgaagtcccgtgccgctgttgccttcgaagccggaaagcccttgagcatcgtcgaactcgacgtcgcgcctccgcagaagggcgaggtcctggtccgcatcacccacacgggcgtctgtcacaccgacgcgttcaccctctccggggatgatccggaaggtctcttccctgtggtgctcggccacgagggggccggcgtggtggaggcggtgggcgagggcgtgacgtccgtgaagcccggcgaccacgtcattccgctctacaccgcggagtgcggccagtgtctgttctgtaagtccggcaagaccaacctgtgcgtggcggtgcgtgccacccagggcaagggtgtgatgccagacggcaccacgcgcttctcgtacaacggcaagcccgtctaccactacatggggtgctccaccttcagcgagtacaccgtggtggcggaggtgtcgctggctcgcatcaacccgaacgccaaccccgagcaggtctgcctgctgggctgcggcgtgacgacgggcctgggcgcggtgaagaacacggcccgcgtgcaggaaggggattcggtggcggtgttcggcctgggcggcatcggcctggcggtcatccagggcgcccagatggcgaaggcgggtcgcatcatcgccatcgatacgaaccccgccaagttcgagctggcgaaggccttcggcgccaccgacttcgtcaaccccaaggaccatgaccgtcccatccagcaggtcatcgtcgagatgacgggctggggcgtggaccactccttcgagtgcatcggcaacgtgggcgtgatgcgcgctgcgatcgagtgctcgcaccgcggctggggccagtccatcatcatcggcgtggccggcgcgggacaggagatctccacccgtccgttccaactcgtcacgggccggacctggaagggcaccgcctttggtggcgtgaagggccgctcggagctccccggcatggtggaggacgcgatggccgggaagattcagctcgcgccgttcgtgacccacacgcgttcgctgaccgacatcaacgaggccttcgacctcatgcacgagggcaagtccatccgcaccgtcgtccgctactga

SEQ ID NO: 14433 - protein, 369 aa, Myxococcus xanthus DK 1622
MKSRAAVAFEAGKPLSIVELDVAPPQKGEVLVRITHTGVCHTDAFTLSGDDPEGLFPVVLGHEGAGVVEAVGEGVTSVKPGDHVIPLYTAECGQCLFCKSGKTNLCVAVRATQGKGVMPDGTTRFSYNGKPVYHYMGCSTFSEYTVVAEVSLARINPNANPEQVCLLGCGVTTGLGAVKNTARVQEGDSVAVFGLGGIGLAVIQGAQMAKAGRIIAIDTNPAKFELAKAFGATDFVNPKDHDRPIQQVIVEMTGWGVDHSFECIGNVGVMRAAIECSHRGWGQSIIIGVAGAGQEISTRPFQLVTGRTWKGTAFGGVKGRSELPGMVEDAMAGKIQLAPFVTHTRSLTDINEAFDLMHEGKSIRTVVRY

SEQ ID NO: 14434 - DNA, 1110 bp, Trichodesmium erythraeum IMS101
  CDS (1)..(1110): transl_table=11
atggaaatcaaagcagcagtagcttttgaagcaggaaaaccattaaccatagaaaccattaatttagaaggccccaaagctggagaagtaatggtagaaattaaagcaactggagtttgccatactgatgcttatactctttccggtgctgaccccgaaggtttatttcccagcattttaggccatgaaggggcaggagttgttgtagaagttgggcatggtgttactcatcttaaaccaggagaccatgttatccctctatatgtcccagaatgtcgtcagtgtgaatattgtctcagcatgaaaactaatttatgtcaagcaattagaactactcaaggtcgtggcgttatgccaaatggtacaagtagattctcattaaatggggagataatacatcattatatgggaacttcaacttttgccaactatacagtcttacctgaaatttctttagcaaaaattcgcaaagatgctccttttgacaaggtttgttatataggttgtggagttacaactggcattggagctgttattaatactgcaaaagtagaagtaggagcaaaagtcattgtatttggtttaggaggaattggtttaaatgtaattcaaggtgccaaaatggtaggtgctgatatgattgttggggttgatattaatccggcaaaacaagaactagcaaaaaaatttgggatgacacattttgttaatcccaaggaagtagaaggagatttagttccttatttagtagatttaacaaagggaggtgcggactatacttttgaatgtattggtaatattaatgttatgcgtcaagctttggaatgttgtcataaaggttggggtatgagtgtaattattggtgtagcaggtgcaggagaagaaattagtactcgtccgtttcagttagtaacaggaagagtgtggaaaggttcagcttttggaggagcaaaaggtcgtacagatgtaccaaaaattgttgattggtatatggaaggaaagattaatattgacgatttaattactaatgttatgccattggaaaaaattaatgaagcttttgatttaatgcacgaaggtaagtctattcgtagtgttgtaactttctag

SEQ ID NO: 14435 - protein, 369 aa, Trichodesmium erythraeum IMS101
MEIKAAVAFEAGKPLTIETINLEGPKAGEVMVEIKATGVCHTDAYTLSGADPEGLFPSILGHEGAGVVVEVGHGVTHLKPGDHVIPLYVPECRQCEYCLSMKTNLCQAIRTTQGRGVMPNGTSRFSLNGEIIHHYMGTSTFANYTVLPEISLAKIRKDAPFDKVCYIGCGVTTGIGAVINTAKVEVGAKVIVFGLGGIGLNVIQGAKMVGADMIVGVDINPAKQELAKKFGMTHFVNPKEVEGDLVPYLVDLTKGGADYTFECIGNINVMRQALECCHKGWGMSVIIGVAGAGEEISTRPFQLVTGRVWKGSAFGGAKGRTDVPKIVDWYMEGKINIDDLITNVMPLEKINEAFDLMHEGKSIRSVVTF

SEQ ID NO: 14436 - DNA, 1212 bp, Synechococcus sp. CC9311
  CDS (1)..(1212): transl_table=11
ttgtgtttgttttccgaggtctgttctgaattgctctttctctgctgtcatgctgagcctcagagcgatgatgctgatggattcgattttccctcactcatgattcgctccagagctgcggttgcttgggctccaggcgagcctttggatgtcaccgagattgatgtcgccccacctcgttctggagaagtgcttcttcgtgttgtggcgacaggggtttgtcatacagacgcctacaccttgtctggttcagatcctgaaggtttatttcctgttgtgttggggcatgaaggtggagctgttgtcgaggagattggtgagggtgtgacctcagtgtcggtaggtgatcatgtgatccctctgtacacccctgaatgcgggcgctgtcggttttgtctctccggtaagacaaacctttgccaggcgattcgttcgactcagggcaggggtttgatgcccgacggcagcagtcggttttctcgtgatctaacgatgatccaccattacatggggacgtcgacattttccgagtacaccgttctgccggagattgcagttgccaagatcaatgccgatgcacccttggagaaggtgtgcttgctcggctgtggtgtgaccacaggcattggtgccgtgcacaacacggccaaggtggaacctggcagcagcgtggctgtctttggtcttggtggcattggattagccgtgatcattggtgccgttcaggcaagagctgagcggattattgggatcgacctgaacccagcaaagttcgccattgctcaacaactaggggccacggaatgcatcaatcctcgtgaccatgcgactccaatccaggaggtattgattgaacttaccgatggtggggtcgactattccttcgagtgcattggcaatgtggatgtcatgcgcgctgctcttgagtcatgccataagggctggggtgaatcaacgatcattggtgtggcgggagctggacaggagatcagtaccaggccgtttcaactggttactggcagggtgtggcggggttctgcttttggaggggtgcgcggacgaagtcaattgccgggttacgtcgagcgctatcaagctggggagattcctctcgacagctttattacccatacgatggaattaaatgacatcaaccgagcattcgagttgatgcatgctggcgaaagtatacgcacggttgttcatttttaa

SEQ ID NO: 14437 - protein, 403 aa, Synechococcus sp. CC9311
MCLFSEVCSELLFLCCHAEPQSDDADGFDFPSLMIRSRAAVAWAPGEPLDVTEIDVAPPRSGEVLLRVVATGVCHTDAYTLSGSDPEGLFPVVLGHEGGAVVEEIGEGVTSVSVGDHVIPLYTPECGRCRFCLSGKTNLCQAIRSTQGRGLMPDGSSRFSRDLTMIHHYMGTSTFSEYTVLPEIAVAKINADAPLEKVCLLGCGVTTGIGAVHNTAKVEPGSSVAVFGLGGIGLAVIIGAVQARAERIIGIDLNPAKFAIAQQLGATECINPRDHATPIQEVLIELTDGGVDYSFECIGNVDVMRAALESCHKGWGESTIIGVAGAGQEISTRPFQLVTGRVWRGSAFGGVRGRSQLPGYVERYQAGEIPLDSFITHTMELNDINRAFELMHAGESIRTVVHF

SEQ ID NO: 14438 - DNA, 1140 bp, Shewanella sp. MR-4
  CDS (1)..(1140): transl_table=11
atgtcgaacgaaaaaccacagtttatcaagtcaaaggccgccgtggcctgggggccgggacagccgctcaagattgaagaagtcgatgtgatgttacctaaagccggcgaagtattagttcgcatcgtggcgactggggtgtgccataccgatgcgtttaccttaagtggtgacgatccagaaggcgtattcccagcgatcctcggtcatgagggcggtggtattgttgagcaagtgggcgaaggcgtgaccagcgtgcaggtgggcgatcatgtgatccctctttacacgccagaatgcggcgaatgtaaattctgtttatcgggtaaaacaaacctgtgccagaagatccgtgcgacccaaggcaaaggtttaatgccagatggcaccacgcgtttctataaagatggccagcccattttccattacatgggctgttctaccttctctgaatacactgtattgcctgaaatttcattggctaaggttaataaaactgcgccattagaagagatctgtctgctaggttgtggtgtgacgacaggtatgggcgccgtaatgaacaccgctaaggtggaagaaggcgcgaccgtggcgattttcggcctaggtggtatcggtctttcggccattattggtgcgaccatggctaaagccagccggattattgccatcgatattaacgaatctaaattcgaacttgcccgtaagttaggtgcaaccgattgtattaatccgaaacatttcgacaaacccattcaagaggtgattgtcgagatgaccgatgggggcgtggattactccttcgaatgtatcggtaatgtcaatgtgatgcgcagcgcgcttgagtgttgccacaagggctggggcgaatcagtgatcattggtgttgcgggcgcagggcaggagatctccacccgtccattccaactggtgacgggccgtgtatggcgcggttctgccttcggtggcgtgaaaggacgctcgcaattacctaaaatcgttgaacaataccttgcaggtgagtttaagctcgatgactttatcacccacactatgggacttgagcaagtcaacgaagccttcgacttgatgcatgaaggcaagagcattcgcagcgtgatccatttcgataaataa

SEQ ID NO: 14439 - protein, 379 aa, Shewanella sp. MR-4
MSNEKPQFIKSKAAVAWGPGQPLKIEEVDVMLPKAGEVLVRIVATGVCHTDAFTLSGDDPEGVFPAILGHEGGGIVEQVGEGVTSVQVGDHVIPLYTPECGECKFCLSGKTNLCQKIRATQGKGLMPDGTTRFYKDGQPIFHYMGCSTFSEYTVLPEISLAKVNKTAPLEEICLLGCGVTTGMGAVMNTAKVEEGATVAIFGLGGIGLSAIIGATMAKASRIIAIDINESKFELARKLGATDCINPKHFDKPIQEVIVEMTDGGVDYSFECIGNVNVMRSALECCHKGWGESVIIGVAGAGQEISTRPFQLVTGRVWRGSAFGGVKGRSQLPKIVEQYLAGEFKLDDFITHTMGLEQVNEAFDLMHEGKSIRSVIHFDK

SEQ ID NO: 14440 - DNA, 1113 bp, Pseudomonas aeruginosa UCBPP-PA14
  CDS (1)..(1113): transl_table=11
atgatcaagtcccgtgccgccgtcgccttcgcccccaacaagccgttggaaatcgtcgaggtggatgtggcgccgccgcagaagggcgaggtactggtgcgcatcgtcgccaccggcgtctgccataccgatgcgtacaccctgtccggccaggattccgagggggtgttcccgtgcattctgggccacgaaggtggcggcatcgtcgaagcggtgggcgagggcgtgacctccctgcaggtgggcgatcatgtcatcccgctgtacaccgccgagtgcggcaagtgcaaattctgcctgtccggcaagaccaacctctgccaggccgtgcgcgccacccagggcaagggcctgatgcccgacggcaccagccgtttctcctacaagggcgagccggtcttccactacatgggctgctcgaccttctccgaatacaccgtgctgccggaaatctccctggcgaagattcccaaggacgcgccgctggataaggtctgcctgcttggttgcggcgtcaccaccgggatcggcgccgtgctgaataccgccaaggtggaagagggcgctaccgttgccatcttcggcctgggcggtatcggcctggcggcgatcatcggggcgaagatggccaaggccgcgcgcatcatcgcggtcgacatcaacccgggcaagttcgacatcgccagggagctgggcgccaccgacttcatcaatccgaaggactacgacaagccgatccaggacgtcatcgtcgaactgaccgatggcggcgtcgactactccttcgagtgcgtcggcaacgtgcagttgatgcgcgccgcgctggaatgctgccacaagggctggggcgagtcggtgatcatcggtgtcgccggcgccggccaggaaatcagcacccggccgttccaactggtcaccggccgcgtctggcgcggttcggcgttcggcggggtgcgcgggcgcagcgagttgccgagctatgtcgagaaggcgcagaagggcgagatcccgctggataccttcatcacccacaccatggggctggaggacatcaacgaggccttcgagctgatgcacgaaggcaagagcatccgcaccgtcattcattactga

SEQ ID NO: 14441 - protein, 370 aa, Pseudomonas aeruginosa UCBPP-PA14
MIKSRAAVAFAPNKPLEIVEVDVAPPQKGEVLVRIVATGVCHTDAYTLSGQDSEGVFPCILGHEGGGIVEAVGEGVTSLQVGDHVIPLYTAECGKCKFCLSGKTNLCQAVRATQGKGLMPDGTSRFSYKGEPVFHYMGCSTFSEYTVLPEISLAKIPKDAPLDKVCLLGCGVTTGIGAVLNTAKVEEGATVAIFGLGGIGLAAIIGAKMAKAARIIAVDINPGKFDIARELGATDFINPKDYDKPIQDVIVELTDGGVDYSFECVGNVQLMRAALECCHKGWGESVIIGVAGAGQEISTRPFQLVTGRVWRGSAFGGVRGRSELPSYVEKAQKGEIPLDTFITHTMGLEDINEAFELMHEGKSIRTVIHY

SEQ ID NO: 14442 - DNA, 1110 bp, Photobacterium damselae subsp. piscicida
  CDS (1)..(1110): transl_table=11
atgaaatcacgcgcagcagtcgccttcgggccgggtttaccccttgaaattgttgaaattgatgtggcaccgccgaagaaaggtgaagtgctggtgaaaatcagtcacaccggggtatgccataccgatgcctacacgctttccggtgatgatccggaaggtctgttcccggtggtgctcggccatgaaggtgccggggtggtggttgaggtcggtgagggcgtgaccagtgtgaaaccgggcgaccatgtgatcccgctgtacaccgccgagtgcggcgagtgtgatttctgtacctccggtaaaaccaacctctgtgttgccgtccgcgaaacccagggcaaaggcgtgatgccggacggcaccagccgtttttcgtataacggtcagccgctctatcactatatgggctgctcgacattcagcgaatataccgttgtggcggaagtatcactggcgaaaatcaatccgcaggccaatgcggagcaggtttgcctgctcggctgcggcgtgaccaccgggatcggcgcggtacacaataccgcgaaggtacaggaaggggattctgtggcggtattcggcctcggcggtatcgggctggccgtggtgcagggcgcacgtcaggcaaaagcggggcgcatctttgccatcgataccaatccatccaagtttgagctggcaaaacagttcggcgccacagactgcattaatcccaatgattatgacaaacctgttcagcaggtgctggtcgaaatgaccaaatggggtgtggatcatacctttgaatgtatcggcaatgtcaatgtgatgcggtcggcgctggaaagtgcgcaccgtggctgggggcagtcggtaattatcggggtggcgggtgccggaaaagagatttcaacccgtccgttccagctggtgaccggccgggtctggaaaggcacggcgttcggcggcgtgaaagggcgtacccagttgccgggaatggtggaagatgccatgagcggcaaaatcgagctggcgccgtttgtcacgcacaccatggaactggataaaatcaatgaagcttttgatttgatgcacgacggcaaatccatccgcacagtcattcattactga

SEQ ID NO: 14443 - protein, 369 aa, Photobacterium damselae subsp. piscicida
MKSRAAVAFGPGLPLEIVEIDVAPPKKGEVLVKISHTGVCHTDAYTLSGDDPEGLFPVVLGHEGAGVVVEVGEGVTSVKPGDHVIPLYTAECGECDFCTSGKTNLCVAVRETQGKGVMPDGTSRFSYNGQPLYHYMGCSTFSEYTVVAEVSLAKINPQANAEQVCLLGCGVTTGIGAVHNTAKVQEGDSVAVFGLGGIGLAVVQGARQAKAGRIFAIDTNPSKFELAKQFGATDCINPNDYDKPVQQVLVEMTKWGVDHTFECIGNVNVMRSALESAHRGWGQSVIIGVAGAGKEISTRPFQLVTGRVWKGTAFGGVKGRTQLPGMVEDAMSGKIELAPFVTHTMELDKINEAFDLMHDGKSIRTVIHY

SEQ ID NO: 14444 - DNA, 1113 bp, Azoarcus sp. BH72
  CDS (1)..(1113): transl_table=11
atgatcaaatcccgcgctgccgtcgcctggggccccaaccagccgctcgaaatcaccgaggtggacgtcgccccgcccaaggccggcgaggtgcgggtgcgcatcgtcgctaccggcgtctgtcacaccgacgccttcacgctgtccggcgccgatccggaaggcatcttcccgtccatcctcggccacgagggtggcggcatcgtcgaggcgatcggcgaaggcgtgacctcggtcgcagtcggcgaccacgtgatcccgctgtacacgccggaatgcggcaagtgcaaattctgcctgtcgggcaagaccaacctctgccaggcgatccgcgcaacccagggcaagggcctgatgccggacggcaccagccgcttctccaaggacggcaagcccatcttccactacatgggcacctccaccttctccgaatacaccgtgctgccggaaatctcggtcgccaagatccagaaggacgcgccgctcgacaaggtctgcctgctcggttgcggcgtcaccaccggcatcggcgcggtgctcaacaccgccaaggtcgaacccggtgccaccgtggcggtgttcgggctgggcggcatcggcctgtcggcgatcatcggcgcggtgatggccaaggcctcgcgcatcgtcgcggtcgacatcaacccggacaagttcgagatcgccagacagctcggcgccaccgatttcatcaaccccaaggactacgaccggccgatccaggaggtcatcgtcgaactcaccgacggcggcgtggattactccttcgagtgcatcggcaacaccaacgtgatgcgctcggcgctggagtgctgccacaagggctggggcgaatccatcatcatcggcgtcgccggcgccggccaggaaatctccacccgccccttccagctcgtcaccggcagggtgtggcgcggctcggccttcggcggggtgcgcggccgcaccgagttgcccagctacgtggcgaaggcgcagacgggcgagattccgctcgacaccttcatcacccaccgcatggggctggaagacatcaacaaggccttcgacctgatgcacgaaggcaagagcatccgctcggtcatcatctactga

SEQ ID NO: 14445 - protein, 370 aa, Azoarcus sp. BH72
MIKSRAAVAWGPNQPLEITEVDVAPPKAGEVRVRIVATGVCHTDAFTLSGADPEGIFPSILGHEGGGIVEAIGEGVTSVAVGDHVIPLYTPECGKCKFCLSGKTNLCQAIRATQGKGLMPDGTSRFSKDGKPIFHYMGTSTFSEYTVLPEISVAKIQKDAPLDKVCLLGCGVTTGIGAVLNTAKVEPGATVAVFGLGGIGLSAIIGAVMAKASRIVAVDINPDKFEIARQLGATDFINPKDYDRPIQEVIVELTDGGVDYSFECIGNTNVMRSALECCHKGWGESIIIGVAGAGQEISTRPFQLVTGRVWRGSAFGGVRGRTELPSYVAKAQTGEIPLDTFITHRMGLEDINKAFDLMHEGKSIRSVIIY

SEQ ID NO: 14446 - DNA, 1119 bp, Actinobacillus pleuropneumoniae serovar 1 str. 4074
  CDS (1)..(1119): transl_table=11
atggaatttatcaaaactcgtgcggcggtcgcttgggcgccgaatgaaccgctaaaaattgaagaattggatttaatgccgccgcaaaaaggcgaagtgttagtccgtttagtggcaaccggtgtgtgtcataccgatgcttataccctttccggtcaagatagcgaaggcgtgttcccgtgcgtacttggtcacgaaggtgcagggattgtagaagcagtcggcgaaggtgtcaccgattttaaagtgggtgatcacgttattccgctttacactgcagaatgtcgtaaatgtaaattctgtttatcgggcaaaaccaacctttgttcggcagtacgtgaaacccaaggtaaaggcttaatgccggatggaacggtacgtttctttaaagacgatcagccgattttccattatatggggacttcaaccttctccgaatatacggtggtttccgaatactcattggcaaaaattcaggaaaacgcaccgcttgacgaggtgtgcttacttggttgcggcgttaccaccggtatcggtgcagtaactcgtacggcaaaagtgaaaaaaggcgatacagtcgcaattttcggcttaggcggtatcggtcttgcggcaattatcggggcaagaatggcgggtgcaggtcgtattattgcgatcgacattaatccggctaagtttgagaaagctaaagagcttggtgcaacggattgtattaacccgaaagattacgagcagccaatccaaaatgtgattatcgagatgactgacggtggtgtggatttctcatttgaatgtgtgggtaacgtggatttaatgcgttcggcattagaatgttgccacaaaggttggggtgaaagcatcattatcggtgtcgcaccggcaggtgcggaaatccgtactcgtccgttccaattagttaccggccgtgtgtggcgtggttcggcattcggcggcgtgaaaggtcgtaccgaattaccgggtattatcgaccaatttatgaaaggcgaatttaaattgcgtgatttcatcactcacacaatgccgttggaagacatcaataaagccttcgatttaatgcacgaaggtaaatcaatccgcacggtgattcacttttaa

SEQ ID NO: 14447 - protein, 372 aa, Actinobacillus pleuropneumoniae serovar 1 str. 4074
MEFIKTRAAVAWAPNEPLKIEELDLMPPQKGEVLVRLVATGVCHTDAYTLSGQDSEGVFPCVLGHEGAGIVEAVGEGVTDFKVGDHVIPLYTAECRKCKFCLSGKTNLCSAVRETQGKGLMPDGTVRFFKDDQPIFHYMGTSTFSEYTVVSEYSLAKIQENAPLDEVCLLGCGVTTGIGAVTRTAKVKKGDTVAIFGLGGIGLAAIIGARMAGAGRIIAIDINPAKFEKAKELGATDCINPKDYEQPIQNVIIEMTDGGVDFSFECVGNVDLMRSALECCHKGWGESIIIGVAPAGAEIRTRPFQLVTGRVWRGSAFGGVKGRTELPGIIDQFMKGEFKLRDFITHTMPLEDINKAFDLMHEGKSIRTVIHF

SEQ ID NO: 14448 - DNA, 1137 bp, Haemophilus influenzae R2846
  CDS (1)..(1137): transl_table=11
atggaaattaaacaaatcaactcaaccatcaaatctcgtgcggcggtagcattcgccccaaatcaacccttacaaattgtagaaatcgacgtagaaatgcctcgcaaaggcgaagtgttaattcgtaacacgcacacgggcgtttgccatactgatgcgtttacgttatcaggaagcgatcctgaaggggtattccctgtggtgctaggacacgaaggtgcgggtgtggttgttgcggttggcgaaggtgtgttaagcgtaaaaccaggcaatcacgtcattcctctttatactgctgaatgtggcgaatgtgagttttgcctctcgggtaaaaccaacttatgcgtctcagtgcgtgacacgcaaggtaaaggcttaatgccagatggtacgacgcgtttttcttgccaaggcaagccaatttatcactatatgggctgttcgactttcagtgaatactcagttgttgcggaagtttcactggcgaaaatcaaccctgaagcgaaccacgaacaagtatgtttgctcggctgtggtgtcaccacaggtattggtgcggtacataatacggcaaaagtgcaagaaggcgactctgttgccgtgtttggcttgggtgcgattggtttagcggtagtgcaaggtgcgcgtcaagccaaagccggccgtattatcgccattgataccaatcctgcaaaatttgagttggcaaaacagtttggtgcaacggattgtttaaacccgaacgattacgataagctgatcaaagatgtgttgttagatattaataaatggggcattgaccatacctttgaatgtatcggtaatgtaaacgtaatgcgtcaagcattagaaagtgctcaccgtggctggggacaatccattatcatcggcgtagcgggtgcaggacaagaaatttcaacgcgtccgttccaattggtaacaggccgtgtttggaaaggttcggcatttggtggcgtgaaaggtcgctctgaacttccgcaaatggtggaagattcaatgaaaggcgacatccagttagaaccgtttgtgactcacacaatgccacttgatcaaattaatgaagcctttgaattaatgcacgaaggtaaatcgatccgcactgttattcattactaa

SEQ ID NO: 14449 - protein, 378 aa, Haemophilus influenzae R2846
MEIKQINSTIKSRAAVAFAPNQPLQIVEIDVEMPRKGEVLIRNTHTGVCHTDAFTLSGSDPEGVFPVVLGHEGAGVVVAVGEGVLSVKPGNHVIPLYTAECGECEFCLSGKTNLCVSVRDTQGKGLMPDGTTRFSCQGKPIYHYMGCSTFSEYSVVAEVSLAKINPEANHEQVCLLGCGVTTGIGAVHNTAKVQEGDSVAVFGLGAIGLAVVQGARQAKAGRIIAIDTNPAKFELAKQFGATDCLNPNDYDKLIKDVLLDINKWGIDHTFECIGNVNVMRQALESAHRGWGQSIIIGVAGAGQEISTRPFQLVTGRVWKGSAFGGVKGRSELPQMVEDSMKGDIQLEPFVTHTMPLDQINEAFELMHEGKSIRTVIHY

SEQ ID NO: 14450 - DNA, 1137 bp, Haemophilus influenzae R2866
  CDS (1)..(1137): transl_table=11
atggaaattaaacaaatcaattcaaccatcaaatctcgtgcggcggtggcattcgccccaaatcaacccttacaaattgtggaaatcgacgtagaaatgcctcgcaaaggcgaagtgttaatccgcaacactcacacgggcgtttgccatactgatgcgtttacgttatcaggaagcgatcctgaaggggtattccctgtggtgctaggacacgaaggtgcgggtgtggttgttgcggttggcgaaggtgtgttaagcgtaaaaccgggcgatcacgtcattcctctttatactgctgaatgtggcgaatgtgagttttgccgctcgggtaaaaccaacttatgcgtctcagtgcgtgacacgcaaggtaaaggcttcatgcctgattgcacgacacgtttttcttatcaaggtcagccgatctatcactatatgggctgttcgactttcagtgagtactctgttgttgcagaagtttcactggcgaaaatcaaccctgaagcgaaccacgaacaagtgtgtttgctcggctgcggtgtcaccactggtattggtgcggtgcataatacggcaaaagtgcaagaaggggactctgttgccgtgtttggcttgggagcgattggtttagctgtggtgcaaggtgcacgtcaagccaaagcggggcgtattattgctattgatacaaatcctgcaaaattcgatttggcaaaacagtttggtgcaacggattatttaaacccgaacgattacgacaaaccgatcaaagatgtgctgttagacatcaacaaatggggcattgaccatacctttgaatgtataggcaacgtaaacgtaatgcgtcaagcattagaaagtgctcaccgtggctgggggcaatctatcatcatcggcgtagcgggtgcaggacaagaaatttcaacacgtccgttccaattggtaacaggccgtgtgtggaaaggcagtgcatttggtggtgtgaaaggtcgctctgaacttccgcaaatggtggaagattcaatgaaaggcgacattcagttagaaccgtttgtgactcacacaatgccactcgatcaaatcaatgaagcctttgagttaatgcacgaaggtaaatcgatccgcacagttattcattactaa

SEQ ID NO: 14451 - protein, 378 aa, Haemophilus influenzae R2866
MEIKQINSTIKSRAAVAFAPNQPLQIVEIDVEMPRKGEVLIRNTHTGVCHTDAFTLSGSDPEGVFPVVLGHEGAGVVVAVGEGVLSVKPGDHVIPLYTAECGECEFCRSGKTNLCVSVRDTQGKGFMPDCTTRFSYQGQPIYHYMGCSTFSEYSVVAEVSLAKINPEANHEQVCLLGCGVTTGIGAVHNTAKVQEGDSVAVFGLGAIGLAVVQGARQAKAGRIIAIDTNPAKFDLAKQFGATDYLNPNDYDKPIKDVLLDINKWGIDHTFECIGNVNVMRQALESAHRGWGQSIIIGVAGAGQEISTRPFQLVTGRVWKGSAFGGVKGRSELPQMVEDSMKGDIQLEPFVTHTMPLDQINEAFELMHEGKSIRTVIHY

SEQ ID NO: 14452 - DNA, 1110 bp, Burkholderia vietnamiensis G4
  CDS (1)..(1110): transl_table=11
atgaaatcacgtgccgcagttgcattcgaggcgggcaagccgctgcagatcgtcgagctcgacgtcgagccgccccgcaagggcgaggtgctcgtcaagatcacgcacaccggcgtatgccacaccgatgcgttcacgttgtcgggcgacgatccggaaggcctgttccccgccgtgctgggccatgagggcgccggcatcgtggtcgaagtcggcgaaggcgtgacgagcgtcaagacgggcgaccacgtcattccgctgtacaccgccgaatgcggcgagtgcctgttctgcaagagcggcaagaccaacctgtgcgtgtcggtgcgcgcgacgcagggcaagggcgtgatgccggacggcaccacccgcttcagctacaacggtcagccggtctatcactacatgggctgctcgaccttcagcgaatacacggtcgtcgccgaagtgtcgctcgccaagatcagccccgacgccaacccggagcaggtctgcctgctcggctgcggcgtcacgaccggcctcggcgcggtgaagaacaccgccaaggtgcaggaaggcgacaccgtcgccgtgttcggcctcggcggcatcggcctcgcggtgatccagggcgccaagctcgcgaaggccggccgcatcatcgcggtcgacacgaaccccggcaagttcgacctcgcgcgcgtgttcggcgcgaccgactgcgtgaacccgaccgattacgacaagcccattcagcaggtgatcgtcgagatgaccggctggggcgtcgaccacagcttcgagtgcatcggcaacgtcaacgtgatgcgcgcggcgctcgaatgcgcgcaccgcggctggggccagtccgtcatcatcggcgtcgcgggtgccggccaggaaatctcgacgcgcccgttccagctcgtcaccggccgccgctggctcggcaccgcgttcggcggcgtcaagggccgctccgaactgccgggcatggtcgaggacgcaatggccggcaagatccagctcgcaccgttcgtcacgcacacgaagccgctcaccggcatcaacgaagcgttcgacctgatgcacgaaggcaagtcgatccgcaccgtcgtgcatttctga

SEQ ID NO: 14453 - protein, 369 aa, Burkholderia vietnamiensis G4
MKSRAAVAFEAGKPLQIVELDVEPPRKGEVLVKITHTGVCHTDAFTLSGDDPEGLFPAVLGHEGAGIVVEVGEGVTSVKTGDHVIPLYTAECGECLFCKSGKTNLCVSVRATQGKGVMPDGTTRFSYNGQPVYHYMGCSTFSEYTVVAEVSLAKISPDANPEQVCLLGCGVTTGLGAVKNTAKVQEGDTVAVFGLGGIGLAVIQGAKLAKAGRIIAVDTNPGKFDLARVFGATDCVNPTDYDKPIQQVIVEMTGWGVDHSFECIGNVNVMRAALECAHRGWGQSVIIGVAGAGQEISTRPFQLVTGRRWLGTAFGGVKGRSELPGMVEDAMAGKIQLAPFVTHTKPLTGINEAFDLMHEGKSIRTVVHF

SEQ ID NO: 14454 - DNA, 1374 bp, Sulfitobacter sp. EE-36
  CDS (1)..(1374): transl_table=11
atgaccgatatcatcaaatgcaaagcggccgtcgcctgggccgttaacgaacctctctcgatcgaggaaatcgacgtaatgccgcctaaggctggcgaagtgcgcatcaaaattatcgcctcgggcgtttgccataccgatgctttcactttgtcgggcgaagatcccgaaggcctgttcccggtcattctgggccatgaagggggcgggattgtcgaatccatcggcgagggcgtcaccagcgtggcggtgggtgaccatgtgatcccgctctacacgccagaatgtggcgagtgcaaattctgcaaatccggcaagaccaacctctgccagaagatccgggaaacccaggggcgcggtctgatgcccgacggtaccagccggttctacaaggatggtcagcccatcctgcactacatgggctgctcgaccttctcggaatacacagtgctgcccgagatatcgcttgccaaggtcaaccccgacgcgccgctggaggaggtctgcctgctgggctgcggcgtcaccaccggcatgggggctgtgatgaacaccgcgaaggtcgaagaggggtcgaccgttgcgatcttcggcatgggcggcattggcctgtccgccgtgatcggcgcgaccatggccaaggccagccgcatcatcgtgatcgatatcaacgaaagcaagttcgatctggcgcgcaagctgggtgccaccgatttcatcaaccccaaggatcacgacaaacccattcaggacgtgattgtcgagatgaccgacggcggtgtggattattcgttcgagtgtatcggcaacgtcaatgttatgcgctcggcgttggaatgctgccacaagggctggggcgaatccgtagtcatcggtgtcgcaggggcagggcaggaaatctcgacccgtccgttccaattggtcacgggccgcgtctggcgggggtcggcctttggcggggtcaagggacgctccgagctacctgactatgtcgagcgctacatgaacggcgagttcaagctgaatgatttcatcacccacaccatggggctggaagagatcaatgaagccttcgacctgatgcatgaaggaaaaagcatccgctcggtcatccacttcggcgaaggatcttccgccggtcgcgccgtttgtaggcgcggccggggtgatctggaagcgttgctggaaagcctaaagtcagcccacctcgcgccgctgtgcatccctgaccagcgctgccattcggtagaacccatgcgccatcttggtgaaaggcgtgagcaggaaaaacgccagcaccgcgccgagatgtataaccaaaagacccggcatccagccggtgccccctgccgcatagagcagcagaccagatag

SEQ ID NO: 14455 - protein, 457 aa, Sulfitobacter sp. EE-36
MTDIIKCKAAVAWAVNEPLSIEEIDVMPPKAGEVRIKIIASGVCHTDAFTLSGEDPEGLFPVILGHEGGGIVESIGEGVTSVAVGDHVIPLYTPECGECKFCKSGKTNLCQKIRETQGRGLMPDGTSRFYKDGQPILHYMGCSTFSEYTVLPEISLAKVNPDAPLEEVCLLGCGVTTGMGAVMNTAKVEEGSTVAIFGMGGIGLSAVIGATMAKASRIIVIDINESKFDLARKLGATDFINPKDHDKPIQDVIVEMTDGGVDYSFECIGNVNVMRSALECCHKGWGESVVIGVAGAGQEISTRPFQLVTGRVWRGSAFGGVKGRSELPDYVERYMNGEFKLNDFITHTMGLEEINEAFDLMHEGKSIRSVIHFGEGSSAGRAVCRRGRGDLEALLESLKSAHLAPLCIPDQRCHSVEPMRHLGERREQEKRQHRAEMYNQKTRHPAGAPCRIEQQTR

SEQ ID NO: 14456 - DNA, 1107 bp, Erythrobacter sp. NAP1
  CDS (1)..(1107): transl_table=11
atgaaaacccgcgcagccgtagctttcgaagcgaaaaagccgctcgagatcgtcgaactcgacctcgaaggtccaaaggctggcgaggtgctggtcgagatcatggcaaccgggatctgccacaccgacgcttacacgctggacgggctcgacagcgaggggatcttccccagcgtgcttggccatgagggcgcaggcatcgtgcgcgaagtgggcgcaggcgtaaccagcgttgcacccgacgatcacgttatcccgctttacacgcccgaatgtcgccagtgcaaaatgtgcctgtcgggcaagaccaatttgtgcagcgcaatccgcgcgacccagggccaagggctgatgcccgatggcacgagccggatgagctatcgcggcgagacgatctaccactacatgggctgttcgaccttctcgaacttcatcgtccttcctgaaatagcggtcgccaaaatacgcaccgacgcaccgtttgagacctcctgctatgtcggctgcggggtgacgaccggcgttggcgcggtggtcaacacggccaaggtcgagccgggcgacaatgtcgtcgtctttgggcttggcgggatcgggctcaatgtcatccagggcgcgaagatggcgggcgcggaccggatcgtcggcgtagatatcaatccggcaaagcgcgaatggggcgagaagttcggcatgaccgacttcgtgaaccccaaggagacctcggacgttgtcgcgcacttggtcgagctgcttgatggcggtgcggactattcgttcgattgcaccggtaacaccgacgtgatgcgcgacgcgctcgagtgctgtcacaagggctggggcacctcgatcatcatcggcgtagccgaagccggcaaggagatcgcgacgcggcccttccagcttgtcaccgggcgcaactggcgcggtactgccttcggcggcgccaaggggcgcaccgacgtgcccaagatcgtcgactggtacatgaacggcaagatcgcgatcgacccgatgatcacgcacactttgagcctcgaagagatcaacaagggctttgacctcatgcatgcaggcgaaagcatccgcagcgtggtcgtctactga

SEQ ID NO: 14457 - protein, 368 aa, Erythrobacter sp. NAP1
MKTRAAVAFEAKKPLEIVELDLEGPKAGEVLVEIMATGICHTDAYTLDGLDSEGIFPSVLGHEGAGIVREVGAGVTSVAPDDHVIPLYTPECRQCKMCLSGKTNLCSAIRATQGQGLMPDGTSRMSYRGETIYHYMGCSTFSNFIVLPEIAVAKIRTDAPFETSCYVGCGVTTGVGAVVNTAKVEPGDNVVVFGLGGIGLNVIQGAKMAGADRIVGVDINPAKREWGEKFGMTDFVNPKETSDVVAHLVELLDGGADYSFDCTGNTDVMRDALECCHKGWGTSIIIGVAEAGKEIATRPFQLVTGRNWRGTAFGGAKGRTDVPKIVDWYMNGKIAIDPMITHTLSLEEINKGFDLMHAGESIRSVVVY

SEQ ID NO: 14458 - DNA, 1119 bp, Synechococcus sp. WH 5701
  CDS (1)..(1119): transl_table=11
atgatccgttcccgcgctgcggtggcctgggccgcaggccagccccttgagatcaccgagatcgaggtggcccccccggcggccggtgaagtgctcttgcgggtggtggccagcggggtgtgccacaccgatgccttcaccctctcaggacaggacccggagggactcttccccgccgtgctcggccatgaggggggggcgatcgtggaggaggtgggggccgatgtgacctccgtggcggtgggggatcacgtgattcctctctacacgccggaatgccgtgcctgcagcttctgcctctccggcaagaccaacctctgccaggcgatccgtggcacccagggccggggcctgatgcccgacggcaccagccgcttctccagcgccggccgcctgatccaccactacatgggcacctccaccttttcggagtacaccgtggtgcccgagatcgccgtggccaggatcagcaaggaggcgccgctggagaaggtctgtctgctgggctgcggagtcaccaccggcatcggcgctgtgctcaacaccgccaaagtggaacccggcagcacggtggccgtcttcgggttgggcggtatcggcctggcggtgatcatcggtgccgtgatggccggcgccagccgcatcatcggcatcgacaccaacccggagaaattcgccatcgcccgccagctcggcgccagcgattgcctcgaccccggtgcctttgacgctccgatccaggaggtggtgatcgatctcaccgatggtggcgtggattattccttcgagtgcatcggcaacgtacaggtgatgcgggcagccctggagtgctgccacaaaggctggggtgaatccacgatcatcggcgtggccggtgccggccaggagatcgccacccgccccttccagctcgtgacgggccgggtgtggcgtggttcggcctttggtggagtgcgcggtcgcacggaactgccgggctacgtggagcgcttccagagcggtgagatcccgctcgacacgttcatcacccacaccatgcccctggaggagatcaacagggcctttgagctgatgcatgcaggccagagcatccgctcggtgatccacttcaaccgctga

SEQ ID NO: 14459 - protein, 372 aa, Synechococcus sp. WH 5701
MIRSRAAVAWAAGQPLEITEIEVAPPAAGEVLLRVVASGVCHTDAFTLSGQDPEGLFPAVLGHEGGAIVEEVGADVTSVAVGDHVIPLYTPECRACSFCLSGKTNLCQAIRGTQGRGLMPDGTSRFSSAGRLIHHYMGTSTFSEYTVVPEIAVARISKEAPLEKVCLLGCGVTTGIGAVLNTAKVEPGSTVAVFGLGGIGLAVIIGAVMAGASRIIGIDTNPEKFAIARQLGASDCLDPGAFDAPIQEVVIDLTDGGVDYSFECIGNVQVMRAALECCHKGWGESTIIGVAGAGQEIATRPFQLVTGRVWRGSAFGGVRGRTELPGYVERFQSGEIPLDTFITHTMPLEEINRAFELMHAGQSIRSVIHFNR

SEQ ID NO: 14460 - DNA, 1134 bp, Pseudoalteromonas tunicata D2
  CDS (1)..(1134): transl_table=11
atggaaaatcaattcataaaatcaaaggcagctatcgcatggggtccaaatcaacctttatctattgaagaagttgatgttatgtacccaaaagctggtgaagtattagttaaaattatcgccactggtgtttgccataccgatgcatttaccttatcgggtcaagatcctgaaggtgttttcccagcaattatgggtcatgaaggtgcaggaattgttcatgcaattggtgagggtgtaacaagtgttgctattggtgatcatgtgatcccactttacacccctgagtgtggcgaatgtaaattctgtacttcaggaaaaacaaacttatgccaaaaaatacgagcaactcaaggcaaaggcttaatgcctgacggtactacgcgtttttataaagatggccaacctatttttcattatatgggtacctctacattttctgaatacaccgttttacctgaaatctcacttgcaaaagtaaataaaaccgccccacttgaagaaatttgtttattaggctgtggtgtcacaaccggtatgggcgcggtaatgaataccgctaaagtaaaagcgggcgatacagtggctatttttggtttaggaggcattggcctttctgccattattggcgcacaaatggctggtgccagccaaatcataggggttgatataaatccatcaaaatttgaactggcgaaaaaactaggggcgactttatgtatcaatccaaaagactacgataaaccgatccaagaagtgattgttgaattaaccgatggcggagtcgatttttcatttgaatgtattggtaacgtcgatgtgatgcgctctgcacttgagtgttgccacaaaggctggggtgaatctgtgatcatcggtgttgccggtgcaggacaagaaatctcaacccgccctttccaacttgtaactggccgtgtatggcgcggtagtgcttttggaggcgtaaagggtcgctctgaattaccacacattgttgagcgctatcttgctggtgaatttaaactggacgattttattacccacaccatggcacttgaacaaatcaatgaagcgtttgatttaatgcacagtggtgaaagtattcgttctgttatccattttgatcataaataa

SEQ ID NO: 14461 - protein, 377 aa, Pseudoalteromonas tunicata D2
MENQFIKSKAAIAWGPNQPLSIEEVDVMYPKAGEVLVKIIATGVCHTDAFTLSGQDPEGVFPAIMGHEGAGIVHAIGEGVTSVAIGDHVIPLYTPECGECKFCTSGKTNLCQKIRATQGKGLMPDGTTRFYKDGQPIFHYMGTSTFSEYTVLPEISLAKVNKTAPLEEICLLGCGVTTGMGAVMNTAKVKAGDTVAIFGLGGIGLSAIIGAQMAGASQIIGVDINPSKFELAKKLGATLCINPKDYDKPIQEVIVELTDGGVDFSFECIGNVDVMRSALECCHKGWGESVIIGVAGAGQEISTRPFQLVTGRVWRGSAFGGVKGRSELPHIVERYLAGEFKLDDFITHTMALEQINEAFDLMHSGESIRSVIHFDHK

SEQ ID NO: 14462 - DNA, 1131 bp, Photobacterium sp. SKA34
  CDS (1)..(1131): transl_table=11
atgactgataaatttatcaaatcaaaagctgcgattgcatggggtccaaaacaaccactttctattgaagaagtagatgtaatgctacctcgtgcaggtgaagttctcgttcgcatcgttgcaacaggcgtatgtcacactgacgcattcacactatcaggtgatgatccagaaggtatcttccctgcaattcttggtcacgaaggtggcggtattgttgaaatgattggtgaaggtgttaccgatcttcaagtaggcgatcacgttattccactttacacagcagaatgtggtaagtgtaagtactgcctatctggcaaaacaaacctttgtcaggcagtacgtgaaactcaaggtaaaggcttgatgccagacggcacaacccgtttctacaaagatggtcaacctatcttccattacatgggttgttcaacattctctgagtacactgttcttcctgatatttctttagctaaaattagcaaagaagcaccactagaagaagtctgtctactaggttgtggcgtaacaacgggtatgggcgcagtacttaatacagctaaggttgaagaaggtagcactgttgctgtatttggtcttggtggtatcggtctagcagctatcattggtgcaactatggcaaaagcaagccgcatcatcgctattgatatcaacgaagataaattcgaattagcacgcaaattaggtgctactgaatgcatcaacccaatgaaattcgacaagccaattcaagaagtgattgttgaaatgactgacggtggtgttgactactcattcgaatgtatcggtaacgtaaacgttatgcgttcagcacttgagtgttgtcataaaggttggggtgaatctgtaatcatcggtgttgctggtgcaggtcaagaaatctctactcgcccattccaactagtaacgggtcgtgtatggcgtggttctgcattcggtggcgttaaaggccgttcagagcttccaggtatcgttgatcgttacatggctggcgaattccaacttgatgactttatctcattcaacatgggcttagacaaaatcaacgaagcatttgacctactacacgaaggtaagagcatccgtactatcattcattttgataagtaa

SEQ ID NO: 14463 - protein, 376 aa, Photobacterium sp. SKA34
MTDKFIKSKAAIAWGPKQPLSIEEVDVMLPRAGEVLVRIVATGVCHTDAFTLSGDDPEGIFPAILGHEGGGIVEMIGEGVTDLQVGDHVIPLYTAECGKCKYCLSGKTNLCQAVRETQGKGLMPDGTTRFYKDGQPIFHYMGCSTFSEYTVLPDISLAKISKEAPLEEVCLLGCGVTTGMGAVLNTAKVEEGSTVAVFGLGGIGLAAIIGATMAKASRIIAIDINEDKFELARKLGATECINPMKFDKPIQEVIVEMTDGGVDYSFECIGNVNVMRSALECCHKGWGESVIIGVAGAGQEISTRPFQLVTGRVWRGSAFGGVKGRSELPGIVDRYMAGEFQLDDFISFNMGLDKINEAFDLLHEGKSIRTIIHFDK

SEQ ID NO: 14464 - DNA, 1131 bp, Photobacterium sp. SKA34
  CDS (1)..(1131): transl_table=11
atgactgataaatttatcaaatcaaaagctgcaatcgcatggggtccaaaccagccactttcagtagaagaagttgatgtaatgttacctcgtgctggtgaagttctcgttcgcattgttgcaacaggcgtatgtcacactgacgcattcacactatcaggtgatgatccagaaggtatcttccctgcaattcttggtcacgaaggtggcggtattgttgaaatgattggtgaaggtgttaccgatcttcaagtgggtgatcatgttattccactttacaccgcggaatgtggtaagtgtaagtactgcctatctggcaaaacaaacctttgtcaggcagtacgtgaaactcaaggtaaaggcttgatgccagacggcacaacccgtttctataaagatggtcaacctatcttccattacatgggttgttcaacattctctgagtacaccgttcttcctgagatttctttagctaaaattagcaaagaagcaccactagaagaagtctgccttctaggctgtggtgtaacaacgggtatgggtgcggtacttaacacagcgaaagttgaagaaggtagcactgtggctgtattcggtcttggtggtatcggtctagcagctatcattggtgcaactatggcgaaagctagccgcatcatcgctgttgatatcaacgaagaaaaattcgaattagcacgtaagttaggtgcaactgactgcatcaacccaatgaagttcgacaagccaatccaagaagtgattgttgaaatgactgacggcggtgttgactactctttcgagtgtatcggtaacgtaaacgtaatgcgttctgcacttgagtgttgtcacaaaggttggggcgaatcagtaattatcggtgtggctggcgctggtcaagagatctctactcgtccattccaactagtaacaggtcgtgtatggcgtggttctgcattcggtggtgttaaaggccgttcagagcttccaggtatcgttgatcgttacatggctggcgaattccaacttgatgactttatctcattcaatatgggcttagacaaaatcaacgaagcattcgatctactgcacgaaggtaaaagtatccgtactattattcacttcgataaataa

SEQ ID NO: 14465 - protein, 376 aa, Photobacterium sp. SKA34
MTDKFIKSKAAIAWGPNQPLSVEEVDVMLPRAGEVLVRIVATGVCHTDAFTLSGDDPEGIFPAILGHEGGGIVEMIGEGVTDLQVGDHVIPLYTAECGKCKYCLSGKTNLCQAVRETQGKGLMPDGTTRFYKDGQPIFHYMGCSTFSEYTVLPEISLAKISKEAPLEEVCLLGCGVTTGMGAVLNTAKVEEGSTVAVFGLGGIGLAAIIGATMAKASRIIAVDINEEKFELARKLGATDCINPMKFDKPIQEVIVEMTDGGVDYSFECIGNVNVMRSALECCHKGWGESVIIGVAGAGQEISTRPFQLVTGRVWRGSAFGGVKGRSELPGIVDRYMAGEFQLDDFISFNMGLDKINEAFDLLHEGKSIRTIIHFDK

SEQ ID NO: 14466 - DNA, 1131 bp, Oceanospirillum sp. MED92
  CDS (1)..(1131): transl_table=11
atgagtgagcagatgatcaaatcaagagcagcgattgcctgggggccaaatcagcctctatcgattgaagaagtggatgtgatgccgccacaggcaggtgaggttctggtcagaatcgttgcaacaggtgtctgccatactgacgccttcaccttgtcaggtgaagaccctgaggggatcttcccggctattttaggccatgaagggggcggtattgttgaagcggttggtgaaggtgttaccagcctgcaggtaggcgatcatgttattcctctgtacacacctgagtgtggcgagtgtaaattctgtaagtcaggtaagacaaacctatgtcagaaaatccgagagacccagggcaaaggcttgatgccagatggcactactcgattctataaagatggtgagcctatctaccactacatgggttgctcaacattttctgaatataccgtacttccagaaatctccttggcgagagtgaacaaagaggctccacttgaagaggtctgcctattaggttgtggtgtaacgaccggtatgggggctgttatgaataccgccaaggttgaagagggcgctacggttgctatcttcggtctgggggggattggcctctcggcagtgattggcgcgaccatggccaaagccagccgaattctggcgatcgatattaatgattcaaagttcgagctagctaagcagctgggtgcaacagactgtatcaaccctaaggagtttgataagccaattcaggaagtcattgtcgagatgactgatggtggagtggattactcgtttgaatgtatcggcaatgtagatgtgatgcgttctgcattggagtgctgccataaaggctggggtgagtcggtgattattggtgtagcgggggcaggtcaggagatctcgacgcgtcctttccaactggtaacgggccgtgtatggcgtggaacggcatttggcggcgtaaaagggcgctcagagctgccagagattgtcgaacgttatatggcgggagagttcaaactcaacgattttattacgcatacgatggggcttgataagatcaatgaagcgtttgatcttatgcatgaaggtaagagtattcgtagcgtcattcattatgatcgctaa

SEQ ID NO: 14467 - protein, 376 aa, Oceanospirillum sp. MED92
MSEQMIKSRAAIAWGPNQPLSIEEVDVMPPQAGEVLVRIVATGVCHTDAFTLSGEDPEGIFPAILGHEGGGIVEAVGEGVTSLQVGDHVIPLYTPECGECKFCKSGKTNLCQKIRETQGKGLMPDGTTRFYKDGEPIYHYMGCSTFSEYTVLPEISLARVNKEAPLEEVCLLGCGVTTGMGAVMNTAKVEEGATVAIFGLGGIGLSAVIGATMAKASRILAIDINDSKFELAKQLGATDCINPKEFDKPIQEVIVEMTDGGVDYSFECIGNVDVMRSALECCHKGWGESVIIGVAGAGQEISTRPFQLVTGRVWRGTAFGGVKGRSELPEIVERYMAGEFKLNDFITHTMGLDKINEAFDLMHEGKSIRSVIHYDR

SEQ ID NO: 14468 - DNA, 1131 bp, Oceanobacter sp. RED65
  CDS (1)..(1131): transl_table=11
atgtcagatacttttattaaatcaaaagcggccattgcttggggtcctggccagcctctcagtgttgaagaagttgatgtcatgatgccgcgcaaaggtgaagtcttggtcaagatcattgcgacaggcgtatgccatactgacgcatttactttgtcaggagaggatcctgagggcaatttccccgcgatattgggacatgaaggtggcggcattgttgaagctgtgggggagggtgttaccagtgtggccgtgggagaccacgttattccgctttatacgccagaatgtggagaatgtaagttttgtacttcgggtaagacaaacctatgtcaaaagattcgtgaaacccagggcaaggggttaatgccagatggcacgtctcgtttttacaaagatggcaagcctatttaccactatatggggacatccacgttttctgagtacacagttctacccgatatttctttggctaaagtgaataagagcgctcccttggaagaggtctgcttacttggatgtggtgtgacgaccgggatgggcgctgttatgaacacagcaaaggttcaggcaggcgatagcgtagccatctttggtttaggtggtattggtttatccgcgattattggggcgacgatggctggtgcgtctcgaattattggtatcgatatcaatgagagtaaatttgagcttgctaagcagctgggtgcaactgattgcattaacccaaacgattatgacaagcccattcaagaagtgatcgtcgaattaacagatggcggcgtggacttctcattcgagtgtattggtaacgttgatgttatgcgttctgctctagagtgttgtcataaaggatggggagagtcagtagtaattggtgttgcaggtgctgggcaagaaatttctacccgtccctttcagttagttaccggacgagtttggcgaggaagtgccttcggtggtgtgaaaggtcggagtgaattgccaggcatagtggaaaagtatcttgcaggtgagttcaagttgaatgatttcatcacccatacaatggggttggaggatatcaatgaagcgtttgatttgatgcatgaaggcaagagtattcgctccgtgattcattacaataaataa

SEQ ID NO: 14469 - protein, 376 aa, Oceanobacter sp. RED65
MSDTFIKSKAAIAWGPGQPLSVEEVDVMMPRKGEVLVKIIATGVCHTDAFTLSGEDPEGNFPAILGHEGGGIVEAVGEGVTSVAVGDHVIPLYTPECGECKFCTSGKTNLCQKIRETQGKGLMPDGTSRFYKDGKPIYHYMGTSTFSEYTVLPDISLAKVNKSAPLEEVCLLGCGVTTGMGAVMNTAKVQAGDSVAIFGLGGIGLSAIIGATMAGASRIIGIDINESKFELAKQLGATDCINPNDYDKPIQEVIVELTDGGVDFSFECIGNVDVMRSALECCHKGWGESVVIGVAGAGQEISTRPFQLVTGRVWRGSAFGGVKGRSELPGIVEKYLAGEFKLNDFITHTMGLEDINEAFDLMHEGKSIRSVIHYNK

SEQ ID NO: 14470 - DNA, 1149 bp, Vibrio sp. Ex25
  CDS (1)..(1149): transl_table=11
atgactgttgaaatcaaacctggtcaaactcacatcaaatccaaggcaatggttgcatgggccgctggcgaaccactgaaaatggaagaagtggatgtacagcttcctaaagcgggtgaagtgctagtgcgcatcgtcgcaacaggtgtttgtcatactgatgcgttcactctgtcaggcgacgatccagaaggcatcttcccttcgattcttggtcacgaaggtggcggtattgttgaaatggtgggcgaaggcgttaccagcgttgaggttggcgaccacgtgattcctctttacaccgcagaatgtggcgagtgtaagttctgtaaatcgggcaaaaccaacctttgtcaggccgtgcgtgaaacacaaggtaaaggtctgatgcccgatggtacaagccgtttttctatcaacggtgaaaccatcttccactacatgggttgttctactttctctgagtacacagtactccctgaaatctcgctagcgaaagtaaacaaagatgcaccacttgaagaagtgtgtctgttaggttgtggcgtaacaaccggtatgggcgcagttatgaatacggcaaaagttgaaaaaggcgacacggttgcgatattcggtctgggtggtatcggtctttcagcgatcatcggtgcacgcatggtgggtgcaagccgcatcatcggtatcgatatcaacgaaagcaaattcgatcttgcaaaacagctaggcgcaaccgatgtgattaacccacagaaattcgataagcctatccaagaagtgattgttgaaatgactgacggtggtgttgactactcattcgagtgtatcggtaacgtaaacgtgatgcgtcaagcacttgaatgttgtcacaaaggttggggggaatcggtgatcatcggtgttgcgggtgcaggtcaagagatctcaactcgtccgttccaactagtaactggtcgtgtatggcgtggcagcgctttcggtggtgttaaaggccgctctgagcttccagaaatcgtaaaccgttacatggctggtgagtttggattgcaagagttcattactcatacaatgggattggctgacgtaaacaaagcgtttgatctgatgcacgaaggtaagagcatccgtactgttattcatatggatcaataa

SEQ ID NO: 14471 - protein, 382 aa, Vibrio sp. Ex25
MTVEIKPGQTHIKSKAMVAWAAGEPLKMEEVDVQLPKAGEVLVRIVATGVCHTDAFTLSGDDPEGIFPSILGHEGGGIVEMVGEGVTSVEVGDHVIPLYTAECGECKFCKSGKTNLCQAVRETQGKGLMPDGTSRFSINGETIFHYMGCSTFSEYTVLPEISLAKVNKDAPLEEVCLLGCGVTTGMGAVMNTAKVEKGDTVAIFGLGGIGLSAIIGARMVGASRIIGIDINESKFDLAKQLGATDVINPQKFDKPIQEVIVEMTDGGVDYSFECIGNVNVMRQALECCHKGWGESVIIGVAGAGQEISTRPFQLVTGRVWRGSAFGGVKGRSELPEIVNRYMAGEFGLQEFITHTMGLADVNKAFDLMHEGKSIRTVIHMDQ

SEQ ID NO: 14472 - DNA, 1122 bp, Alteromonadales bacterium TW-7
  CDS (1)..(1122): transl_table=11
atgtctgattttattaaatcaaaagcagcgattgcttggggccctaaccaacctttaagcgttgaagaagttgatgtaatgatgcctaaaaaaggcgaagtaatggtaaaaattactgctactggtgtttgtcataccgatgcatttacattatcaggtgaagatccagaaggtatattcccagctattttaggccatgaaggcgcaggtgttgtttatgcagttggcgaaggtgtaacgagtgttgaagtgggggatcatgtaattccactttacaccgctgaatgtggcgaatgtaaaatgtgtacatctggcaaaactaacttgtgttcagccgtacgcgaaacacaaggtaaaggcttaatgccagacggcacaacacgcttttttaaagacggccaaccaatttaccactacatgggtacgtctacattttctgagtacacagtacttccagaaatttctttagctaaagtaaacaaagaagcctctttagaagaaatttgtttattagggtgtggtgttacaaccggtatgggtgctgtaactaacactgctaaagtaaaagaaggcgatacagtcgctatatttggccttggcggcattggtttatcagccattattggtgcaaaaatggcgggcgcgagtcgtattattggtgtagacattaacaccagtaaatttgaccttgctactaaacttggcgcaaccgatttaataaaccctaaagatttcgacaagccaattcaagaagtgatcgttgaaatgactgacggtggcgttgattactcatttgaatgtattggtaacgttgatgtaatgcgctctgcccttgagtgttgccataaaggctggggggaatcggtaattattggtgtagccggtgctggccaagaaatttcaactcgtcctttccagcttgttaccggccgtgtatggcgtggtagcgcatttggtggcgttaaaggtcgctcgcaacttcctgaaatagttgagcgctacatggcaggcgaatttgcactaaacgactttattactcatacaatgagccttgaagaaatcaacgacgcatttgatttaatgcacgaaggcaaaagtattcgtactgtaattcattactaa

SEQ ID NO: 14473 - protein, 373 aa, Alteromonadales bacterium TW-7
MSDFIKSKAAIAWGPNQPLSVEEVDVMMPKKGEVMVKITATGVCHTDAFTLSGEDPEGIFPAILGHEGAGVVYAVGEGVTSVEVGDHVIPLYTAECGECKMCTSGKTNLCSAVRETQGKGLMPDGTTRFFKDGQPIYHYMGTSTFSEYTVLPEISLAKVNKEASLEEICLLGCGVTTGMGAVTNTAKVKEGDTVAIFGLGGIGLSAIIGAKMAGASRIIGVDINTSKFDLATKLGATDLINPKDFDKPIQEVIVEMTDGGVDYSFECIGNVDVMRSALECCHKGWGESVIIGVAGAGQEISTRPFQLVTGRVWRGSAFGGVKGRSQLPEIVERYMAGEFALNDFITHTMSLEEINDAFDLMHEGKSIRTVIHY

SEQ ID NO: 14474 - DNA, 1110 bp, marine gamma proteobacterium HTCC2143
  CDS (1)..(1110): transl_table=11
atgaagtctcgcgccgccgtagcctgggaagcaggtaaacctttaactattgaagaggttgatgttgagggtccgaagcaaggagaagttcttgtccgtatcgttgcaacgggtgtatgtcataccgatgcttttaccttaagcggtgcggaccccgaaggcgttttccccgcaatcttagggcatgaaggtggcggtgtcgtggaagaaattggtcgaggagtaacatcagtggccgtaggtgatcatgttattcctctttacacagctgaatgtggcgtttgtaagttttgcctttcaggaaaaactaatttgtgtcaggcgatacgagttactcagggccagggtgttatgccagacttcaccagtcgattctcgctcaatggtaaacctatctatcatttttcaggaacatcgacattttccgaatacaccgtgatgccagaaatcgctgttgccaagatcaacaaggcagcgccgctcgacaaggtctgtttgttggggtgtggtattacgaccggtattggggctgtgttgaacacggctaaagtagaacccgggtcgacggttgccatctttgggttgggcggtgttggactgagtgttattcaaggtgcggtgctggcaaaggcatcacgaatcatcgtggttgatatcaacgaagataagtttgaaatggcgaagatgttaggcgctaccgattttatcaatccgaagaattacgatgacccggtgcaggacgtgattgtcgatttgacggatggtggtgttgattattctttcgaggcgataggtcgcactgaaacgatgcgctcggcgctggaatgctgtcacaaaggctggggagaatcgactatcattggggtagcgggctcgggtcaagagatctgtacgcgaccttttcaacttgtgaccgggcgtgtttggcggggcagtgcattcggcggcgtcaagggtcggacacagttgccgggctacgtcgatcggtatttgaaaggagagattaaagtcgatgaaatgattacgcatacgatggggctcgaagatatcaatagagcttttgacttaatgcactccggagagagtattcgctcagttattctttattaa

SEQ ID NO: 14475 - protein, 369 aa, marine gamma proteobacterium HTCC2143
MKSRAAVAWEAGKPLTIEEVDVEGPKQGEVLVRIVATGVCHTDAFTLSGADPEGVFPAILGHEGGGVVEEIGRGVTSVAVGDHVIPLYTAECGVCKFCLSGKTNLCQAIRVTQGQGVMPDFTSRFSLNGKPIYHFSGTSTFSEYTVMPEIAVAKINKAAPLDKVCLLGCGITTGIGAVLNTAKVEPGSTVAIFGLGGVGLSVIQGAVLAKASRIIVVDINEDKFEMAKMLGATDFINPKNYDDPVQDVIVDLTDGGVDYSFEAIGRTETMRSALECCHKGWGESTIIGVAGSGQEICTRPFQLVTGRVWRGSAFGGVKGRTQLPGYVDRYLKGEIKVDEMITHTMGLEDINRAFDLMHSGESIRSVILY

SEQ ID NO: 14476 - DNA, 1140 bp, Aspergillus niger
  CDS (1)..(1140)
atggccagcactgtcggacagaccatcacctgcaaggctgcggttgcctggggcgccggagagcctctctccgttgaggacgtcgaagttgctcctcccaaggcccacgaggtccgcattcaggtccttcacactggtgtctgccacacagatgcctacactctctccggaaaggaccccgaaggtgctttccccgttgttctgggacacgagggtgccggtatcgtcgagtccgtcggcgagggcgtcacctccgtgaagcccggtgactatgtcgttgctctctacacccccgaatgccgtgagtgcaagttctgcaagtccggcaagaccaacctctgcggtaagattcgtgccactcagggcaagggtgtgatgcccgacggcacctcccgtttcaaggcccgcggcaaggacctgctgcacttcatgggtacctccaccttctcccagtacaccgtcgtggccgacatctccgttgtcgctgtgacccccaagatccccacggaccggtcctgcctgcttggctgcggtatcaccaccggttacggtgcggccgtcgtcaccgccaaggtggaggagggctccaacattgccgtcttcggtgccggctgtgtcggtctctcagtcatccagggtgctgtgaagaacaaggctggccgcatcatcgtggtcgatgtcaacgacggcaaggaggcgtgggcccgtaagttcggcgccacggactttgtcaaccccaccaagctcggtggcaagaccatccaggagcagctgattgagatgacggacggtggttgcgactacactttcgactgcactggtaacgttggtgtgatgcgggctgccctggaggcgtgccacaagggatggggtgagagtattatcatcggtgttgctgctgctggccaggagatttccactcgcccattccagctggtcactggccgtgtgtggaagggttgcgcctttggcggtatcaagggccgtacgcagctgccgggattggttgatgactacctgaacggacagctgaaggttgatgagttcattacgcaccgcgagaagctgtcggacatcaacaaggcgtttgagcagatgaaggcgggcgactgcgttcgctgcgttgttgacctgtcataa

SEQ ID NO: 14477 - protein, 379 aa, Aspergillus niger
MASTVGQTITCKAAVAWGAGEPLSVEDVEVAPPKAHEVRIQVLHTGVCHTDAYTLSGKDPEGAFPVVLGHEGAGIVESVGEGVTSVKPGDYVVALYTPECRECKFCKSGKTNLCGKIRATQGKGVMPDGTSRFKARGKDLLHFMGTSTFSQYTVVADISVVAVTPKIPTDRSCLLGCGITTGYGAAVVTAKVEEGSNIAVFGAGCVGLSVIQGAVKNKAGRIIVVDVNDGKEAWARKFGATDFVNPTKLGGKTIQEQLIEMTDGGCDYTFDCTGNVGVMRAALEACHKGWGESIIIGVAAAGQEISTRPFQLVTGRVWKGCAFGGIKGRTQLPGLVDDYLNGQLKVDEFITHREKLSDINKAFEQMKAGDCVRCVVDLS

SEQ ID NO: 14478 - DNA, 1140 bp, Sorghum bicolor
  CDS (1)..(1140)
atggcgaccgcggggaaggtgatcaagtgcaaagctgcggtggcatgggaggccggcaagccgctgtcgatcgaggaggtggaggtagcgcctccgcaggctatggaggtgcgcgtcaagatcctcttcacctcgctctgccacaccgacgtctacttctgggaggccaaggggcagactccggtgttccctcggatcttcggtcatgaggctggaggtatcatagagagtgttggagagggtgtgactgacgtagctcccggtgaccatgtccttcctgtgttcactggggagtgcaaggagtgcgcccactgcagatcggcagagagcaacatgtgtgatctgctcaggatcaacactgaccggggtgtgatgattggcgatggcaagtcacggttttcaatcaatggaaagcctatctaccattttgttgggacttcaaccttcagcgagtacactgtcatgcatgttggttgtgttgcaaagatcaaccctgaggctccccttgataaagtttgtgttcttagttgtggtatttctactggtcttggtgcatcaattaatgttgcaaaaccaccaaagggttctacagtggctattttcggtctaggagcagttggtcttgccgctgcagaaggtgcaaggattgctggagcatcaaggatcattggtgttgacctgaaccccagcagattcgaagaagctaggaagtttggttgtactgaatttctgaacccaaaagaccacaagaagcccgtgcaggaggtacttgctgagatgaccaacggaggggttgaccgcagtgtggaatgcactggcaacatcaatgctatgatccaagcatttgaatgtgttcacgatggctggggtgttgctgtgctagtgggtgtgccacacaaggatgctgagttcaagacccacccaatgaacttcctgaacgagaggaccctgaagggaaccttctttggcaacttcaaaccacgcactgatctgccaaatgtggtggagctgtacatgaaaaaggagctggaggtggagaagttcatcacacacagcgttccgttcacggagatcaacaaggccttcgacctgatggctaagggagaaggcatccgctgcatcatccgcatggagaactag

SEQ ID NO: 14479 - protein, 379 aa, Sorghum bicolor
MATAGKVIKCKAAVAWEAGKPLSIEEVEVAPPQAMEVRVKILFTSLCHTDVYFWEAKGQTPVFPRIFGHEAGGIIESVGEGVTDVAPGDHVLPVFTGECKECAHCRSAESNMCDLLRINTDRGVMIGDGKSRFSINGKPIYHFVGTSTFSEYTVMHVGCVAKINPEAPLDKVCVLSCGISTGLGASINVAKPPKGSTVAIFGLGAVGLAAAEGARIAGASRIIGVDLNPSRFEEARKFGCTEFLNPKDHKKPVQEVLAEMTNGGVDRSVECTGNINAMIQAFECVHDGWGVAVLVGVPHKDAEFKTHPMNFLNERTLKGTFFGNFKPRTDLPNVVELYMKKELEVEKFITHSVPFTEINKAFDLMAKGEGIRCIIRMEN

SEQ ID NO: 14480 - DNA, 1155 bp, Saccharomycopsis fibuligera
  CDS (1)..(1155)
atgtcttccaccgctggtaaatccatcttttgcaaagctgccgtcgcctgggacgccaaaaagaaattgtccgttgaggaaatcgaggttttgcctccaaaagctcacgaagtgcgtatcaaggttctcaataatgctgtctgccacactgatgcttacacactttctggtgttgatccagaaggcgtcttcccagccatcttgggtcacgaaggtgccggtattgttgaaagtgttggtgaaggtgtctctgacatcaaagtcggtgaccatgttgttgccctttacactgccgagtgtcgtaaatgtaagttctgcttgagtggtaaaaccaacttgtgtggatcggttagagctacccagggtaaaggtgtcatgccagatggtaccaccagattcagatccaaggatggcaaggaaattttccatttcatgggctgctccactttctcccaatacactgtgctcgccgacgtttctgttgctgttgtcaacccaaatgctccattcgacaagatttgtcttttgggctgtggtgtcaccactggtagcggtagtgtttacaacgttgccaaggtccaggctgacgagaaagcaaacactgctgtctttggcattggcgctgttggtcttgctgtcattgaaggcttaagattgagaaatgcttccaaaatcattgctattgatgtcaatgacgctaaagaagagtacgccagaaaatggggcgttacccatttcatcaacccaaccaaactcaaggaaggcgaaaccattgttgacaaattgattgaattgaccgatggcggttgtgattacacttttgactgtactggtaacgttgacgttatgagaagtgctttggaagcttgtcacaaaggttggggtgtctctgtcatcatcggtgttgctgctgctggtaaagaaatcagtaccagaccattccaattggtaaccggtagagtttggagaggttctgcttttggcggggttaagggtaagactcaattgccaggctttgtcgatgattacttgaagggtgacctaaaactcgatgactacatcaccggctacagaactttggatgatgttaatgctgcctttgatgacttgcacaagggtgacgttatcagaactgttatcaagttgtgggaataa

SEQ ID NO: 14481 - protein, 384 aa, Saccharomycopsis fibuligera
MSSTAGKSIFCKAAVAWDAKKKLSVEEIEVLPPKAHEVRIKVLNNAVCHTDAYTLSGVDPEGVFPAILGHEGAGIVESVGEGVSDIKVGDHVVALYTAECRKCKFCLSGKTNLCGSVRATQGKGVMPDGTTRFRSKDGKEIFHFMGCSTFSQYTVLADVSVAVVNPNAPFDKICLLGCGVTTGSGSVYNVAKVQADEKANTAVFGIGAVGLAVIEGLRLRNASKIIAIDVNDAKEEYARKWGVTHFINPTKLKEGETIVDKLIELTDGGCDYTFDCTGNVDVMRSALEACHKGWGVSVIIGVAAAGKEISTRPFQLVTGRVWRGSAFGGVKGKTQLPGFVDDYLKGDLKLDDYITGYRTLDDVNAAFDDLHKGDVIRTVIKLWE

SEQ ID NO: 14482 - DNA, 1386 bp, Dimocarpus longan
  CDS (44)..(1186)
gacacccgaaaaaaacaagaaaaagcattagagttgaagaaagatgtcaagcacagttggtcaagtcattcgttgcaaagctgcggtggcatgggaacccggaaagccactggtgatccaagaagtcgaggtggcaccaccccaggctatggaggttcgactcaaaatcctcttcacctctctctgccacactgatgtttacttttgggaagccaagggccaaacaccattgtttcctcgcatttttggtcatgaagcaggagggattgttgaaagtgttggtgagggtgtgacagacctcaaacccggtgaccaggtgcttcctgtattcactggggagtgcaaggagtgtagacactgcaagtcagaggagagtaacatgtgtgacctattgagaatcaacacggaccggggagtgatgctgaatgacggcaagtctcgattctctatcaatggacaacccatttaccattttgttggaacgtctacatttagtgaatacactgttgttcacgttggctgtctcgccaagatcaaccctgctgctccacttgacaaagtttgtgttctgagctgtggaatttctacaggtcttggagccaccttgaatgttgcaaaaccgaaaaagggttcaactgtcgccatttttggtttgggagcagtggggcttgctgctgctgaaagggctagaattgctggtgcatcaaggattattggaattgatttgaatcccatgaggtttgatgaagccaagaaattcggtgtcactgagtttgtcaacccaaaagactatgacaagcctgttcaagaggtgattgctgaaatgacagatggaggagttgatcgaagcgtggagtgtaccggtaacatcaatgccatgatatctgcgtttgaatgtgttcatgatggatggggtgttgctgtgctagttggtgtgccaaacaaggatgatgcattcaaaacccacccgatgaatgtcttgaatgagaagactctgaagggtacctttttcggcaactacaaaccgcgatcggaccttccttcagtggtggagaagtacatgaacaaggagcttgaactggagaaattcattacacatgaggttcctttctcagagatcaacaaggccttcgaatacatgcttggaggagttggcctccgatgtattatccgaatggatgcataatggaaaatcgatttgcatcctttgtgtgataaataaatgcaacttgcagtcagcatgcctgtttgtaatggggacagtatagtagtaatcttttccgttcgtgtgattttcatgcattgtacattacaaaataacttgtttacttacaactattacaaatcaaagtatctggttttcctgcggaaaaaaaaaaaaaaaaa

SEQ ID NO: 14483 - protein, 380 aa, Dimocarpus longan
MSSTVGQVIRCKAAVAWEPGKPLVIQEVEVAPPQAMEVRLKILFTSLCHTDVYFWEAKGQTPLFPRIFGHEAGGIVESVGEGVTDLKPGDQVLPVFTGECKECRHCKSEESNMCDLLRINTDRGVMLNDGKSRFSINGQPIYHFVGTSTFSEYTVVHVGCLAKINPAAPLDKVCVLSCGISTGLGATLNVAKPKKGSTVAIFGLGAVGLAAAERARIAGASRIIGIDLNPMRFDEAKKFGVTEFVNPKDYDKPVQEVIAEMTDGGVDRSVECTGNINAMISAFECVHDGWGVAVLVGVPNKDDAFKTHPMNVLNEKTLKGTFFGNYKPRSDLPSVVEKYMNKELELEKFITHEVPFSEINKAFEYMLGGVGLRCIIRMDA

SEQ ID NO: 14484 - DNA, 1143 bp, Medicago truncatula
  CDS (1)..(1143)
atggcatcgtcgactgaaggtcaagtcattacatgcaaagctgcggtggcctgggaacccaacaaacccttaacaatcgaagatgttgaggtcgctcctccccaagccaacgaagtccgaattcaaatcctcttcaccgctctctgtcacactgatgcttatacttggagtggcaaagatcctgaaggtcttttcccttgcattcttggtcacgaagctgctggtattgtggaaagtgttggagaaggtgtcactgatgttaagcctggggatcatgtcattccatgttaccaagctgagtgtggggaatgtaagttttgcaaatccggtaagaccaatctctgtggcaaggttcgtgccgctactggggttggggttatgatgaatgatcgcaaacctcggttttctatcaagggaaaacccatttatcattttatgggaacttctacttttagtcagtacactgttgttcatgatgttagtgttgctaagattcatccagatgctgctttggacaaagtttgtcttcttggatgtggtgttccaaccggtctcggagctgtctggaacactgcaaaagttgagccagggtccattgttgctattttcggtcttggaactgttgggcttgctgttgcagagggtgcaaaatctgctggtgcatcacggattattggcatagatattgatagcaacaagtttgatacagcaaaaaactttggagtcactgagttcattaatccaaaagaccatgagaaaccaattcagcaggtcataagtgatctaacagatggaggagtcgattatagctttgagtgcatcggaaatgtctctgtgatgagatctgctttggaatgcacccacaagggatgggggacatcagttgttgtgggcgttgcagcatcagggcaggaaatatcaactcgccctttccagttggtgactgggcgtgtatggaaaggaacagcttttggcggctttaagagcaggtcacaagtgccttggcttgttgaaaagtacttgaagaaggaaatcaaggttgatgagtacgttacccataatttgactcttgcggagatcaacgaggcatttgatcttatgcatgaagggaaatgtcttcgttgtgtgcttgcattgcattga

SEQ ID NO: 14485 - protein, 380 aa, Medicago truncatula
MASSTEGQVITCKAAVAWEPNKPLTIEDVEVAPPQANEVRIQILFTALCHTDAYTWSGKDPEGLFPCILGHEAAGIVESVGEGVTDVKPGDHVIPCYQAECGECKFCKSGKTNLCGKVRAATGVGVMMNDRKPRFSIKGKPIYHFMGTSTFSQYTVVHDVSVAKIHPDAALDKVCLLGCGVPTGLGAVWNTAKVEPGSIVAIFGLGTVGLAVAEGAKSAGASRIIGIDIDSNKFDTAKNFGVTEFINPKDHEKPIQQVISDLTDGGVDYSFECIGNVSVMRSALECTHKGWGTSVVVGVAASGQEISTRPFQLVTGRVWKGTAFGGFKSRSQVPWLVEKYLKKEIKVDEYVTHNLTLAEINEAFDLMHEGKCLRCVLALH

SEQ ID NO: 14486 - DNA, 1131 bp, Ocimum basilicum
  CDS (1)..(1131)
  misc_feature (741)..(741): s is g or c
atggcaaataatacaaatgcaggggtcatcacatgcaaagctgccgcggcatggaaaccgtcggagccactagtggtggaggagatttgcgttgaaccgcctaaatcgaccgaagttaggatcaagatgctcgctgctagcatgtgccacacagatatcctactttggaaaggcttcttccctctgtacccccgaatccccgggcacgaaggggcaggtgtgattgaaagtgttggagaaaaggtggcaaatctcaaggtaggagacacagtgatgccactctccatcggacaatgcggagaatgctccaactgtgcgacggggaagacaaacatctgcttcaaatacccatttggaatatccggcctaatgcccgatggcacatcaagaatgtcagccaaaggccaaaaactttaccacatgttcacctgctccacctggtccgaatacaccgttgtagactctaacttcgtcgtcaaggttgacccgaggattcctcttccgcatgctagtctcctcacctgtggtttcttgaccggttatggagctccgtggagagaatccagggtcgaaaaggggtctaccgtcgctgtgataggcctcggtgctgtcgggctaggggcggtgagtgcatcgcgaatcctaggagcatcgaagataatagggatcgatgtgaacgagcttaaacgagaaaaggctacggttttcggggtgaccgagttcataaaccctaagcattcsgataaaactgtgtcacaactgatccaagaggctaccggaggattaggtgtggattgctgcatcgagtgcactggcgtttcctccctcctcaacgaagccatagcaagcacaaaagtgggaatcggagaggtggtgttgatcggcgcaggagaaaaggagaaggtggagatcagctacattccccttatgttggggaggagtgttaagggaacaaccttgggtggtgtaagaattcactcggatcttcctaaaattgttgagaaatgtatcaacaaggaaatcgatcttgatgagctcataactcatgaggtttcacttgttgatgttaacaagggatttatggagtacatgaatcaaccagactgtgtcaaagtttctgtcaaattctga

SEQ ID NO: 14487 - protein, 376 aa, Ocimum basilicum
MANNTNAGVITCKAAAAWKPSEPLVVEEICVEPPKSTEVRIKMLAASMCHTDILLWKGFFPLYPRIPGHEGAGVIESVGEKVANLKVGDTVMPLSIGQCGECSNCATGKTNICFKYPFGISGLMPDGTSRMSAKGQKLYHMFTCSTWSEYTVVDSNFVVKVDPRIPLPHASLLTCGFLTGYGAPWRESRVEKGSTVAVIGLGAVGLGAVSASRILGASKIIGIDVNELKREKATVFGVTEFINPKHSDKTVSQLIQEATGGLGVDCCIECTGVSSLLNEAIASTKVGIGEVVLIGAGEKEKVEISYIPLMLGRSVKGTTLGGVRIHSDLPKIVEKCINKEIDLDELITHEVSLVDVNKGFMEYMNQPDCVKVSVKF

SEQ ID NO: 14488 - DNA, 1502 bp, Cucumis melo
  CDS (151)..(1290)
tcccaaaattcaaatccttttacctataaatactctcactcacttcttccttcatcatcatcatcgtcatttctctttctaacccaaatcaaattttgtttctctctctctctctctctcttcaaatccctttcaccataacccacaactatgtccactgccggtcaggtcatcaaatgcaaagctgctgtggctcgggaggccggaaagccacttgtcattgaaaaagttgaagtggcaccaccgcaagctaatgaagtccgattgaagatccttttcacttctctctgtcataccgatgtttatttctgggaagccaagggacaaaccccattgtttcctcgtatttttggacataaggctggaggaattgttgagagtgttggagaaggagtgaaagatcttcaaccaggagatcatgttcttcctattttcactggtgaatgtggggattgtagtcattgtcaatctgaagaaagcaatatgtgtgatcttcttcgaatcaataccgatcgtggagttatgatcaatgatggcaaaactagattctccaaaaatggacaacccattcatcattttgttggaacctccacttttagtgaatacactgttgttcatgttggttgcttggctaagatcaaccctgctgcccctcttgacaaagtttgtgttcttagctgcggcatttccacaggccttggtgccactttgaatgttgcaaagcctaaaaagggtcaatctgttgcgatctttggacttggagttgttggacttgctgctgctgaaggagcaagaattgctggtgcatctaggatcattggtgttgacctgaacccggctcgattcgaagaagcaaagaaatttggttgcaacgaatttgtgaatccaaaggatcacaacaagccagttcaagaggtgattgctgagatgacgaacggaggagttgaccgaagcgtcgagtgtacgggaagcatccaagcaatgatcgcagcatttgaatgcgttcacgatgggtggggtgttgctgttcttgtgggagtcccaaacaaagacgatgcattcaaaactcatcctatgaatttccttaacgaaagaactctaaagggtacattcttcggcaactacaaaccccgaaccgacattccgggggtggtcgagaagtacttgagcaaggagctggaattggagaagttcattacacatacagtgtcattttctgagatcaacaaggcgtttgattacatgctgaaaggggagtcgattcgatgcattattagaatggataattgaaataataactgtgggatgagatgaaaataagggaataagattatgtggtgattgaaagaggctggagagttctggttttccttatttctttctaagtttgtgtttaatgttttctgagagtggaatgttcgcgatagtgttatcgcctttttgtcaatttcatccaactcttgaaatattgtagtcatattataatcgaaaaaaaaaaaaaa

SEQ ID NO: 14489 - protein, 379 aa, Cucumis melo
MSTAGQVIKCKAAVAREAGKPLVIEKVEVAPPQANEVRLKILFTSLCHTDVYFWEAKGQTPLFPRIFGHKAGGIVESVGEGVKDLQPGDHVLPIFTGECGDCSHCQSEESNMCDLLRINTDRGVMINDGKTRFSKNGQPIHHFVGTSTFSEYTVVHVGCLAKINPAAPLDKVCVLSCGISTGLGATLNVAKPKKGQSVAIFGLGVVGLAAAEGARIAGASRIIGVDLNPARFEEAKKFGCNEFVNPKDHNKPVQEVIAEMTNGGVDRSVECTGSIQAMIAAFECVHDGWGVAVLVGVPNKDDAFKTHPMNFLNERTLKGTFFGNYKPRTDIPGVVEKYLSKELELEKFITHTVSFSEINKAFDYMLKGESIRCIIRMDN

SEQ ID NO: 14490 - DNA, 1143 bp, Oryza sativa
  CDS (1)..(1143)
atggcaactgcagggaaagtgatcaagtgcaaagcggcggtggcttgggaggccgggaagccgctgtcaatcgaggaggtggaggttgcgccgccgcaagccatggaggttcgcctcaagatcctctacacggcgctctgccacaccgacgtctacttctgggaagccaaggggcaaactccggtgttccctcggatcttcggccacgaagctggagggattgtggagagtgtgggcgagggggtgacggagctttcccccggcgaccacgtgctgccggtgttcaccggcgagtgcggcgactgccggcactgcctgtcggaggagagcaacctgtgcgacctcctccgcatcaacaccgaccgtggcgccatgatcggcgacggccagaccaggttcaccgccaggggagggcagccggtgtaccacttcctcggcacctccacgttcagcgagtacaccgtcgtccatgtcggctgcgtcgccaagatccacccagcggcgccgctcgacaaggtctgcgtcctcagctgtggcatctccaccggatttggcgcgactgtgaacgtcgccaagccaccgaaggggtgcacagtagccatattcggcctgggtgcagttggtcttgctgccatggaaggtgcaaggatctctggtgcttcacggattattggcgtcgatttgaacccggccaaattcgaactagctaagaagtttgggtgcacagactttgtgaacccaaaagattacgacaagcccgttcagcaggtgatcatcgagatgaccaacggcggcgtggaccgcagcgtggagtgcaccggcaacgccgccgccatgatctccgccttcgagtgcgtccacgacgggtggggagtggccgtgctggtgggcgtcgccggcaaggacgcggcgttcaagacgcacccgaccaacttcctcaacgagaggacgctcaggggcacgttcttcggcaactacaagcctcgcaccgacctgcccggcgtcgtcgagatgtacatgaacaaggagctggagctggagaagttcatcacgcacagcgtgcccttctccgagatcaacacggcgttcgacctgatgctcagtggggagagcctccgctgcatcatcaggatggaggactag

SEQ ID NO: 14491 - protein, 380 aa, Oryza sativa
MATAGKVIKCKAAVAWEAGKPLSIEEVEVAPPQAMEVRLKILYTALCHTDVYFWEAKGQTPVFPRIFGHEAGGIVESVGEGVTELSPGDHVLPVFTGECGDCRHCLSEESNLCDLLRINTDRGAMIGDGQTRFTARGGQPVYHFLGTSTFSEYTVVHVGCVAKIHPAAPLDKVCVLSCGISTGFGATVNVAKPPKGCTVAIFGLGAVGLAAMEGARISGASRIIGVDLNPAKFELAKKFGCTDFVNPKDYDKPVQQVIIEMTNGGVDRSVECTGNAAAMISAFECVHDGWGVAVLVGVAGKDAAFKTHPTNFLNERTLRGTFFGNYKPRTDLPGVVEMYMNKELELEKFITHSVPFSEINTAFDLMLSGESLRCIIRMED

SEQ ID NO: 14492 - DNA, 1890 bp, Aspergillus oryzae
  CDS (1)..(1890)
atgcgccacgtgctgaacaaggagcaattattgatggttaagcaggctgcaattgcctgggcagcagcggaacccctttcagtcgagaatgtcgaagtcgcaccaccaaaagctcatgaagtccgcatcaagatcctgcacactggagtttgccatactgatgcctacacgctttccggcaaggatcccgagggcgctttcccggtgattctgggccacgagggtgccggtattgttgaatcggttggtgaaggtgttaccaacgtcaaagtcggcgactatgtgatcgctctctatacaccggagtgcggagaatgcaaattttgccggtccgggaagacgaatctgtgcggtaagatccgggccacgcaaggccgcggcgtcatgcccgatggcacgacccgtttcaaagcccgcggaaaagatctcctccattttatgggctgctcgaccttttccgaatacactgttgtcgccgatatttcagttgtagcggtcactccttcctgtccgacggaccgttcttgtcttctcgggtgcggtattacgaccggttacggtgctgcgacggttactgctaatattacggagggatctaatgtcgcagtttttggagctggctgtgtcggtctatcgattgtgcagggcgcggtgaagaagaaggccggaaagattattgtggttgatattaatgatggaaaggaagcatgggcttacaagttcggagcgacacatttcctcaacccggctcgactgaggaagaccgttcaggatgagcttattgacatgactgatggtggatgtgactacactttcgactgcacgggaaatgttagtgtcatgcgcgctgctcttgaagcttgtcacaagggctggggtgagagcatcgtcatcggcgttgctgctgctggtcaagagatcacaaccaggcctttccaactagttactggtcgtgtatggaggggatgtgcttttggaggcgtcaagggtcgttcccagcttccgggtctggtggaggattatctgaacggtgacttgaaaattgacgaatttatcacgcaccgtgagaccttggccaatatcaataccgcttttgagcagatgaagcaaggggattgcatccgatgcgttgttgatatggtgcagtataatgctgttgaattttgcaaaaaaggtatagtataccttgtaacattagacaaacacgcaatcgaagaaaatctcggaaggacatccgtactgcggagtgaaaatggtcgtagtccgggcacgggaccggaaagcacaaccggattgacaatctcaaaaatcaacatgcctgtctccctccaccccctcgttgacaacggtatcaccaaaggtgacgccaattttcccggtggaaacctctactgtctctgccctcagaacaaagtcacagtcgccatcaagggcaacgtcgcccacaaccacgcctgcggatgttctaagtgctggaagcccgccggtgctctcttctccgtcgttggtgtagtccccaaggagaacctctccgtggctgccaacgcagacaagctcgagattctcgacaaggcagccgccattcagcgctacgcctgcaaggaatgcggcactcatttgttcggccgcattgagattgaccaccccttcaagggactggactttgtccacgccgagctttccgataagaagggatggcaggagccgcagttcgctggtttcgtgtcctctatcattgagcagggcttccaccctaacggaatggacgaagttcgctctaagttccagtcgctcggcttgcagacgtacgataccttgtccccgcctctgatggatcttattgctacttacaccggcaagaagaatgggaagctgtctgctaacctgtga

SEQ ID NO: 14493 - protein, 629 aa, Aspergillus oryzae
MRHVLNKEQLLMVKQAAIAWAAAEPLSVENVEVAPPKAHEVRIKILHTGVCHTDAYTLSGKDPEGAFPVILGHEGAGIVESVGEGVTNVKVGDYVIALYTPECGECKFCRSGKTNLCGKIRATQGRGVMPDGTTRFKARGKDLLHFMGCSTFSEYTVVADISVVAVTPSCPTDRSCLLGCGITTGYGAATVTANITEGSNVAVFGAGCVGLSIVQGAVKKKAGKIIVVDINDGKEAWAYKFGATHFLNPARLRKTVQDELIDMTDGGCDYTFDCTGNVSVMRAALEACHKGWGESIVIGVAAAGQEITTRPFQLVTGRVWRGCAFGGVKGRSQLPGLVEDYLNGDLKIDEFITHRETLANINTAFEQMKQGDCIRCVVDMVQYNAVEFCKKGIVYLVTLDKHAIEENLGRTSVLRSENGRSPGTGPESTTGLTISKINMPVSLHPLVDNGITKGDANFPGGNLYCLCPQNKVTVAIKGNVAHNHACGCSKCWKPAGALFSVVGVVPKENLSVAANADKLEILDKAAAIQRYACKECGTHLFGRIEIDHPFKGLDFVHAELSDKKGWQEPQFAGFVSSIIEQGFHPNGMDEVRSKFQSLGLQTYDTLSPPLMDLIATYTGKKNGKLSANL

SEQ ID NO: 14494 - DNA, 1128 bp, Aspergillus oryzae
  CDS (1)..(1128)
atggctgatactgttggaaaggctgccgttgcctgggctgccggcgagcccctctccattgaggacatcgaggtcgctccccccaaggctcacgaagtccgcattcaagttcaccacactggtgtctgccacactgacgcctacactctctccggaaaggacccggaaggtgctttccccgtcgtcctcggtcacgagggtgctggtatcgtcgagtctgtcggcgagggcgtcacctccgtgaagcccggcgactatgtcattgctctttacacccccgaatgccgtgagtgcaagttctgcaagtccggcaagaccaacctgtgcggcaagatccgtgccacccagggtaagggtgtgatgcccgacggtacttcccgcttcaaggcccgcggcaaggacctcctccacttcatgggtacctccactttctctcagtacaccgttgtcgccgacatctctgtcgtcgctgtgactcccaagatccccaccgaccgctcctgcttgctgggttgcggtatcaccaccggttacggtgcggccgtcgtcaccgccaaggttgaggagggctcgaacgttgccatcttcggtgccggctgtgtcggtctctccgtcatccagggtgccgtcaagaacaaggccggcaagatcatcgccgtcgacgtcaacgacggcaaggaggcctgggcccgcaagttcggtgccacccacttcgtcaatcccactaagctcaacggcaagactatccaggaggagctgattgagatgaccgatggtggttgcgattacactttcgactgcacgggtaacgtcggcgtcatgcgtgctgccctggaggcttgccacaagggttggggtgagagtatcgtcattggtgttgctgctgctggacaggagatctctaccagaccattccaactcgtcaccggtcgtgtatggaagggttgcgccttcggtggtatcaagggccgtacccaattgcccggcttggttgatgactacctgaataacgagcttaaggttgatgagttcattacccaccgtgaaactctggacaacatcaacgctgccttcgagcagatgcaccacggtgactgtatccgctgcgtcgtggactgccgtcaataa

SEQ ID NO: 14495 - protein, 375 aa, Aspergillus oryzae
MADTVGKAAVAWAAGEPLSIEDIEVAPPKAHEVRIQVHHTGVCHTDAYTLSGKDPEGAFPVVLGHEGAGIVESVGEGVTSVKPGDYVIALYTPECRECKFCKSGKTNLCGKIRATQGKGVMPDGTSRFKARGKDLLHFMGTSTFSQYTVVADISVVAVTPKIPTDRSCLLGCGITTGYGAAVVTAKVEEGSNVAIFGAGCVGLSVIQGAVKNKAGKIIAVDVNDGKEAWARKFGATHFVNPTKLNGKTIQEELIEMTDGGCDYTFDCTGNVGVMRAALEACHKGWGESIVIGVAAAGQEISTRPFQLVTGRVWKGCAFGGIKGRTQLPGLVDDYLNNELKVDEFITHRETLDNINAAFEQMHHGDCIRCVVDCRQ

SEQ ID NO: 14496 - DNA, 1131 bp, Aspergillus oryzae
  CDS (1)..(1131)
atgtcgagtaccgttggtaaagctgctatcgcttgggctgccggcgaaccattctctgttgaggatgttgaagttgcccctccgaaggcccatgaagttcggattaagattatccacacgggtgtttgtcacacggatgcctacactctgtctggtaaagaccccgagggagccttccctgttatcctgggccacgagggctccggtatcgtcgagtccgttggtgagggcgtaaccaccgtcaagcccggcgatcaagtgatcgcgctctataccccagaatgtggcgagtgcaagttctgcaagtctaggaagaccaacctgtgccaaaagatccgtaccacgcagggtaaaggagtgatgcccgacggaacgtctcgcttcagagcacgcggcaaagatatcctgcactacatgggaacgtcgaccttctctcagtataccgttgtggccgatatctcggtcgtggctgttacaacgaaagcaccgacagatcgtgcctgtctgttgggctgtggcattactactggatatggtgctgccaccgtcaccgccaatgtagagcagggatctaatatcgccgtgtttggcgctgggtgtattggtttgtcggtgattgagggcgcggtgaagaacaaagcgggtaagattattgtggttgatgtcaatgatggtaaggagcagtgggcgcgcaaatttggcgcgacgcattttataaaccccaccaaggtcaagaacgggaagactattcaggaggaactgatcgagctcactgatggaggatgtgattataccttcgactgtactggaaatgtgggtgtgatgcgtgctgctcttgaatcctgccataagggctggggtgagagtattattatcggtgttgctgcggctggccaggaaatctccactcggccattccaactagtgaccggccgggtgtggaggggttgcgcattcggtggtatcaagggtcgatctcagctccctggtcttgtcgatgactacgtcgccggctacctcaaggtggatgattacatcactcatcgggagtcactggggaccatcaatactgctttccagcatatgaagagtggtgactgtattcggtgtgtgttggatatgaaagtgtaa

SEQ ID NO: 14497 - protein, 376 aa, Aspergillus oryzae
MSSTVGKAAIAWAAGEPFSVEDVEVAPPKAHEVRIKIIHTGVCHTDAYTLSGKDPEGAFPVILGHEGSGIVESVGEGVTTVKPGDQVIALYTPECGECKFCKSRKTNLCQKIRTTQGKGVMPDGTSRFRARGKDILHYMGTSTFSQYTVVADISVVAVTTKAPTDRACLLGCGITTGYGAATVTANVEQGSNIAVFGAGCIGLSVIEGAVKNKAGKIIVVDVNDGKEQWARKFGATHFINPTKVKNGKTIQEELIELTDGGCDYTFDCTGNVGVMRAALESCHKGWGESIIIGVAAAGQEISTRPFQLVTGRVWRGCAFGGIKGRSQLPGLVDDYVAGYLKVDDYITHRESLGTINTAFQHMKSGDCIRCVLDMKV

SEQ ID NO: 14498 - DNA, 1302 bp, Lactuca sativa
  CDS (7)..(1149)
tattaaatgtcgagcactactaaccaggtgattcgatgcaaagcggcggtagcatgggaagccggaaagccactagtgattgaagaagtggaggtggcgccaccccaaaaaatggaagttcgaatcaaaatactcttcacctccctgtgccacaccgatgtttacttttgggaagccaagggtcagaatcccgtgtttccccgaattttaggacatgaagctggaggggttgtggagagtgtcggggaaggagtgactgagcttcagcccggagatcatgtcctccctgttttcaccggagaatgcaaagaatgcgctcactgtaagtcggaagagagcaacatgtgtgaccttttgagaatcaacaccgacaggggagtcatgattcacgatcaaaaatcccgattttccatcaacggaaaacccattttccatttcgtcggaacttcaactttcagtgaatacaccgtcgttcatgttggttgtctcgccaaaatcaaccctcttgctcctcttgacaaagtctgtgtcctcagttgtgggatctccacaggtcttggtgctactctgaacgttgcaaagcctaaaaaaggctcatctgtcgccatttttggattgggagctgtggggcttgctgctgctgaaggtgcaagaattgcaggtgcttcaaggatcattggtgttgatctcaatgccaacagatttgagcttgcaaagaaatttggagtgactgagtttgtgaaccctaaagactacaaaaaaccagtacaggaagtgattgcagagatgacaaatggaggagttgacaggagtgttgaatgcactggtcatattgatgctatgatatctgccttcgaatgtgttcatgatggttggggtgttgctgttcttgtgggtgttccacataaagatgctgttttcaagacaagtccattgaatctgttgaacgaaaggactctgaagggaactttttttggaaactataaacctcgatcagatattccttctgtggttgaaaagtatatgaataaggaacttgagttggagaagttcattacacatgaattgccattttctgagataaataaggcttttgatttgatgctcaaaggtgaaggtctccgatgcataattcggatgggtgaataaatgtagaggaaagtttttaaaaatgttgtataatagtagctcatatttcatatgataacacatcaagtgtcttctttgatcttattatgtacgcagtgtttctgtgttgggatcctgactttgagtttatatattccaatgattattagttcc

SEQ ID NO: 14499 - protein, 380 aa, Lactuca sativa
MSSTTNQVIRCKAAVAWEAGKPLVIEEVEVAPPQKMEVRIKILFTSLCHTDVYFWEAKGQNPVFPRILGHEAGGVVESVGEGVTELQPGDHVLPVFTGECKECAHCKSEESNMCDLLRINTDRGVMIHDQKSRFSINGKPIFHFVGTSTFSEYTVVHVGCLAKINPLAPLDKVCVLSCGISTGLGATLNVAKPKKGSSVAIFGLGAVGLAAAEGARIAGASRIIGVDLNANRFELAKKFGVTEFVNPKDYKKPVQEVIAEMTNGGVDRSVECTGHIDAMISAFECVHDGWGVAVLVGVPHKDAVFKTSPLNLLNERTLKGTFFGNYKPRSDIPSVVEKYMNKELELEKFITHELPFSEINKAFDLMLKGEGLRCIIRMGE

SEQ ID NO: 14500 - DNA, 1170 bp, Solanum lycopersicum
  CDS (1)..(1170)
atggcctcaacaaaacaatatttttctgctgctggtaagcctattcgttgcaaagctgcagtggcaagaaaagcaggagaaccactggtgatagaggaagtgattgtggctcctcctaaagcacatgaagttcgcgtcaaaatcatttgcacttctctctgtcataccgacattaccttatggaagttgaaagaatttcctggctgctttccaagaatcttaggccatgaagctttcggggtggtggagagtgttggagaagatgttgatgagttgaaagaaggagattcagttgtaccgatatttttgcctgactgtatggactgtgtagactgtaaatccaagaaaagcaacctttgttccaaattcccaattcaagtgtctccgttgctgcatagaaatgatacaagcagattctctaatgctgcaggagaaactttacatcatttcttgtatatatcaagtttctccgagtacacagttgttgatgttgttaacgtaacaaagattgatcctgaaatcccacctaacagggcgtgtcttttgagttgtggcgtatcaacaggagtaggtgctgcctggaaaacagcaaatgtggaaccaggttcgacagtagtcatcttcggtttaggatcaattggattagcagttgcagagggagcaaggctatgtggagctaccaggattatcggtgttgatataaactctaacaagtttgaaatagggaagcaatttggaattactgaatttgtcaattccaaaagctgtgtggataaacctattagtcaggtaataatcgagatgactgatggcggtgctgactattgcttcgaatgtgttggtctagcaacacttgtgcaagaagcatttacctgctgcagaaagggttggggtaaaacagttgttttaggagttgataagccagatgcacatctaaatctcaactcttttgaggttcttcagagtcagaaaactctcactggagcactctttggtggtcttaaacccaaatctgatgttcctatactcgttaaacgttaccttgacaaggaactgcagttgaacaagtttgtgacacatgaagtgaattttgaagatatcaataaggcgttcgatttactcattcaaggaaagagcctacgctgtgttatttggatggacaagttatag

SEQ ID NO: 14501 - protein, 389 aa, Solanum lycopersicum
MASTKQYFSAAGKPIRCKAAVARKAGEPLVIEEVIVAPPKAHEVRVKIICTSLCHTDITLWKLKEFPGCFPRILGHEAFGVVESVGEDVDELKEGDSVVPIFLPDCMDCVDCKSKKSNLCSKFPIQVSPLLHRNDTSRFSNAAGETLHHFLYISSFSEYTVVDVVNVTKIDPEIPPNRACLLSCGVSTGVGAAWKTANVEPGSTVVIFGLGSIGLAVAEGARLCGATRIIGVDINSNKFEIGKQFGITEFVNSKSCVDKPISQVIIEMTDGGADYCFECVGLATLVQEAFTCCRKGWGKTVVLGVDKPDAHLNLNSFEVLQSQKTLTGALFGGLKPKSDVPILVKRYLDKELQLNKFVTHEVNFEDINKAFDLLIQGKSLRCVIWMDKL

SEQ ID NO: 14502 - DNA, 1399 bp, Phaseolus acutifolius
  CDS (3)..(1145)
acatgtcgagcacagctggtcaggtcatcaaatgcaaagccgcggtggcatgggaggcagggaagccactggtgatggaggaagtagaggtggcaccaccaaaggctggtgaagtgcgtttgaagatcctctacacctctctttgccacactgatgtttacttctgggaagccaagggccagactccattgtttcctcgtatatttggtcatgaggctggagggattgtggagagcgtaggtgagggtgtgactcatctgaaacccggggaccacgcccttcctgtgtttactggggagtgtggggagtgtgcacattgtaagtcagaagagagcaacatgtgtgatttgctgaggatcaacactgatcggggtgtcatgatccatgatagtcaaacaagattttctataaagggacaacctatttaccattttgttggtacctctacattcagtgaatacactgtggttcatgctggatgtgttgccaaagtcaaccctgctgccccacttgataaaatttgtgttctcagttgtggaatatgcacaggtcttggggctactgtcaatgttgcaaaaccgaaacctggttcttctgttgctatttttggacttggagctgttggccttgctgctgctgaaggggcaaggatttctggtgcatcaagaatcattggggttgatttagtttcaagccgatttgaagaagctaagaagtttggggtcaatgaatttgtgaacccaaaagaccatgacaaacctgtacaagaggtaattgctgaaatgacaaatgggggtgtggatcgtgctgttgaatgtactggcagcatccaggctatgatctcagcattcgaatgtgttcatgatggttggggtgttgctgtacttgttggagtgccaaacaaagatgatgcattcaaaactcatccagtgaattttttgaacgagaggactcttaagggtaccttctatggaaactacaaacctcgcactgatcttcctttagttgtggagcagtacatgaatggggaattggaactggacaaattcatcactcacaccgttccattctcagaaattaacaaagcttttgattacatgctgaaaggggagtccatcagatgcattattcgtatgggagagtagaactatgaaataaatgatgacatagttcctgtggagggactttgttctctttctggttaagaaaagaagaaaataaatattatgcataattaatctcttcaggatgattgaatctgtgagaatttgtccatgtttgaatgtagagaacgatttgtgttatgtggatgagttgctcttgtggtaatttgattgagatttctttcttgaggaaagaaatatatgtgtcaatctataaaaagctgaatacattgttt

SEQ ID NO: 14503 - protein, 380 aa, Phaseolus acutifolius
MSSTAGQVIKCKAAVAWEAGKPLVMEEVEVAPPKAGEVRLKILYTSLCHTDVYFWEAKGQTPLFPRIFGHEAGGIVESVGEGVTHLKPGDHALPVFTGECGECAHCKSEESNMCDLLRINTDRGVMIHDSQTRFSIKGQPIYHFVGTSTFSEYTVVHAGCVAKVNPAAPLDKICVLSCGICTGLGATVNVAKPKPGSSVAIFGLGAVGLAAAEGARISGASRIIGVDLVSSRFEEAKKFGVNEFVNPKDHDKPVQEVIAEMTNGGVDRAVECTGSIQAMISAFECVHDGWGVAVLVGVPNKDDAFKTHPVNFLNERTLKGTFYGNYKPRTDLPLVVEQYMNGELELDKFITHTVPFSEINKAFDYMLKGESIRCIIRMGE

SEQ ID NO: 14504 - DNA, 1140 bp, Zea mays
  CDS (1)..(1140)
atggcgaccgcggggaaggtgatcaagtgcaaagctgcggtggcatgggaggccggcaagccactgtcgatcgaggaggtggaggtagcgcctccgcaggccatggaggtgcgcgtcaagatcctcttcacctcgctctgccacaccgacgtctacttctgggaggccaaggggcagactcccgtgttccctcggatctttggccacgaggctggaggtatcatagagagtgttggagagggtgtgactgacgtagctccgggcgaccatgtccttcctgtgttcactggggagtgcaaggagtgtgcccactgcaagtcggcagagagcaacatgtgtgatctgctcaggatcaacaccgaccgcggtgtgatgattgccgatggcaagtcgcggttttcaatcaatgggaagcctatctaccactttgttgggacttccaccttcagcgagtacaccgtcatgcatgtgggttgtgttgcaaagatcaaccctcaggctccccttgataaagtttgcgtccttagctgtggtatttctaccggtcttggtgcatcaattaatgttgcaaaacctccgaagggttcgacagtggctgttttcggtttaggagccgttggtcttgccgctgcagaaggtgcaaggattgctggagcgtcaaggatcattggtgtcgacctgaaccccagcagattcgaagaagctaggaagttcggttgcactgaatttgtgaacccaaaagaccacaacaagccagtgcaggaggtacttgctgagatgaccaacggaggggtcgaccgcagtgtggaatgcactggcaacattaatgctatgatccaagctttcgaatgtgttcatgatggctggggtgttgctgtgctggtgggtgtgccacataaggacgctgagttcaagacccacccgatgaacttcctgaacgaaaggaccctgaaggggaccttctttggcaactataagccacgcactgatctgccaaatgtggtggagctgtacatgaaaaaggagctggaggtggagaagttcatcacgcacagcgtcccgttcgccgagatcaacaaggcgttcgacctgatggccaagggggagggcatccgctgcatcatccgcatggagaactag

SEQ ID NO: 14505 - protein, 379 aa, Zea mays
MATAGKVIKCKAAVAWEAGKPLSIEEVEVAPPQAMEVRVKILFTSLCHTDVYFWEAKGQTPVFPRIFGHEAGGIIESVGEGVTDVAPGDHVLPVFTGECKECAHCKSAESNMCDLLRINTDRGVMIADGKSRFSINGKPIYHFVGTSTFSEYTVMHVGCVAKINPQAPLDKVCVLSCGISTGLGASINVAKPPKGSTVAVFGLGAVGLAAAEGARIAGASRIIGVDLNPSRFEEARKFGCTEFVNPKDHNKPVQEVLAEMTNGGVDRSVECTGNINAMIQAFECVHDGWGVAVLVGVPHKDAEFKTHPMNFLNERTLKGTFFGNYKPRTDLPNVVELYMKKELEVEKFITHSVPFAEINKAFDLMAKGEGIRCIIRMEN

SEQ ID NO: 14506 - DNA, 1355 bp, Vitis vinifera
  CDS (40)..(1182)
gactgaggagcaccatatctttggagtatctaagaaaatatgtcaggcactgctggtcaagtcatctgctgcaaagctgctgtggcatgggaagcagggaagccattagtgatagaagaagtggaggtggcacccccacaggccatggaggtccgtctcaagatcctctacacctccctatgtcacactgatgtctacttttgggaagccaagggacagacccctttgttccctcgaattttcggtcatgaagcaggagggattgtggagagtgttggggagggtgtgacagatctcaaaccaggagaccatgtgctcccaatattcaccggagagtgcaaggactgtgctcactgcaaatcagaagaaagcaacctgtgtgacctcctcaggataaacactgacagaggggtgatgatccatgatggaaaatcaagattcaccattaagggcaaacccatataccattttttgggaacttccacctttagtgagtacaccgtcgttcacgttggctgtgttgctaagatcaatcccttggcccctcttgacaaagtctgtgtcctcagttgtggcatctccacaggcctcggtgccactctcaatgtggcaaaaccgaccaagggctcaaccgtagccgtctttggactgggagctgtaggccttgctgctgcagaaggggctaggattgctggcgcttcgaggattattggggttgatttgaatccaaaaagatacgaaggggccaagaagtttggtgtgaccgactttgtgaacccaaaagaccatgagaaatcagttcaagaggttattgtggagatgaccggtggaggcgtcgacagaagcctcgaatgcactggaaatgtcaatgccatgatttctgcattcgaatgtgttcatgatggttggggtgttgcagtaattgtgggggtaccaaacaaagatgatgtcttcaagacccaccccatcaacctgttgaatgaaagaactctcaagggaaccttctttgggaactacaagccccgttctgatattccggctgtggtggaaaaatacatgaacaaggagcttgaggtggaaaaattcatcacccattcagttccgttctcagagatcaacaaggcctttgaatacatgctaaaaggggaaggccttcgatgcatcatccatatggagccatagaatatcttgagatgagagagtctaattgaataaaactaaggtgatcttgggtgactttcatattagaaggtttggttttagccggtgaaagagagcatctgtctggttgttactatgaaaataactatggttaataaaggaggtcaaaactcattccccttggctttaaaaaa

SEQ ID NO: 14507 - protein, 380 aa, Vitis vinifera
MSGTAGQVICCKAAVAWEAGKPLVIEEVEVAPPQAMEVRLKILYTSLCHTDVYFWEAKGQTPLFPRIFGHEAGGIVESVGEGVTDLKPGDHVLPIFTGECKDCAHCKSEESNLCDLLRINTDRGVMIHDGKSRFTIKGKPIYHFLGTSTFSEYTVVHVGCVAKINPLAPLDKVCVLSCGISTGLGATLNVAKPTKGSTVAVFGLGAVGLAAAEGARIAGASRIIGVDLNPKRYEGAKKFGVTDFVNPKDHEKSVQEVIVEMTGGGVDRSLECTGNVNAMISAFECVHDGWGVAVIVGVPNKDDVFKTHPINLLNERTLKGTFFGNYKPRSDIPAVVEKYMNKELEVEKFITHSVPFSEINKAFEYMLKGEGLRCIIHMEP

SEQ ID NO: 14508 - DNA, 1390 bp, Alnus glutinosa
  CDS (21)..(1163)
catcatcgtctgagatagccatgtcgagcacagccggtcaggttattaagtgcaaagccgcggtggcatgggaggctgggaagccattggtgattgaagaagtggaggtggcaccacctcaggcaaacgaagtccgcgtgaagatcctcttcacctccctttgccacactgatgtttacttctgggaagccaaggggcagacgccattgtttcctcgcatatttggtcatgaagctggaggaattgtggagagtgtaggcgagggcgtaaccgatctcaaactaggggaccatgttctccctgtcttcactggggagtgcaaggagtgtcgccactgtaagtcggaggagagcaacatgtgtgacctcctcaggattaatactgacagaggcgttatgcttaatgatggcaagacgaggttctccataaatggaaagcctatttaccactttgttggcacctccacatttagtgaatacactgttatccatgtcggctgcctcgcgaagatcaaccctgccgccccattagacaaagtttgtgttcttagttgcggaatatccacaggtcttggtgccactttgaatgttgcaaaacccaaaaagggtcaatctgtagccgtctttggattgggtgctgttggccttgctgctgctgaaggggcaagaattgctggggcttcaagaatcattggtgttgatctgaaccctgctcgtttcgaggaagccaagaagtttggtgtcaccgaatttgtgaatccaaaagatcatgacaagcctgttcaagaggtgcttgctgagatgaccgacggtggagtggatcgggctgttgaatgtactggaagcatccaggccatgatctcagcatttgaatgcgttcatgatggttggggtgttgcagtacttgttggagtaccaagtaaagatgatgcattcaagactcatcctatgaacttgttgaatgagaggactctgaagggtaccttctttggaaactacaagccccgcactgatattcctggggtcgtggaaaagtacatgaacaaggagctggaactggagaaatttatcactcactcagtccctttctcggagatcaacaaagcctttgacctcatgcttcatgggaagtctatccgctgcattatcaccatgggtgcttaaatcactagggagattgtgcaattatgggaagagcaatttggatcctctccatttgaaatgtaattctctccatttgaagggaagagggcttttctttttggcgtgatggggacttttaataaaagattttgtagtgtggtttatgatttttgcagagagaacaagcagttttatgtataaatgaaatttcacatatgtttgccgttgcctttttcaataatattttc

SEQ ID NO: 14509 - protein, 380 aa, Alnus glutinosa
MSSTAGQVIKCKAAVAWEAGKPLVIEEVEVAPPQANEVRVKILFTSLCHTDVYFWEAKGQTPLFPRIFGHEAGGIVESVGEGVTDLKLGDHVLPVFTGECKECRHCKSEESNMCDLLRINTDRGVMLNDGKTRFSINGKPIYHFVGTSTFSEYTVIHVGCLAKINPAAPLDKVCVLSCGISTGLGATLNVAKPKKGQSVAVFGLGAVGLAAAEGARIAGASRIIGVDLNPARFEEAKKFGVTEFVNPKDHDKPVQEVLAEMTDGGVDRAVECTGSIQAMISAFECVHDGWGVAVLVGVPSKDDAFKTHPMNLLNERTLKGTFFGNYKPRTDIPGVVEKYMNKELELEKFITHSVPFSEINKAFDLMLHGKSIRCIITMGA

SEQ ID NO: 14510 - DNA, 1380 bp, Citrus paradisi
  CDS (61)..(1203)
attcggcacgagacactgctaattttacaggtgttgagagtatcatcattcatcatcaatatgtctggcacagctggtcaagttattcgctgcaaagcggcggtggcatgggaggcggggaagccactagtgattgaagaagtggaggtggctccaccacagaaaaatgaagttcgattgaagatcctcttcacctctttatgccacactgatgtttacttctgggaagccaagggacagaaccctctctttcctcgcatttttggtcatgaagctggagggattgtggagagtgtaggggagggggtaactgatctccaaccaggagaccatgttcttcctgtattcacaggagagtgcaaggaatgtcctcactgtcattcagaggaaagcaatatgtgtgacctcctccggatcaatactgacaggggtgttatgattaatgatggtcagtcaaggttctcgattaaggggaagccaatttaccattttgtgggcacttctaccttcagtgaatacactgttacccacgtcggttgtgttgctaagatcaatccgttggctcctcttgacaaagtttgtgtactcagctgcggaatctccacaggttttggggctactgttaatgttgccaaacctgaagaagggccaactgttgccatttttggattgggtgcagttggccttgctgctgccgaaggggcaagagtatcaggggcttccaggatcattggtgttgatttgaacccaagcagattcaatgaagccaagaagtttggggttaccgagtttgtgaatccaaaagattatgacaaacctgttcaacaggtgattgctgaaatgaccaatggtggagtggatagaagtgttgaatgtactggaagcgtccaggccatgatctcagcatttgaatgtgtccacgatggctggggtgtggctgttcttgtgggcgttcctcacaaagatgctgtgttcaagacgcaccccatgaatttgttgaatgaaagaactcttaagggcaccttctttggaaactacaagcctcgttctgaccttccttcggttgtagaaaaatatatgagcaaggagcttgaagtggaaaaattcattacccatacagtcccattctccgaaatcaacaaggcctttgagtacatgcttagaggagaaggtctccgatgcatcatccggatggaagagtagtttgtgtagataaataattcaaagtggtcagtgtcattgtcatgttcaaaattttaatatttgcaaagatgtctttataagtattgttgttttgtggtcataatgtaaaacgttatttttctagtgcctttccgttgtatacttgtttgcgaatttaaaaaaaaaaaaaaaaaaaaa

SEQ ID NO: 14511 - protein, 380 aa, Citrus paradisi
MSGTAGQVIRCKAAVAWEAGKPLVIEEVEVAPPQKNEVRLKILFTSLCHTDVYFWEAKGQNPLFPRIFGHEAGGIVESVGEGVTDLQPGDHVLPVFTGECKECPHCHSEESNMCDLLRINTDRGVMINDGQSRFSIKGKPIYHFVGTSTFSEYTVTHVGCVAKINPLAPLDKVCVLSCGISTGFGATVNVAKPEEGPTVAIFGLGAVGLAAAEGARVSGASRIIGVDLNPSRFNEAKKFGVTEFVNPKDYDKPVQQVIAEMTNGGVDRSVECTGSVQAMISAFECVHDGWGVAVLVGVPHKDAVFKTHPMNLLNERTLKGTFFGNYKPRSDLPSVVEKYMSKELEVEKFITHTVPFSEINKAFEYMLRGEGLRCIIRMEE

SEQ ID NO: 14512 - DNA, 1140 bp, Oryza meridionalis
  CDS (1)..(1140)
atggcgactgccgggaaggtgatcaagtgcaaagcggcggtggcatgggaggccgggaagccgctgtcgatcgaggaggtggaggttgcgccgccgcaggccatggaggtccgcgtcaagatcctctacaccgccctctgccacaccgacgtctacttctgggaggccaaggggcaaaccccggttttccctaggatcttgggccatgaagctggaggcattgtggagagtgtgggagagggtgtgaccgaactcgcgccgggcgaccatgtcctcccggtgttcaccggcgagtgcaaggagtgtgatcactgcaaatcggaggagagcaacatgtgtgacctcctcaggatcaacgtcgaccgcggcgtcatgatcggcgacggcaagtcccggttcaccatcaaggggaaacccatcttccactttgttggcacatccaccttcagtgagtacaccgtcatccatgtcggctgcctcgcgaagatcaacccggaggcgcctctcgacaaggtctgcattctcagctgcggtttctctaccggttttggtgcaacagtgaatgtcgcgaaaccgaaaaagggccagaccgtggctattttcggtctcggagctgttggccttgctgctatggagggtgccaggctgtctggagcatcgaggatcattggtgtggacctgaaccctgcgaaattcgaacaagctaagaagtttggctgcactgacttcgtaaaccccaaggaccacagcaagccagtgcacgaggtgctgattgagatgaccaacggtggactcgacagggccgttgaatgcacgggcaacatcaacgccatgatatcctgcttcgaatgtgtccatgatggatggggcgttgcggtgctggtcggcgtgccgaccaaggatgatgtgttcaagacccacccgatgaacttcctcaacgagaagacgctcaaggggacgttcttcggtaactacaagccgcgcaccgacctgcccaacgtcgtcgagctgtacatgaagaaggagctggagctggagaagttcatcacccacaccgttccgttctcggagatcaacacggcgttcgatctcatgctcaagggggagagtctccgctgcgtcatgaggatggatgagtag

SEQ ID NO: 14513 - protein, 379 aa, Oryza meridionalis
MATAGKVIKCKAAVAWEAGKPLSIEEVEVAPPQAMEVRVKILYTALCHTDVYFWEAKGQTPVFPRILGHEAGGIVESVGEGVTELAPGDHVLPVFTGECKECDHCKSEESNMCDLLRINVDRGVMIGDGKSRFTIKGKPIFHFVGTSTFSEYTVIHVGCLAKINPEAPLDKVCILSCGFSTGFGATVNVAKPKKGQTVAIFGLGAVGLAAMEGARLSGASRIIGVDLNPAKFEQAKKFGCTDFVNPKDHSKPVHEVLIEMTNGGLDRAVECTGNINAMISCFECVHDGWGVAVLVGVPTKDDVFKTHPMNFLNEKTLKGTFFGNYKPRTDLPNVVELYMKKELELEKFITHTVPFSEINTAFDLMLKGESLRCVMRMDE

SEQ ID NO: 14514 - DNA, 1140 bp, Oryza barthii
  CDS (1)..(1140)
atggcgacagctgggaaggtgatcaagtgcaaagcggcggtggcatgggaggcagggaagccgctgtcgatcgaggaggtggaggttgcgccgccgcaggccatggaggtccgcgtcaagatcctctacaccgccctctgccacaccgacgtctacttctgggaggccaaggggcaaacacctgttttccctaggatcttgggccatgaagctggaggcattgtggagagtgtgggagagggtgtgaccgaactcgcgccgggcgaccatgtcctcccgctgttcaccggcgagtgcaaggagtgtgatcactgcaaatcggaggagagcaacatgtgtgacctcctcaggatcaacgtcgaccgcggcgtcatgatcggcgacggcaagtctcggttcaccatcaaggggaagcccatcttccactttgttggcacatccaccttcagcgagtacaccgtcatccatgtcggctgcctcgcgaagatcaacccggaggcgcctctcgacaaggtctgcattctcagctgcggtttctctaccggttttggtgcaacagtgaatgtcgcgaaaccgaaaaagggccagaccgtggctattttcggtctcggagctgttggccttgctgctatggaaggtgccaggctgtctggagcatcgaggatcattggtgtggacctgaaccctgcgaaattcgaacaagctaagaagtttggctgcactgacttcgtaaaccccaaggaccacagcaagccagtgcacgaggtgctgattgagatgaccaacggtggactcgacagggccgttgaatgcacgggcaacatcaacgccatgatatcctgcttcgaatgtgtccatgatggatggggcgttgcggtgctggtcggcgtgccgaccaaggatgatgtgttcaagacccacccgatgaacttcctcaacgagaagacgctcaaggggacgttctttggtaactacaagccgcgcaccgacctgcccaacgtcgtcgagctgtacatgaagaaggagctggagctggagaagttcatcacccacaccgttccgttctcggagatcaacacggcgttcgatctcatgctcaagggggagagtctccgctgcgtcatgaggatggatgagtag

SEQ ID NO: 14515 - protein, 379 aa, Oryza barthii
MATAGKVIKCKAAVAWEAGKPLSIEEVEVAPPQAMEVRVKILYTALCHTDVYFWEAKGQTPVFPRILGHEAGGIVESVGEGVTELAPGDHVLPLFTGECKECDHCKSEESNMCDLLRINVDRGVMIGDGKSRFTIKGKPIFHFVGTSTFSEYTVIHVGCLAKINPEAPLDKVCILSCGFSTGFGATVNVAKPKKGQTVAIFGLGAVGLAAMEGARLSGASRIIGVDLNPAKFEQAKKFGCTDFVNPKDHSKPVHEVLIEMTNGGLDRAVECTGNINAMISCFECVHDGWGVAVLVGVPTKDDVFKTHPMNFLNEKTLKGTFFGNYKPRTDLPNVVELYMKKELELEKFITHTVPFSEINTAFDLMLKGESLRCVMRMDE

SEQ ID NO: 14516 - DNA, 1140 bp, Oryza glumipatula
  CDS (1)..(1140)
atggcgacagccgggaaggtgatcaagtgcaaagcggcggtggcatgggaggccgggaagccgctgtcgatcgaggaggtggaggttgcgccgccgcaggccatggaggtccgcgtcaagatcctctacaccgccctctgccacaccgacgtctacttctgggaggccaaggggcaaacacctgttttccctaggatcttgggccatgaagctggaggcattgtggagagtgtgggagagggtgtgaccgaactcgcgccgggcgaccatgtcctcccggtgttcaccggcgagtgcaaggagtgtgatcactgcaaatcggaggagagcaacatgtgtgacctcctcaggatcaacgtcgaccgcggcgtcatgatcggcgacggcaagtcccgattcaccatcaaggggaagcccatcttccactttgttggcacatccaccttcagcgagtacaccgtcatccatgtcggctgcctcgcgaagatcaacccggaggcgcctctcgacaaggtctgcattctcagctgcggtttctctaccggttttggtgcaacagtgaatgtcgcgaaaccgaaaaagggccagaccgtggctattttcggtcttggagctgttggtcttgctgctatggaaggtgccaggctgtctggagcatcgaggatcattggtgtggacctgagccctgcgaaattcgaacaagctaagaagtttggctgcactgacttcgtaaaccccaaggaccacagcaagccagtgcacgaggtgctgattgagatgaccaacggtggactcgacagggccgttgaatgcacgggcaacatcaacgccatgatatcctgcttcgaatgtgtccatgatggatggggcgttgcggtgctggtcggcgtgccgaccaaggatgatgtgttcaagacccacccgatgaacttcctcaacgagaagacgctcaaggggacgttcttcggtaactacaagccgcgcaccgacctgcccaacgtcgtcgagctgtacatgaagaaggagctggagctggagaagttcatcacgcacagcgtgccgttctcggagatcaacacggcgttcgatctcatgctcaagggggagagtctccgctgcgtcatgaggatggatgagtag

SEQ ID NO: 14517 - protein, 379 aa, Oryza glumipatula
MATAGKVIKCKAAVAWEAGKPLSIEEVEVAPPQAMEVRVKILYTALCHTDVYFWEAKGQTPVFPRILGHEAGGIVESVGEGVTELAPGDHVLPVFTGECKECDHCKSEESNMCDLLRINVDRGVMIGDGKSRFTIKGKPIFHFVGTSTFSEYTVIHVGCLAKINPEAPLDKVCILSCGFSTGFGATVNVAKPKKGQTVAIFGLGAVGLAAMEGARLSGASRIIGVDLSPAKFEQAKKFGCTDFVNPKDHSKPVHEVLIEMTNGGLDRAVECTGNINAMISCFECVHDGWGVAVLVGVPTKDDVFKTHPMNFLNEKTLKGTFFGNYKPRTDLPNVVELYMKKELELEKFITHSVPFSEINTAFDLMLKGESLRCVMRMDE

SEQ ID NO: 14518 - DNA, 1140 bp, Oryza sativa
  CDS (1)..(1140)
atggcgacagccgggaaggtgatcaagtgcaaagcggcggtggcatgggaggccgggaagccgctgtcgatcgaggaggtggaggttgcgccgccgcaggccatggaggtccgcgtcaagatcctctacaccgccctctgccacaccgacgtctacttctgggaggccaaggggcaaacacctgttttccctaggatcttgggccatgaagctggaggcattgtggagagtgtgggagagggtgtgaccgaactcgcgccgggcgaccatgtcctcccggtgttcaccggcgagtgcaaggagtgtgatcactgcaaatcggaggagagcaacatgtgtgacctcctcaggatcaacgtcgaccgcggcgtcatgatcggcgacggcaagtcccgattcaccatcaaggggaagcccatcttccactttgttggcacatccaccttcagcgagtacaccgtcatccatgtcggctgcctcgcgaagatcaacccggaggcgcctctcgacaaggtctgcattctcggctgcggtttctctaccggttttggtgcaacagtgaatgtcgcgaaaccgaaaaagggccagaccgtggctattttcggtcttggagctgttggtcttgctgctatggaaggtgccaggctgtctggagcatcgaggatcattggtgtggacctgaaccctgcgaaattcgaacaagctaagaagtttggctgcactgacttcgtaaaccccaaggaccacagcaagccagtgcacgaggtgctgattgagatgaccaacggtggactcgacagggccgttgaatgcacgggcaacatcaacgccatgatatcctgcttcgaatgtgtccatgatggatggggcgttgcggtgctggtcggcgtgccgaccaaggatgatgtgttcaagacccacccgatgaacttcctcaacgagaagacgctgaaggggacgttcttcggtaactacaagccgcgcaccgacctgcccaacgtcgtcgagctgtacatgaagaaggagctggagctggagaagttcatcacgcacagcgtgccgttctcggagatcaacacggcgttcgatctcatgctcaagggggagagtctccgctgcgtcatgaggatggatgagtag

SEQ ID NO: 14519 - protein, 379 aa, Oryza sativa
MATAGKVIKCKAAVAWEAGKPLSIEEVEVAPPQAMEVRVKILYTALCHTDVYFWEAKGQTPVFPRILGHEAGGIVESVGEGVTELAPGDHVLPVFTGECKECDHCKSEESNMCDLLRINVDRGVMIGDGKSRFTIKGKPIFHFVGTSTFSEYTVIHVGCLAKINPEAPLDKVCILGCGFSTGFGATVNVAKPKKGQTVAIFGLGAVGLAAMEGARLSGASRIIGVDLNPAKFEQAKKFGCTDFVNPKDHSKPVHEVLIEMTNGGLDRAVECTGNINAMISCFECVHDGWGVAVLVGVPTKDDVFKTHPMNFLNEKTLKGTFFGNYKPRTDLPNVVELYMKKELELEKFITHSVPFSEINTAFDLMLKGESLRCVMRMDE

SEQ ID NO: 14520 - DNA, 1140 bp, Oryza rufipogon
  CDS (1)..(1140)
atggcgaccgctgggaaggtgatcaagtgcaaagcggcggtggcatgggaggcagggaagccgctgtcgatcgaggaggtggaggttgcgccgccgcaggccatggaggtccgcgtcaagatcctctacaccgccctctgccacaccgacgtctacttctgggaggccaaggggcaaacacctgttttccctaggatcttgggccatgaagctggaggcattgtggagagtgtgggagagggtgtgaccgaactcgcgccgggcgaccatgtcctcccgctgttcaccggcgagtgcaaggagtgtgatcactgcaaatcggaggagagcaacatgtgtgacctcctcaggatcaacgtcgaccgcggcgtcatgatcggcgacggcaagtcccggttcaccatcaaggggaagcccatcttccactttgttggcacatccaccttcagcgagtacaccgtcatccatgtcggctgcctcgcgaagatcaacccggaggcgcctctcgacaaggtctgcattctcagctgcggtttctctaccggttttggtgcaacagtgaatgtcgcgaaaccgaaaaagggccagaccgtggctattttcggtcttggagctgttggtcttgctgctatggaaggtgccaggctgtctggagcatcgaggatcattggtgtggacctgaaccctgcgaaattcgaacaagctaagaagtttggccgcactgacttcgtaaaccccaaggaccacagcaagccagtgcacgaggtgctgattgagatgaccaacggtggactcgacagggccgttgaatgcacgggcaacatcaacgccatgatatcctgcttcgaatgtgtccatgatggatggggcgttgcggtgctggtcggcgtgccgaccaaggatgatgtgttcaagacccacccgatgaacttcctcaacgagaagacgctcaaggggacgttcttcggtaactacaagccgcgcaccgacctgcccaacgtcgtcgagctgtacatgaagaaggagctggagctggagaagttcatcacgcacagcgtgccgttctcggagatcaacacggcgttcgatctcatgctcaagggggagagtctccgctgcgtcatgaggatggatgagtag

SEQ ID NO: 14521 - protein, 379 aa, Oryza rufipogon
MATAGKVIKCKAAVAWEAGKPLSIEEVEVAPPQAMEVRVKILYTALCHTDVYFWEAKGQTPVFPRILGHEAGGIVESVGEGVTELAPGDHVLPLFTGECKECDHCKSEESNMCDLLRINVDRGVMIGDGKSRFTIKGKPIFHFVGTSTFSEYTVIHVGCLAKINPEAPLDKVCILSCGFSTGFGATVNVAKPKKGQTVAIFGLGAVGLAAMEGARLSGASRIIGVDLNPAKFEQAKKFGRTDFVNPKDHSKPVHEVLIEMTNGGLDRAVECTGNINAMISCFECVHDGWGVAVLVGVPTKDDVFKTHPMNFLNEKTLKGTFFGNYKPRTDLPNVVELYMKKELELEKFITHSVPFSEINTAFDLMLKGESLRCVMRMDE

SEQ ID NO: 14522 - DNA, 1140 bp, Oryza rufipogon
  CDS (1)..(1140)
atggcgaccgctgggaaggtgatcaagtgcaaagcggcggtggcatgggaggcagggaagccgctgtcgatcgaggaggtggaggttgcgccgccgcaggccatggaggtccgcgtcaagatcctctacaccgccctctgccacaccgacgtctacttctgggaggccaaggggcaaacacctgttttccctaggatcttgggccatgaagctggaggcattgtggagagtgtgggagagggtgtgaccgaacacgcgccgggcgaccatgtcctcccgctgttcaccggcgagtgcaaggagtgtgatcactgcaaatcggaggagagcaacatgtgtgacctcctcaggatcaacgtcgaccgcggcgtcatgatcggcgacggcaagtcccggttcaccatcaaggggaagcccatcttccactttgttggcacatccaccttcagcgagtacaccgtcatccatgtcggctgcctcgcgaagatcaacccggaggcgcctctcgacaaggtctgcattctcagctgcggtttctctaccggttttggtgcaacagtgaatgtcgcgaaaccgaaaaagggccagaccgtggctattttcggtcttggagctgttggtcttgctgctatggaaggtgccaggctgtctggagcatcgaggatcattggtgtggacctgaaccctgcgaaattcgaacaagctaagaagtttggctgcactgacttcgtaaaccccaaggaccacagcaagccagtgcacgaggtgctgattgagatgaccaacggtggactcgacagggccgttgaatgcacgggcaacatcaacgccatgatatcctgcttcgaatgtgtccatgatggatggggcgttgcggtgctggtcggcgtgccgaccaaggatgatgtgttcaagacccacccgatgaacttcctcaacgagaagacgctcaaggggacgttcttcggtaactacaagccgcgcaccgacctgcccaacgtcgtcgagctgtacatgaagaaggagctggagctggagaagttcatcacgcacagcgtgccgttctcggagatcaacacggcgttcgatctcatgctcaagggggagagtctccgctgcgtcatgaggatggatgagtag

SEQ ID NO: 14523 - protein, 379 aa, Oryza rufipogon
MATAGKVIKCKAAVAWEAGKPLSIEEVEVAPPQAMEVRVKILYTALCHTDVYFWEAKGQTPVFPRILGHEAGGIVESVGEGVTEHAPGDHVLPLFTGECKECDHCKSEESNMCDLLRINVDRGVMIGDGKSRFTIKGKPIFHFVGTSTFSEYTVIHVGCLAKINPEAPLDKVCILSCGFSTGFGATVNVAKPKKGQTVAIFGLGAVGLAAMEGARLSGASRIIGVDLNPAKFEQAKKFGCTDFVNPKDHSKPVHEVLIEMTNGGLDRAVECTGNINAMISCFECVHDGWGVAVLVGVPTKDDVFKTHPMNFLNEKTLKGTFFGNYKPRTDLPNVVELYMKKELELEKFITHSVPFSEINTAFDLMLKGESLRCVMRMDE

SEQ ID NO: 14524 - DNA, 1140 bp, Oryza rufipogon
  CDS (1)..(1140)
atggcgaccgctgggaaggtgatcaagtgcaaagcggcggtggcatgggaggcagggaagccgctgtcgatcgaggaggtggaggttgcgccgccgcaggccatggaggtccgcgtcaagatcctctacaccgccctctgccacaccgacgtctacttctgggaggccaaggggcaaacacctgttttccctaggatcttgggccatgaagctggaggcattgtggagagtgtgggagagggtgtgaccgaactcgcgccgggcgaccatgtcctcccgctgttcaccggcgagtgcaaggagtgtgatcactgcaaatcggaggagagcaacatgtgtgacctcctcaggatcaacgtcgaccgcggcgtcatgatcggcgacggcaagtcccggttcaccatcaaggggaagcccatcttccactttgttggcacatccaccttcagcgagtacaccgtcatccatgtcggctgcctcgcgaagatcaacccggaggcgcctctcgacaaggtctgcattctcagctgcggtttctctaccggctttggtgcaacagtgaatgtcgcgaaaccgaaaaagggccagaccgtggctattttcggtctcggagctgttggccttgctgctatggaaggtgccaggctgtctggagcatcgaggatcattggtgtggacctgaaccctgcgaaattcgaacaagctaagaagtttggctgcactgacttcgtaaaccccaaggaccacagcaagccagtgcacgaggtgctgattgagatgaccaacggtggactcgacagggccgttgaatgcacgggcaacatcaacgccatgatatcctgcttcgaatgtgtccatgatggatggggcgttgcggtgctggtcggcgtgccgaccaaggatgatgtgttcaagacccacccgatgaacttcctcaacgagaagacgctcaaggggacgttcttcggtaactacaagccgcgcaccgacctgcccaacgtcgtcgagctgtacatgaagaaggagctggagctggagaagttcatcacgcacagcgtgccgttctcggagatcaacacggcgttcgatctcatgctcaagggggagagtctccgctgcgtcatgaggatggatgagtag

SEQ ID NO: 14525 - protein, 379 aa, Oryza rufipogon
MATAGKVIKCKAAVAWEAGKPLSIEEVEVAPPQAMEVRVKILYTALCHTDVYFWEAKGQTPVFPRILGHEAGGIVESVGEGVTELAPGDHVLPLFTGECKECDHCKSEESNMCDLLRINVDRGVMIGDGKSRFTIKGKPIFHFVGTSTFSEYTVIHVGCLAKINPEAPLDKVCILSCGFSTGFGATVNVAKPKKGQTVAIFGLGAVGLAAMEGARLSGASRIIGVDLNPAKFEQAKKFGCTDFVNPKDHSKPVHEVLIEMTNGGLDRAVECTGNINAMISCFECVHDGWGVAVLVGVPTKDDVFKTHPMNFLNEKTLKGTFFGNYKPRTDLPNVVELYMKKELELEKFITHSVPFSEINTAFDLMLKGESLRCVMRMDE

SEQ ID NO: 14526 - DNA, 1140 bp, Oryza rufipogon
  CDS (1)..(1140)
atggcgaccgctgggaaggtgatcaagtgcaaagcggcggtggcatgggaggcagggaagccgctgtcgatcgaggaggtggagattgcgccgccgcaggccatggaggtccgcgtcaagatcctctacaccgccctctgccacaccgacgtctacttctgggaggccaaggggcaaacacctgttttccctaggatcttgggccatgaagctggaggcattgtggagagtgtgggagagggtgtgaccgaactcgcgccgggcgaccatgtcctcccggtgttcaccggagagtgcaaggagtgtgatcactgcaaatcggaggagagcaacatgtgtgacctcctcaggatcaacgtcgaccgcggcgtcatgatcggcgacggcaagtcccgattcaccatcaaggggaagcccatcttccactttgttggcacatccaccttcagcgagtacaccgtcatccatgtcggctgcctcgcgaagatcaacccggaggcgcctctcgacaaggtctgcattctcagctgcggtttctctaccggttttggtgcaacagtgaatgtcgcgaaaccgaaaaagggccagaccgtggctattttcggtcttggagctgttggtcttgctgctatggaaggtgccaggctgtctggagcatcgaggatcattggtgtggacctgaaccctgcgaaattcgaacaagctaagaagtttggctgcactgacttcgtaaaccccaaggaccacagcaagccagtgcacgaggtgctgattgagatgaccaacggtggactcgacagggccgttgaatgcacgggcaacatcaacgccatgatatcctgcttcgaatgtgtccatgatggatggggcgttgcggtgctggtcggcgtgccgaccaaggatgatgtgttcaagacccacccgatgaacttcctcaacgagaagacgctcaaggggacgttcttcggtaactacaagccgcgcaccgacctgcccaacgtcgtcgagctgtacatgaagaaggagctggagctggagaagttcatcacgcacagcgtgccgttctcggagatcaacacggcgttcgatctcatgctcaagggggagagtctccgctgcgtcatgaggatggatgagtag

SEQ ID NO: 14527 - protein, 379 aa, Oryza rufipogon
MATAGKVIKCKAAVAWEAGKPLSIEEVEIAPPQAMEVRVKILYTALCHTDVYFWEAKGQTPVFPRILGHEAGGIVESVGEGVTELAPGDHVLPVFTGECKECDHCKSEESNMCDLLRINVDRGVMIGDGKSRFTIKGKPIFHFVGTSTFSEYTVIHVGCLAKINPEAPLDKVCILSCGFSTGFGATVNVAKPKKGQTVAIFGLGAVGLAAMEGARLSGASRIIGVDLNPAKFEQAKKFGCTDFVNPKDHSKPVHEVLIEMTNGGLDRAVECTGNINAMISCFECVHDGWGVAVLVGVPTKDDVFKTHPMNFLNEKTLKGTFFGNYKPRTDLPNVVELYMKKELELEKFITHSVPFSEINTAFDLMLKGESLRCVMRMDE

SEQ ID NO: 14528 - DNA, 1140 bp, Oryza rufipogon
  CDS (1)..(1140)
atggcgacagccgggaaggtgatcaagtgcaaagcggcggtggcatgggaggccgggaagccgctgtcgatcgaggaggtggaggttgcgccgccgcaggccatggaggtccgcgtcaagatcctctacaccgccctctgccacaccgacgtctacttctgggaggccaaggggcaaacacctgttttccctaggatcttgggccatgaagctggaggcattgtggagagtgtgggagagggtgtgaccgaactcgcgccgggcgaccatgtcctcccggtgttcaccggcgagtgcaaggagtgtgatcactgcaaatcggaggagagcaacatgtgtgacctcctcaggatcaacgtcgaccgcggcgtcatgatcggcgacggcaagtcccgattcaccatcaaggggaagcccatcttccactttgttggcacatccaccttcagcgagtacaccgtcatccatgtcggctgcctcgcgaagatcaacccggaggcgcctctcgacaaggtctgcattctcagctgcggtttctctaccggttttggtgcaacagtgaatgtcgcgaaaccgaaaaagggccagaccgtggctattttcggtcttggagctgttggtcttgctgctatggaaggtgccaggctgtctggagcatcgaggatcattggtgtggacctgaaccctgcgaaattcgaacaagctaagaagtttggctgcactgacttcgtaaaccccaaggaccacagcaagccagtgcacgaggtgctgattgagatgaccaacggtggactcgacagggccgttgaatgcacgggcaacatcaacgccatgatatcctgcttcgaatgtgtccatgatggatggggcgttgcggtgctggtcggcgtgccgcccaaggatgatgtgttcaagacccacccgatgaacttcctcaacgagaagacgctcaaggggacgttcttcggtaactacaagccgcgcaccgacctgcccaacgtcgtcgagctgtacatgaagaaggagctggagctggagaagttcatcacgcacagcgtgccgttctcggagatcaacacggcgttcgatctcatgctcaagggggagagtctccgctgcgtcatgaggatggatgagtag

SEQ ID NO: 14529 - protein, 379 aa, Oryza rufipogon
MATAGKVIKCKAAVAWEAGKPLSIEEVEVAPPQAMEVRVKILYTALCHTDVYFWEAKGQTPVFPRILGHEAGGIVESVGEGVTELAPGDHVLPVFTGECKECDHCKSEESNMCDLLRINVDRGVMIGDGKSRFTIKGKPIFHFVGTSTFSEYTVIHVGCLAKINPEAPLDKVCILSCGFSTGFGATVNVAKPKKGQTVAIFGLGAVGLAAMEGARLSGASRIIGVDLNPAKFEQAKKFGCTDFVNPKDHSKPVHEVLIEMTNGGLDRAVECTGNINAMISCFECVHDGWGVAVLVGVPPKDDVFKTHPMNFLNEKTLKGTFFGNYKPRTDLPNVVELYMKKELELEKFITHSVPFSEINTAFDLMLKGESLRCVMRMDE

SEQ ID NO: 14530 - DNA, 1110 bp, Escherichia coli
  CDS (1)..(1110): transl_table=11
atgaaatcacgtgcagctgtagcatttgctcctggtaagcccctcgagatcgttgaaattgatgtggagccgcctcgtaagggtgaagtactggtaaaaatcacccataccggcgtctgccacactgatgcatttaccttgtccggtgatgatccggaaggtgtgttcccggcagtactgggtcatgaaggtgcgggtgttgttgtggaagtcggcgaaggggtcaccagtgtgaaacctggcgatcatgttattccgctttacacggcagaatgcggcgagtgtctgttctgtaaatccggaaaaactaacctgtgtgtctctgttcgcgccacccagggtaaaggacttatgcctgatggcacgacccgtttctcttacaagggccagcctcttttccactatatgggctgctctacattcagtgagtataccgtcgtcgcagaagtgtctttagccaaaattaatccacaggcgaatcatgaacatgtctgtctgctgggttgtggcgtaacgacaggtatcggtgcggttcacaacactgcgaaagtacagccaggtgacacggttgctatttttggcctgggtggtattggccttgcagcggtacagggcgcgcgtcaggcaaaagcgggtcgtatctttgccatcgataccaatccggagaaatttgacctggcccgttcatttggtgcaactgactgcattaacccgaaagactacgacaaacctatccaggacgttctcattgaactgacaggctggggtgtcgaccatacatttgaatgtatcggtaacgtaaacgtaatgcgttctgcacttgaagcggcacaccgtggctggggtcagtccgtcgttatcggtgttgctggcgcaggtaaagaaatctccactcgtccattccagctggtcaccggccgtgtatggaagggttctgcctttggtggtgttaaaggtcgtacccagctgccgggcatggttgaagatgcgatgaaaggcgaaatcgatctcgcaccattcgtgactcataccatgggccttgaagagattaatgacgccttcgacctgatgcatgaaggcaaatctattcgtacagtgatccactactga

SEQ ID NO: 14531 - protein, 369 aa, Escherichia coli
MKSRAAVAFAPGKPLEIVEIDVEPPRKGEVLVKITHTGVCHTDAFTLSGDDPEGVFPAVLGHEGAGVVVEVGEGVTSVKPGDHVIPLYTAECGECLFCKSGKTNLCVSVRATQGKGLMPDGTTRFSYKGQPLFHYMGCSTFSEYTVVAEVSLAKINPQANHEHVCLLGCGVTTGIGAVHNTAKVQPGDTVAIFGLGGIGLAAVQGARQAKAGRIFAIDTNPEKFDLARSFGATDCINPKDYDKPIQDVLIELTGWGVDHTFECIGNVNVMRSALEAAHRGWGQSVVIGVAGAGKEISTRPFQLVTGRVWKGSAFGGVKGRTQLPGMVEDAMKGEIDLAPFVTHTMGLEEINDAFDLMHEGKSIRTVIHY

SEQ ID NO: 14532 - DNA, 1569 bp, Phragmites australis
  CDS (200)..(1339)
gtctaccaggcattcgcttcatgggggataggggccccttaagcacctggccgcggagctatagatagacgggctctcccctcctggctcctcacagattcgatttggcctgtcttgacttgatcggtggtgtagtgtcgttcttggagctgtttgattcggggcttggtgcgatttcgtttggggatttggggaaggaatggcgaccgcagggcaggtgatcaagtgcaaagcggcggtggcatgggaggccgggaagccgctttcgatggaggaggtggacgtggcgccgccgcaggccatggaggtgcgcatcaagatcctcttcacctccctctgccacaccgacgtctacttctgggaggccaaggaccagactcccgtgttcccccggatcttcggtcatgaagctggagggattgtggagagtgttggagagggtgtgactgacgttgcccctggtgaccatgtcctccctgtgttcactggggagtgcaaggaatgcgcccactgcaagtcagcagagagcaacatgtgtgatctgctcaggatcaacacagatcggggtgtgatgattggcgatggaaagtcacggctctcaatcaatgggaagcctatctaccatttcgttggaacatccaccttcagcgagtataccgtcatgcatgttggttgtgttgcaaagatcaaccctgaggcgccccttgataaagtctgtgttcttagctgtggtatttctactggtctgggtgcatcaatcaatgttgcaaaaccaccaaagggttcaacagtggctatattcggtctaggggctgtaggcctagctgccgcggaaggtgcaaggattgcaggagcgtcaaggatcattggtattgacctgaatgccaacagatttgaagaagctaggaaatttggttgtactgaatttgtgaacccgaaagaccacaacaaaccagttcaggaggtacttgctgagatgaccaatggaggggttgaccgcagtgttgaatgcactggcaacatcaatgctatgatccaagcattcgaacgtgttcatgatggctggggtgttgctgtgctggtgggtgtgccacacaaggatgctgaattcaagactcacccaatgaacttcctgaacgagaggactctgaagggaaccttctttggcaacttcaaaccgcgcaccgatctgcccaatgttgtggagctgtacatgaagaaggagctggagctcgagaagttcatcacgcacaccatctcgttcgcggagatcaacaaggcgttcgacctgatggtgaagggggagggcatccgctgcatcatccgtatggataactagatttcgttgtctggtttctggtctgagtaataaggtggcagcttgaggctgccctgcgatgaggcgttgatgatgaaccacgcttctgtgtatcacgtccggtttggcattgtcaatcagtagaggagcttccaatgtctgtaattacctgccggcatgagagtcttatggacaccatcttttggcgtaatatatggtactgttctatgagtttcaaaaaaaaaaaaaaa

SEQ ID NO: 14533 - protein, 379 aa, Phragmites australis
MATAGQVIKCKAAVAWEAGKPLSMEEVDVAPPQAMEVRIKILFTSLCHTDVYFWEAKDQTPVFPRIFGHEAGGIVESVGEGVTDVAPGDHVLPVFTGECKECAHCKSAESNMCDLLRINTDRGVMIGDGKSRLSINGKPIYHFVGTSTFSEYTVMHVGCVAKINPEAPLDKVCVLSCGISTGLGASINVAKPPKGSTVAIFGLGAVGLAAAEGARIAGASRIIGIDLNANRFEEARKFGCTEFVNPKDHNKPVQEVLAEMTNGGVDRSVECTGNINAMIQAFERVHDGWGVAVLVGVPHKDAEFKTHPMNFLNERTLKGTFFGNFKPRTDLPNVVELYMKKELELEKFITHTISFAEINKAFDLMVKGEGIRCIIRMDN

SEQ ID NO: 14534 - DNA, 1522 bp, Dianthus caryophyllus
  CDS (136)..(1278)
gataaatatcaactaatccattagcatctttcacatatatatctcatctcataacaaaacaaaaacaaaacaaaacaaaaaaataaagggaaaactgtacggaataatagtgaagaagtaaaaaaaaaaattataatgtcgagtaccgccggacaagttattcgctgcaaagctgctgtagcatgggaagcggggaaaccgctggtaatcgaggaagtcgaggtggctccacctcagaagatggaggttcgcgtcaagatcctcttcacctctctttgtcacactgatgtttacttttgggaggccaagggccaaacacctgttttccctcgcattctcggtcatgaagcaggaggaattgtggaaagcgttggtgaaggagtgacggagttgcagccaggagaccacgtccttcccgtcttcacaggggagtgcaaggaatgcgctcactgcaaatccgaggagagtaacatgtgtgatctcctaaggatcaacaccgaccgtggtgtgatgctcgccgatggaaagtcgaggttttcaatcaacggaaaacccatctaccaccttgtcggaacttccacgttcagtgaatatactgtgacacatgtcgggtgtcttgccaaaatcaaccctaaagcccccctcgacaaagtttgtattcttagttgcggaatttctacaggttttggtgctactgtgaatgtcgcaaaaccgaagaagggccagactgtggctatttttgggctcggagctgttggtctcgctgctgctgaaggtgccagagtttccggtgcatcaaagattattggtgtagatctcattcctgctcggtttgaagcagccaagaagtttggtgtgaccgacttcgtgaacccaaaagaccatgacaaaccagttcaagaggtaattgttgagatgaccaatggtggagtcgacaggagtgtcgagtgtactggaaatatccaagctatgatctctgcttttgaatgtgtccacgatggttggggagttgcagttctcgttggtgtaccaaacaaagacgacgcttttaaaacccatccaatgaacttcttgaatgagaggacactaaagggaaccttttttggcaactacaagcctagaaccgacataccgaaagtcgtggagaagtacatgaacaaggagatggagctcgacaaattcataacacatgaaatatccttcaaagacatcaacaaggcctttgaaatgatggctaggggtgagggcatcaggtgtatcattcgcatggacgcttgaaatcgacatctatctcatacgacttagctacatatcgtattgagagtgagcgactggaaaaggataaataaaagcgtgccgtgtcccttttacttttgtattgctgctacatgtatagtttaatctggtttttctcctagttaccaaattccgaagagaatgattctcttctgtaagtttgtttaaaatcaatttgaagatttatgttttattcaaaaaaaaaaaaaaaaaaaaaaaaaaaaaa

SEQ ID NO: 14535 - protein, 380 aa, Dianthus caryophyllus
MSSTAGQVIRCKAAVAWEAGKPLVIEEVEVAPPQKMEVRVKILFTSLCHTDVYFWEAKGQTPVFPRILGHEAGGIVESVGEGVTELQPGDHVLPVFTGECKECAHCKSEESNMCDLLRINTDRGVMLADGKSRFSINGKPIYHLVGTSTFSEYTVTHVGCLAKINPKAPLDKVCILSCGISTGFGATVNVAKPKKGQTVAIFGLGAVGLAAAEGARVSGASKIIGVDLIPARFEAAKKFGVTDFVNPKDHDKPVQEVIVEMTNGGVDRSVECTGNIQAMISAFECVHDGWGVAVLVGVPNKDDAFKTHPMNFLNERTLKGTFFGNYKPRTDIPKVVEKYMNKEMELDKFITHEISFKDINKAFEMMARGEGIRCIIRMDA

SEQ ID NO: 14536 - DNA, 1439 bp, Nicotiana tabacum
  CDS (85)..(1227)
ctcagtattcagaaacaacaaaagttcttctctacataaaattttcctattttagtgatcagtgaaggaaatcaagaaaaataaatgtcaagcactgtcgggcaagtcattcgttgcaaagctgctgtggcatgggaggcagggaagccattagtgatggaagaagtggaggtggcacctccacaaaaaatggaagttcgtcttaagatcctctacacttctctctgccatactgatgtctacttctgggaagcaaagggccaaaatccagtctttcctcgaattcttggacatgaagcagcagggattgtggagagtgttggagagggagtaacagaacttgcaccaggagaccatgttttgcctgtgttcacaggggaatgtaaagattgtgctcactgcaaatcggaagaaagcaatatgtgtagcctcttaaggattaacactgataggggagtaatgattcaagatggacaatcaagattttccataaatggaaagcctatttaccattttgttgggacttctacctttagtgagtacactgtggttcatgttggttgtgttgctaaaatcaacccccttgctcctcttgacaaagtttgtgtcctcagttgtggaatctctacaggtcttggtgcaactttgaatgtggctaaaccaacaaaaggatcaagtgtggctatatttggactgggggctgtaggccttgctgctgcagaaggagcaagaattgctggtgcttcaaggataattggtgttgatttaaatgctagcagatttgagttagctaagaaatttggtgtgacagagtttgtgaatcctaaggatcataataaaccaattcaagaggtaattgctgagatgactgatggcggagtagacaggagtgtggaatgtacaggccacattgatgctatgatttcagcatttgaatgtgtccatgatggttggggagtggctgttcttgttggagtaccacataaagaagctgtattcaagacacaccctatgaagttgttgaatgaaaggactctcaaggggacattctttggaaactacaagccccgttctgatcttccttctgtcgtcgagaaatacatgaacaaggaacttgaattggagaagttcatcactcacaaactcccatttgctgaaatcaacaaggcatttgatttaatgttgaagggagaaggccttcgttgcatcatcaacatggaggactaattgctataccaactatatattctactcgctactctttgagaaaagaccaataaattgtcattgtcttattttaaatttgttcgtttggtgattgagttgtaatattctggtccaactccatccatgtctcttcttgcttttttcgctaataggtatgctttgtccttcataatgccatatctatctgttcttgtaaaaaaaaaaaaaaaaaa

SEQ ID NO: 14537 - protein, 380 aa, Nicotiana tabacum
MSSTVGQVIRCKAAVAWEAGKPLVMEEVEVAPPQKMEVRLKILYTSLCHTDVYFWEAKGQNPVFPRILGHEAAGIVESVGEGVTELAPGDHVLPVFTGECKDCAHCKSEESNMCSLLRINTDRGVMIQDGQSRFSINGKPIYHFVGTSTFSEYTVVHVGCVAKINPLAPLDKVCVLSCGISTGLGATLNVAKPTKGSSVAIFGLGAVGLAAAEGARIAGASRIIGVDLNASRFELAKKFGVTEFVNPKDHNKPIQEVIAEMTDGGVDRSVECTGHIDAMISAFECVHDGWGVAVLVGVPHKEAVFKTHPMKLLNERTLKGTFFGNYKPRSDLPSVVEKYMNKELELEKFITHKLPFAEINKAFDLMLKGEGLRCIINMED

SEQ ID NO: 14538 - DNA, 1140 bp, Oryza australiensis
  CDS (1)..(1140)
atggcgaccgcagggaaggttatcaagtgcaaagcggcggtggcatgggaggcggggaagccgctggtgatcgaggaggtggaggtggcgccgcctcaggccatggaggttcgcgtcaagatcctcttcacctcgctctgccacaccgatgtctacttctgggaggccaagggacagactcccatgttccctcggatcttcggccatgaagctggaggtattgtggagagtgttggagagggtgtgactgatcttgcccctggtgaccatgtcctccctgtgttcactggggagtgcaaggagtgtccccactgcaagtcaccagaaagcaacatgtgtgatctgctcaggatcaacaccgacaggggggtgatgattggtgacggcaagtcacgattttccatcaacgggaagcctatttaccatttcgtcgggacttcgaccttcagcgagtacaccgtcatgcatgttggttgcgtcgcgaagatcaacccggaggctccccttgataaagtttgtgttcttagctgtggtatttctactggtcttggtgctacaatcaatgtggcaaagccaccaaagggttcgacggtggcgatattcggtctaggagctgtaggacttgctgccgcagaaggtgcaaggattgcaggagcatcaaggatcattggcattgacctgaacgccaacagatttgaagaagctaggaagtttggttgcactgaatttgtgaacccaaaggaccatgacaagccagttcaacaggtacttgctgagatgaccaatggcggagttgaccgcagcgttgaatgcactggcaacatcaacgccatgatccaagcatttgaatgtgttcatgatgggtggggtgttgctgttctggttggcgtgccacacaaggacgccgagttcaagacccacccaatgaacttcctgaacgagaggactctcaagggcaccttcttcggcaactacaagccgcgcaccgatctgcccaacgtcgtcgagctgtacatgaagaaggagttggaggtggaaaaattcatcacgcacagcgtgccgttctcggagatcaacacggcgttcgacctcatgcacaagggcgagggcatccgctgcatcatccgcatggagaactga

SEQ ID NO: 14539 - protein, 379 aa, Oryza australiensis
MATAGKVIKCKAAVAWEAGKPLVIEEVEVAPPQAMEVRVKILFTSLCHTDVYFWEAKGQTPMFPRIFGHEAGGIVESVGEGVTDLAPGDHVLPVFTGECKECPHCKSPESNMCDLLRINTDRGVMIGDGKSRFSINGKPIYHFVGTSTFSEYTVMHVGCVAKINPEAPLDKVCVLSCGISTGLGATINVAKPPKGSTVAIFGLGAVGLAAAEGARIAGASRIIGIDLNANRFEEARKFGCTEFVNPKDHDKPVQQVLAEMTNGGVDRSVECTGNINAMIQAFECVHDGWGVAVLVGVPHKDAEFKTHPMNFLNERTLKGTFFGNYKPRTDLPNVVELYMKKELEVEKFITHSVPFSEINTAFDLMHKGEGIRCIIRMEN

SEQ ID NO: 14540 - DNA, 1140 bp, Oryza rufipogon
  CDS (1)..(1140)
atggcgaccgcagggaaggtgatcaagtgcaaagcggcggtggcatgggaggccgcgaagccgctggtgatcgaggaggtggaggtggcgccgccgcaggccatggaggtgcgcgtcaagatcctcttcacctcgctctgccacaccgacgtctacttctgggaggccaagggacagactcccgtgttccctcggatcttcggccatgaagctggaggtattgtggagagtgttggagagggtgtgactgatcttgcccctggtgaccatgttctccctgtgttcactggggagtgcaaggagtgtgcccactgcaagtcagcagagagcaacatgtgtgatctgctcaggatcaccactgacaggggtgtgatgattggtgatggcaaatcacgcttttccatcaacgggaagcccatttaccatttcgtcgggacttcgaccttcagcgagtacactgtcatgcatgttggttgcgttgcgaagatcaacccggcagctccacttgataaagtttgcgttcttagctgtggtatttctactggtcttggtgctacaatcaatgtggcaaagccaccaaagggttcgacggtggcgatatttggtctaggagctgtaggccttgctgccgcagaaggtgcaaggattgcaggagcgtcaaggatcattggcattgacctgaacgccaacagatttgaagaagctaggaaatttggttgcactgaatttgtgaacccaaaggaccatgacaagccagttcagcaggtacttgctgagatgaccaatggcggagttgaccgcagcgttgaatgcactggcaacatcaacgccatgatccaagcatttgaatgtgttcatgatggctggggtgttgctgttttggtcggcgtgccacacaaggacgccgagttcaagacccacccgatgaacttcctgaacgagaggactctcaagggaaccttcttcggcaactacaagccacgcaccgatctgcccaacgtcgtcgagctctacatgaagaaggagctggaggtggagaagttcatcacacacagcgtgccgttctcggagatcaacacggcgttcgacctgatgcacaagggcgagggcatccgctgcatcatccgcatggagaactga

SEQ ID NO: 14541 - protein, 379 aa, Oryza rufipogon
MATAGKVIKCKAAVAWEAAKPLVIEEVEVAPPQAMEVRVKILFTSLCHTDVYFWEAKGQTPVFPRIFGHEAGGIVESVGEGVTDLAPGDHVLPVFTGECKECAHCKSAESNMCDLLRITTDRGVMIGDGKSRFSINGKPIYHFVGTSTFSEYTVMHVGCVAKINPAAPLDKVCVLSCGISTGLGATINVAKPPKGSTVAIFGLGAVGLAAAEGARIAGASRIIGIDLNANRFEEARKFGCTEFVNPKDHDKPVQQVLAEMTNGGVDRSVECTGNINAMIQAFECVHDGWGVAVLVGVPHKDAEFKTHPMNFLNERTLKGTFFGNYKPRTDLPNVVELYMKKELEVEKFITHSVPFSEINTAFDLMHKGEGIRCIIRMEN

SEQ ID NO: 14542 - DNA, 1143 bp, Pichia methanolica
  CDS (1)..(1143)
atgtctactgctggaaaaactattacttgtaaggctgctgtggcctgggaagctggtaaagacttaagcattgaaaccattgaagttgctccacctaaagctcacgaagttagagttaagattgcttatactggtgtttgtcacactgatgctttcactttatccggtaaggacgctgaaggtgaattcccagtcattttcggtcacgaaggtgctggtatcgttgagtcaattggtgaaggtgttacttctgtcaaggttggtgaccacgttgtctgtctatacaccccagaatgtaaggaatgtaagttctgtaagtctggtaagactaacttgtgcggtaagatcagagctactcaaggtaagggtttgatgccagatggtacctcaagattcacttgtaagggtaagaagttattacattacatgggttgttccaccttctctcaatatactgttttagctgatatttcagttgttgctgttgatccaaaggccccaatggacagaacctgtttgttaggttgtggtattactaccggttacggtgctgccactaacactgctaagatttctccaggcgacaacattgccattttcggtgccggttgcattggtttatccgttatccaaggtgctgttgaaagaaaggctggcaagattattgttgttgatatcaatgatgacaagaaggaatgggctgataaattcggtgccactgactttgtcaacccaaccaaattaccagcaggtgttaccattgttgacaagttagttgaaatgactgacggtggttgtgacttcaccttcgactgtaccggtaacgttggtgttatgagaaacgctttagaagcttgtcacaagggttggggtgaatccattgttattggtgttgctccagctggtgctgaaatttctaccagaccattccaattggttaccggtagagtctggaagggttgtgccttcggtggcgttaagggtagatctcaaatgccaggtttagtgcaagactacttacaaggtaagattaaggttgatgaattcattacccacagacatccattagaagatattaatgatgctttccatgacatgcatgctggtgactgtatcagagctgttatcaccatggacgaataa

SEQ ID NO: 14543 - protein, 380 aa, Pichia methanolica
MSTAGKTITCKAAVAWEAGKDLSIETIEVAPPKAHEVRVKIAYTGVCHTDAFTLSGKDAEGEFPVIFGHEGAGIVESIGEGVTSVKVGDHVVCLYTPECKECKFCKSGKTNLCGKIRATQGKGLMPDGTSRFTCKGKKLLHYMGCSTFSQYTVLADISVVAVDPKAPMDRTCLLGCGITTGYGAATNTAKISPGDNIAIFGAGCIGLSVIQGAVERKAGKIIVVDINDDKKEWADKFGATDFVNPTKLPAGVTIVDKLVEMTDGGCDFTFDCTGNVGVMRNALEACHKGWGESIVIGVAPAGAEISTRPFQLVTGRVWKGCAFGGVKGRSQMPGLVQDYLQGKIKVDEFITHRHPLEDINDAFHDMHAGDCIRAVITMDE

SEQ ID NO: 14544 - DNA, 1429 bp, Lotus corniculatus
  CDS (70)..(1212)
catcaatcaattctcagtttttcgtcataatcaatcttctcagttcatcttaatttgtgaaagctagctatgtcgagcacagctggtcaggtcatcaaatgcagagccgcggtttcatgggaggcagggaagccactagtgattgaagaagtggaggtggcgcccccgcaggccggtgaagtgcgcctgaagatactctacacctccctttgccacactgatgtttacttctgggaagctaagggtcagactccattgtttcctcgtatatttggtcatgaagctggaggcattgtggagagcgtaggcgaaggtgtgactcatctgaaaccaggggaccatgctctcccagtattcacaggagaatgtggtgaatgcccacattgcaaatcagaggagagcaacatgtgtgatcttcttaggatcaacactgataggggtgtcatgatcagtgacaaccagagtagattctccataaaaggaaaacccatataccattttgttggtacctcaacattcagtgaatacacagttctccatgctggatgtgttgcaaagatcaaccctgctgccccacttgacaaagtttgtattctcagttgtggaatatgcacaggttttggtgctactgtcaatgttgcaaaaccaaaacctggttcttctgttgccatctttggacttggagctgttggccttgctgctgctgaaggggcaagggtttctggtgcatcaagaatcattggggttgatttagtttccagccgatttgaaggagccaagaagtttggagtcaatgagttcgtgaacccaaaagatcacgacaaacctgtacaagaggtaattgctgaaatgaccaatggaggtgtggatcgtgctgttgaatgcactggcagcatccaggccatgatctctgcatttgaatgtgtccatgatggttggggtgttgctgtacttgttggagtgccaaacaaagatgatgcattcaaaactcatcctgtgaatttcttgaatgagaggactcttaagggcaccttctatggcaactacaaaccccgcactgatcttcctaatgttgtagagatgtacatgagaggggaacttgaactggagaaattcatcacccacacagtttcgttctctgagattaacaaagcttttgattacatgctgaaaggagagtccatcagatgcatcatccgcatggaggagtaaaacccaaaaacaatgatgtgtgagtccctatttggggactgagttctgtttctggttgtgaaagaaaaaaggcatatataaataatcccttatgaggattatgaaatttgtgatgtttgaatgtatagaatggcagggcctttgcttctgggcttgtctaatacagaataaataaaatgtggcttttttccaaaaaaaaaaaaaaaaaaaaaaaaaa

SEQ ID NO: 14545 - protein, 380 aa, Lotus corniculatus
MSSTAGQVIKCRAAVSWEAGKPLVIEEVEVAPPQAGEVRLKILYTSLCHTDVYFWEAKGQTPLFPRIFGHEAGGIVESVGEGVTHLKPGDHALPVFTGECGECPHCKSEESNMCDLLRINTDRGVMISDNQSRFSIKGKPIYHFVGTSTFSEYTVLHAGCVAKINPAAPLDKVCILSCGICTGFGATVNVAKPKPGSSVAIFGLGAVGLAAAEGARVSGASRIIGVDLVSSRFEGAKKFGVNEFVNPKDHDKPVQEVIAEMTNGGVDRAVECTGSIQAMISAFECVHDGWGVAVLVGVPNKDDAFKTHPVNFLNERTLKGTFYGNYKPRTDLPNVVEMYMRGELELEKFITHTVSFSEINKAFDYMLKGESIRCIIRMEE

SEQ ID NO: 14546 - DNA, 1143 bp, Candida boidinii
  CDS (1)..(1143)
atgtctactgttggtaaaactattacatgtaaagctgctgtcgcctggaagcccggtgaagatttaagcattgaaactattgaagttgctccacctaaagctcacgaagttagaatcaagattgaatatactggtgtctgtcatactgatgcttacacattatccggtgctgatgctgaaggtgaattcccagttgttttcggtcatgaaggtgctggtattgttgaatctgttggtgaaggtgttaccagtgttaaagttggtgacagtgtcatttgtttatacactccagaatgtcgtgaatgtaaattctgtaaatctggtaagaccaatttatgtggtaagatcagagctactcaaggtaaaggtttaatgccagatggtacttctagatttacctgtaaaggtcaaccacttttacactacatgggttgttctactttctctcaatataccgttgttgctgatatctcagttgttgctgtcaacccagaagctccaaaggatagaacttgtttattaggttgtggtatcactaccggttaccgtgctgctactaacaccgttaaaatgaacgaaggtgataatattgccgttttcggtgttggttgtattggtctttctgttattcaaggtgctgttgccaagaaagctggtaaaattattgctatcgatattaacgatggtaagacagaatgggctgaaaaattcggtgctactgatttcgttaacccaactaaattagctgaaggtgaaaccattgtttcaaaacttattgacatgaccgatggtggttgtgatttcacttttgattgtactggtaccgttcaagttatgagaaacgctttagaagcttgtcataaaggttggggtgaatctgttatcattggtgttgccgctgctggtaaagaaatttcaactagaccattccaattagtcactggtagagtctggagaggttgtgcctttggtggtgttaagggtagaactcaaatgccaggtatcgttgaagattacttaagcggtactcttaaagttgatgaatttattactcacagacataaattagatgatattaacaaagctttccacgatatgcacgctggtgattgtatcagagctgttattaccatggaagaataa

SEQ ID NO: 14547 - protein, 380 aa, Candida boidinii
MSTVGKTITCKAAVAWKPGEDLSIETIEVAPPKAHEVRIKIEYTGVCHTDAYTLSGADAEGEFPVVFGHEGAGIVESVGEGVTSVKVGDSVICLYTPECRECKFCKSGKTNLCGKIRATQGKGLMPDGTSRFTCKGQPLLHYMGCSTFSQYTVVADISVVAVNPEAPKDRTCLLGCGITTGYRAATNTVKMNEGDNIAVFGVGCIGLSVIQGAVAKKAGKIIAIDINDGKTEWAEKFGATDFVNPTKLAEGETIVSKLIDMTDGGCDFTFDCTGTVQVMRNALEACHKGWGESVIIGVAAAGKEISTRPFQLVTGRVWRGCAFGGVKGRTQMPGIVEDYLSGTLKVDEFITHRHKLDDINKAFHDMHAGDCIRAVITMEE

SEQ ID NO: 14548 - DNA, 1134 bp, Ciona intestinalis
  CDS (1)..(1134)
atgttagatacagctggaaaggtcattaattgttctgcagcagtggcatggggtccaaaaaagccactgtctatcgagaaaattcaagtggcaccacctaaagcccatgaagtgcgtataaaggtaatggctactggagtttgccatactgatgcctttacactcagtggtgaagacccagaggctgctttccctgtaatacttggccatgaaggtggtggcattgtggaaagtgtgggtgaaggggtaactgaattcaaagaaggtgatcatgttattccactctacataccacagtgtaaggattgcaacttctgcagacaccccaaaacaaatctgtgtcagaaaataagaacaactcagggcaaaggttttctacccgatggaacatctcgttttacatgcaatggtcagatggtttatcattacatgggaacttccacatttagcgagtatactgttgttgcggatatttcgctttgtaaggttgatgaaagcgctccacttgacaaagtctgtttgcttggatgtggaataccaacgggttatggcgcagcacttaacactgccaaggttgaacctgggtcaacatgtgctgtgtggggtcttggggcagtgggtcttgctgtagtgatgggttgcaaagcagctggagctaccaggatcattggagttgacatcaatgagtcaaagtttgaaattgccaagcagtttggtgccacagagtgcttcaacccaaaagaatctaaagtttcagcagatgaagctattgttgctttaactgatggtggatgtgatttcacatttgaatgcattggtaatattcatacaatgagagctgcacttcaagctgcccacaaaggctggggtgtctcagttattattggagtggctggcagaggacaagaaatttcaacacgaccattttaccttgttactggtcgtacatggaagggaactgcatttggaggatacaagagcgttgaaggcgtgccaaaactggtacaggattatttgaacaaaacactgaaggttgatgagtttgtgactcacacaatgcccctttgtgacatcaacaaagcgttcgatcttatgcatgaaggaaaaagtcttcgttcagtgatcaacttctaa

SEQ ID NO: 14549 - protein, 377 aa, Ciona intestinalis
MLDTAGKVINCSAAVAWGPKKPLSIEKIQVAPPKAHEVRIKVMATGVCHTDAFTLSGEDPEAAFPVILGHEGGGIVESVGEGVTEFKEGDHVIPLYIPQCKDCNFCRHPKTNLCQKIRTTQGKGFLPDGTSRFTCNGQMVYHYMGTSTFSEYTVVADISLCKVDESAPLDKVCLLGCGIPTGYGAALNTAKVEPGSTCAVWGLGAVGLAVVMGCKAAGATRIIGVDINESKFEIAKQFGATECFNPKESKVSADEAIVALTDGGCDFTFECIGNIHTMRAALQAAHKGWGVSVIIGVAGRGQEISTRPFYLVTGRTWKGTAFGGYKSVEGVPKLVQDYLNKTLKVDEFVTHTMPLCDINKAFDLMHEGKSLRSVINF

SEQ ID NO: 14550 - DNA, 1460 bp, Pennisetum americanum
  CDS (80)..(1219)
ggagtgaggtgcgtgcttggagttggagggagctgctttgtttgggattccgttcgggaatttggggaaggaagaagcaatggcgacggccgggaaggtgatcaagtgcaaagccgcggtggcatgggaggccggcaagccgctatcgatcgaggaggtggaggtggcgccgccgcaggccatggaagtgcgcgtcaatatcctctacacctcgctctgccacactgacgtctacttctgggaggccaagggacagactcccgtgttccctcggatcttcggtcatgaggctggaggtatcattgagagtgttggagagggtgtgactgacgtggcccctggtgaccatgtccttcctgtgttcactggggagtgcaaggagtgcccccactgtaagtcggctgagagcaacatgtgtgatctgctcaggatcaacactgaccggggtgtgatgattggtgacggcaagtcgaggttttcaatcaatgggaagcctatctaccattttgttgggacttccaccttcagcgagtacactgtcatgcatgttggttgtgttgcaaagatcaaccccgaggctccccttgataaagtttgtgttctaagctgtggtatttctactggtcttggtgcatcaattaatgttgccaaaccaccaaagggttcaactgtggcaattttcggtctaggagctgttggtcttgctgctgcggaaggtgcaaggattgctggagcgtcgaggatcattggtgttgacctgaaccccagcagatttgaagaagctaagaaatttggctgcactgaatttgtgaacccaaaagaccacaacaagccagtgcaggaggtacttgctgacatgaccaatggaggagttgaccgcagcgtggaatgcactggaaacatcaacgctatgatccaagcattcgagtgtgttcatgatggctggggtgtcgctgtgctggtgggtgtgccacacaaggatgccgagttcaagactcacccaatgaacttcctgaacgagaggaccctgaagggaaccttctttggcaacttcaagccacgcactgacctgcccaatgtggtggagctgtatatgaagaaggagctggaagtggagaagttcatcacacacagcgtcccattctcggagatcaacaaggccttcgacctgatggcgaagggggagggcatccgctgcatcatccgcatggagcactagattcagtcgcctggtttcatccggttcgggtcgggtcaataaacacggcagcgcccagagtgaggctgccactgcctggtggcaagatacacgcctgtgtggtgtatcacgtgaagtttggcattgtcaatcagtagggtagctctagattctgtaattatctatcggtattggcatgagtcttgcgaactgtctttcggcttaacatatatggtaccttataccactatgagttctttca

SEQ ID NO: 14551 - protein, 379 aa, Pennisetum americanum
MATAGKVIKCKAAVAWEAGKPLSIEEVEVAPPQAMEVRVNILYTSLCHTDVYFWEAKGQTPVFPRIFGHEAGGIIESVGEGVTDVAPGDHVLPVFTGECKECPHCKSAESNMCDLLRINTDRGVMIGDGKSRFSINGKPIYHFVGTSTFSEYTVMHVGCVAKINPEAPLDKVCVLSCGISTGLGASINVAKPPKGSTVAIFGLGAVGLAAAEGARIAGASRIIGVDLNPSRFEEAKKFGCTEFVNPKDHNKPVQEVLADMTNGGVDRSVECTGNINAMIQAFECVHDGWGVAVLVGVPHKDAEFKTHPMNFLNERTLKGTFFGNFKPRTDLPNVVELYMKKELEVEKFITHSVPFSEINKAFDLMAKGEGIRCIIRMEH

SEQ ID NO: 14552 - DNA, 1143 bp, Pichia angusta
  CDS (1)..(1143)
atgtctactgtcggaaaaacaatcacatgtaaagccgctgttgcctgggaggcaggcaaggacctcaccatcgaaactattgaggttgcacctccaaaggcccatgaggtcagagtcaagattgcctacaccggtgtttgtcacacggacggatacaccttatcaggaaacgatccagagggccaattccccgtcattttcggacacgagggtgccggcgttgtcgagtcggttggtgaaggcgtgaccagtgtgaaagtgggagatcacgttgtttgtttgtacactccagaatgcagagagtgcaagttctgcaagtcgggcaaaaccaacctttgtggcaaaatcagagcaacccaaggcaagggtgtgatgccggacggaacctcgaggttcacttgcaagggtaagactctgttgcattacatgggctgctccaccttctcccagtacactgttttggccgacatctctgtcgtggctgttgatccaaaggctcctatggacagaacctgtctgttgggctgtggtattactactggttacggtgccgccattaacacggccaaaatctccgagggtgacaacattggcgtgtttggtgctggatgtattggtctatctgtgattcagggagccgtgaagaaaaaggcaggcaagatcatcgtgatcgacgtcaacgacgccaaaaaggactgggctttcaagtttggtgctacggactttgtcaaccctaccaagctcccagaaggccagtcgatcgtggacaaactgatcgagatgaccgacggaggttgcgacttcactttcgactgtactggtaatgttcaagtgatgagaaacgctctcgaggcctgccataagggatggggagagtccatcatcattggtgtcgcgcctgccggcaaggagatctctactagaccgttccaattggtcaccggtagagtctggaggggatgtgcatttggaggtatcaagggaagaacccagatgcctgatcttgtgcaagactacatggacggcgagatcaaggttgacgagttcatcacccacagacacccattgaatgatataaaccaagctttccatgacatgcacaagggagactgcatccgtgctgtggttactatggatgagtaa

SEQ ID NO: 14553 - protein, 380 aa, Pichia angusta
MSTVGKTITCKAAVAWEAGKDLTIETIEVAPPKAHEVRVKIAYTGVCHTDGYTLSGNDPEGQFPVIFGHEGAGVVESVGEGVTSVKVGDHVVCLYTPECRECKFCKSGKTNLCGKIRATQGKGVMPDGTSRFTCKGKTLLHYMGCSTFSQYTVLADISVVAVDPKAPMDRTCLLGCGITTGYGAAINTAKISEGDNIGVFGAGCIGLSVIQGAVKKKAGKIIVIDVNDAKKDWAFKFGATDFVNPTKLPEGQSIVDKLIEMTDGGCDFTFDCTGNVQVMRNALEACHKGWGESIIIGVAPAGKEISTRPFQLVTGRVWRGCAFGGIKGRTQMPDLVQDYMDGEIKVDEFITHRHPLNDINQAFHDMHKGDCIRAVVTMDE

SEQ ID NO: 14554 - DNA, 1134 bp, Branchiostoma floridae
  CDS (1)..(1134)
atggcggacactgcagggaagcccatctcgtgccgcgctgcggttgcctgggaggcgaagaagccgctggtgatcgagacgatcgaagtcgctcctccgaaggctcacgaggtccgcatcaaggtgctggctacaggagtgtgccacacggatgcctacacgctgtcgggggcggactcggaggggaagttcccggtggtgctgggccatgaggggggcggggtggtggagtctgtgggggaaggcgtgaccgggttccagccaggcgaccacgtcatccccctctacatcccgcagtgcagggactgcaagttctgcaggagccccaaaactaacctctgccagaaaatcagggtgtcccaaggtcagggagtgatgccggacggctcgtctcgcttcacctgcaaaggtcaaactgtttaccacttcatgggcacctcgaccttcagcgagtacaccgtggtggccgacatctctctgtgcaaggttgcagaatcggctcctctagagaaggtgtgtctgctgggctgtggcatctctactggctatggagctgctctcaacacagctaaggtcgagtcagggtcaaccgtggcagtctggggtctcggggctgttggattggctgttattatgggggcaaaagtcgccggggcgtcacgtatcatcggagtggacataaaccctgacaaggctgaaatagcacagaagttcggcatgacagagttcgttaaccccaaggaccacgacaggcccatccagcaggtgttggcagacatgacggacggcgggctcgactacaccttcgagtgtatcggcaacgtgcacactatgcgagcagccttggagtcctgccacaagggctggggcacgtccgttattattggagtggctgcagccgggcaggaaatctcgacccgcccgttccagctggtgacagggcgtgtgtggaagggcacggcgttcggaggctggaagagtgtggagagcgtgccgcggctggtgggggagtaccaggcaggcaagatcaaagtggacgagttcatctctcacaccttcccgctcgacaacatcaaccagtccttccaactcatgcatgatggggagagcatccggtctgtgatccacttctga

SEQ ID NO: 14555 - protein, 377 aa, Branchiostoma floridae
MADTAGKPISCRAAVAWEAKKPLVIETIEVAPPKAHEVRIKVLATGVCHTDAYTLSGADSEGKFPVVLGHEGGGVVESVGEGVTGFQPGDHVIPLYIPQCRDCKFCRSPKTNLCQKIRVSQGQGVMPDGSSRFTCKGQTVYHFMGTSTFSEYTVVADISLCKVAESAPLEKVCLLGCGISTGYGAALNTAKVESGSTVAVWGLGAVGLAVIMGAKVAGASRIIGVDINPDKAEIAQKFGMTEFVNPKDHDRPIQQVLADMTDGGLDYTFECIGNVHTMRAALESCHKGWGTSVIIGVAAAGQEISTRPFQLVTGRVWKGTAFGGWKSVESVPRLVGEYQAGKIKVDEFISHTFPLDNINQSFQLMHDGESIRSVIHF

SEQ ID NO: 14556 - DNA, 1134 bp, Branchiostoma floridae
  CDS (1)..(1134)
atggcggacactgcagggaagcccatctcgtgccgcgctgcggttgcctgggaggcgaagaagccgctggagatcgagacgatcgaagtcgctcctccgagggctcacgaggtccgcatcaaggtgctggctacaggagtctgccacacggatgcctacacgctgtcgggggcggactcggaggggaagttcccggtggtgctgggccatgaggggggcggggtggtggagtctgtgggagaaggcgtgacggggttccagccaggcgaccacgtcatccccctctacatcccgcagtgcagggactgcaagttctgcaggagccccaaaactaacctctgccagaaaatcagggtgtcccaaggtcagggagtgatgccggacggctcgtctcgcttcacctgcaaaggtcaaactgtttaccacttcatgggcacctcgaccttcagcgagtacaccgtggtggcggacatctctctgtgcaaggttgcagaatcggctcctctggagaaagtgtgtctgctgggctgtggcatctctactggctacggagctgctctcaacacagctaaggtcgagtcagggtcaaccgtagcagtctggggtctcggggctgtcggattggctgttatcatgggggcaaaggttgccggggcatctcgcatcatcggagtggacatcaaccctgacaaggctgaaatagcgcagaagttcggcatgacagagttcgttaaccccaaggaccacgacaggcccatccagcaggtgttggcggacatgacggacggcgggctcgactacaccttcgagtgtattggcaacgtgcacactatgcgagcagccttggagtcctgccacaagggctggggcacgtccgttattattggagtggctgcagccgggcaggaaatctcgacccgcccgttccagctggtgacagggcgtgtgtggaagggcacggcgttcggaggctggaagagtgtcgagagtgtgccacggctggtgggggagtaccaggctggcaagatcaaagtggacgagttcatctcccacaccttcccgctcgacaacatcaacgagtccttccgactcatgcatgatggggagagcatccggtctgtgatccacttctga

SEQ ID NO: 14557 - protein, 377 aa, Branchiostoma floridae
MADTAGKPISCRAAVAWEAKKPLEIETIEVAPPRAHEVRIKVLATGVCHTDAYTLSGADSEGKFPVVLGHEGGGVVESVGEGVTGFQPGDHVIPLYIPQCRDCKFCRSPKTNLCQKIRVSQGQGVMPDGSSRFTCKGQTVYHFMGTSTFSEYTVVADISLCKVAESAPLEKVCLLGCGISTGYGAALNTAKVESGSTVAVWGLGAVGLAVIMGAKVAGASRIIGVDINPDKAEIAQKFGMTEFVNPKDHDRPIQQVLADMTDGGLDYTFECIGNVHTMRAALESCHKGWGTSVIIGVAAAGQEISTRPFQLVTGRVWKGTAFGGWKSVESVPRLVGEYQAGKIKVDEFISHTFPLDNINESFRLMHDGESIRSVIHF

SEQ ID NO: 14558 - DNA, 1381 bp, Vitis vinifera
  CDS (34)..(1182)
acgaaacgttctctcagagttgttaaagcagccatgtctaatacagctggtcaggtcattaaatgcaaggctgcggtttcatgggaggcagggaagcccctggtgattgaagaagtggagctggctccaccacaggcaaatgaagttcgtatcaagatccttttcacctctctctgtcacactgatgtttacttctgggaggccaagggacaaaaaccagcatttcctcggatatttggccatgaagctgcaggagtggttgagagcgtgggtgagggcgtaacggatctcaaaccaggagacactgtcctcccggtgttcaccggagagtgcaaggagtgccggcactgtaaatcagaagagagcaacatgtgtgacctccttaggataaatacggacaggactgttatgctgagtgatggcaaatcgaggttcagcgctaagggaaagcccatctaccatttccttgggacctccacgttcagcgaatacaccgttgcccatgttggcagtgtggccaaaatcaatcctgctgccccacttgacaaagtttgcgttcttagttgtggaatatctacaggtctgggtgctgctatcaatgttgcaaaacccaaaaagggctcatctgttgcagtttttggattgggggctgtaggccttgcagctgctgaaggggctaggatttctggggcatcaaggatcatcggtgtcgatttgaacgccagtagatttgaacaagccaagaagtttggtgtgaccgagttcgtgaaccccaaagatcatgacaaacctgttcaagaggtgattgctgagatgaccgatggaggagttgaccggagcatagagtgtactggaagcgttgccgccatgatctctgcatttgaatgtgttcatgatggttggggcgttgctgttcttgttggtgtgccaaacagagacgattcattcaaaactcaccccataaatctactgaatgagaggactctcaagggcacattttttggcaacttcaaaccccgcaccgatcttccccgtctcgtggagaaatacgtgaataaggagctggacctgcaactggagaaattcatcacccatgaagtctccttctctgatatcaacaaagcatttgactacatgctgaagggggaaggcctccggtgcatcatccgcatgggagcctagaacacactctatgagtgaagtctatgttagatgatgagaaaataagggaggaatgagcctgtgtgaatgcgtgtaacgcaagagaaatttggctgtgttgttatatggtgtagccttttagacacttcttgtgttgttgaggatgattcaaaagcaactcccactcgcttgtggaaattctggtcaaaaaaaaaaaaaa

SEQ ID NO: 14559 - protein, 382 aa, Vitis vinifera
MSNTAGQVIKCKAAVSWEAGKPLVIEEVELAPPQANEVRIKILFTSLCHTDVYFWEAKGQKPAFPRIFGHEAAGVVESVGEGVTDLKPGDTVLPVFTGECKECRHCKSEESNMCDLLRINTDRTVMLSDGKSRFSAKGKPIYHFLGTSTFSEYTVAHVGSVAKINPAAPLDKVCVLSCGISTGLGAAINVAKPKKGSSVAVFGLGAVGLAAAEGARISGASRIIGVDLNASRFEQAKKFGVTEFVNPKDHDKPVQEVIAEMTDGGVDRSIECTGSVAAMISAFECVHDGWGVAVLVGVPNRDDSFKTHPINLLNERTLKGTFFGNFKPRTDLPRLVEKYVNKELDLQLEKFITHEVSFSDINKAFDYMLKGEGLRCIIRMGA

SEQ ID NO: 14560 - DNA, 1397 bp, Vitis vinifera
  CDS (58)..(1200)
acaaggaaaaccaggcaaaacgactgtcaacagtgtgagaaggaatatagcctaaagatgtcaagcacagctggtcaggttatacgctgcaaagccgcggtggcatgggaagcgggaaagccgttggtgatcgaagaagtggaagtggcgcctccacaggtcatggaggtccgtctgaagatcctcttcacttctctctgccacaccgatgtttacttctgggaagccaagggacaaacccctttatttcctcgcatatttggtcatgaggcaggcgggattgtggagagcgtgggtgagggtgtcacagatctccaacctggagaccatgttcttcctgtattcaccggagaatgcaaggagtgccggcattgcaagtcggaggagagtaacatgtgtgacctcctcaggattaacaccgacagaggcgtgatgctcagtgataacaagtcaagattctctattaatggaaaacccgtttaccattttgtggggacttccacatttagtgaatacactgtgatccatgttggttgcgttgccaagatcaaccccgctgccccactcgacaaagtttgtgttcttagctgtggaatctctacaggtcttggtgctaccttgaatgttgccaaaccatcgaagggttcatcaatcgccattttcggtttaggagcagtggggcttgctgctgctgagggagctagaattgcaggtgctgccagaattattgggattgatctaaaccctaagagatttaatgacgcaaagaaatttggcgtcactgagtttttgaacccaaaggatcatgacaagcctattcaagaggtgattgctgagatgaccgatgggggagtggacagaagcgttgagtgtaccggaaatgtcaatgctatgatttctgcatttgagtgtgttcatgatgggtggggtgttgctgtactggttggtgtgccaaacaaagacgactcattcaaaacgcatcccgtgaatctattgaacgagaggactctgaagggcactttctttggcaactacaaaccccgttccgaccttccttcagtggtggaaaaatacatgaacaaggagcttgaagtggagaaattcatcacacatgaagtcccttttgcagagatcaacaaggccttcgaatatatgctgagcggggatgggcttcgatgcatcattcgcatggatgcataaaacattggagagatttgcctattccagtcggcataagtgtcttaagtactgtcttttaatgcatttgagtttgctttttcaaagtgtgtttgcgtgatgagatcagattttgtggagagtaatgctatatgaataaagctttaatacaaacaatgtctatgcagttgcaatatataacagttttatcatctaaaaaa

SEQ ID NO: 14561 - protein, 380 aa, Vitis vinifera
MSSTAGQVIRCKAAVAWEAGKPLVIEEVEVAPPQVMEVRLKILFTSLCHTDVYFWEAKGQTPLFPRIFGHEAGGIVESVGEGVTDLQPGDHVLPVFTGECKECRHCKSEESNMCDLLRINTDRGVMLSDNKSRFSINGKPVYHFVGTSTFSEYTVIHVGCVAKINPAAPLDKVCVLSCGISTGLGATLNVAKPSKGSSIAIFGLGAVGLAAAEGARIAGAARIIGIDLNPKRFNDAKKFGVTEFLNPKDHDKPIQEVIAEMTDGGVDRSVECTGNVNAMISAFECVHDGWGVAVLVGVPNKDDSFKTHPVNLLNERTLKGTFFGNYKPRSDLPSVVEKYMNKELEVEKFITHEVPFAEINKAFEYMLSGDGLRCIIRMDA

SEQ ID NO: 14562 - DNA, 1140 bp, Oryza sativa
  CDS (1)..(1140)
atggcgacagccgggaaggtgatcaagtgcaaagcggcggtggcatgggaggccgggaagccgctgtcgatcgaggaggtggaggttgcgccgccgcaggccatggaggtccgcgtcaagatcctctacaccgccctctgccacaccgacgtctacttctgggaggccaaggggcaaacacctgttttccctaggatcttgggccatgaagctggaggcattgtggagagtgtgggagagggtgtgaccgaactcgcgccgggcgaccatgtcctcccggtgttcaccggcgagtgcaaggagtgtgatcactgcaaatcggaggagagcaacatgtgtgacctcctcaggatcaacgtcgaccgcggcgtcatgatcggcgacggcaagtcccgattcaccatcaaggggaagcccatcttccactttgttggcacatccaccttcagcgagtacaccgtcatccatgtcggctgcctcgcgaagatcaacccggaggcgcctctcgacaaggtctgcattctcagctgcggtttctctaccggttttggtgcaacagtgaatgtcgcgaaaccgaaaaagggccagaccgtggctattttcggtcttggagctgttggtcttgctgctatggaaggtgccaggctgtctggagcatcgaggatcattggtgtggacctgaaccctgcgaaattcgaacaagctaagaagtttggctgcactgacttcgtaaaccccaaggaccacagcaagccagtgcacgaggtgctgattgagatgaccaacggtggactcgacagggccgttgaatgcacgggcaacatcaacgccatgatatcctgcttcgaatgtgtccatgatggatggggcgttgcggtgctggtcggcgtgccgaccaaggatgatgtgttcaagacccacccgatgaacttcctcaacgagaagacgctcaaggggacgttcttcggtaactacaagccgcgcaccgacctgcccaacgtcgtcgagctgtacatgaagaaggagctggagctggagaagttcatcacgcacagcgtgccgttctcggagatcaacacggcgttcgatctcatgctcaagggggagagtctccgctgcgtcatgaggatggatgagtag

SEQ ID NO: 14563 - protein, 379 aa, Oryza sativa
MATAGKVIKCKAAVAWEAGKPLSIEEVEVAPPQAMEVRVKILYTALCHTDVYFWEAKGQTPVFPRILGHEAGGIVESVGEGVTELAPGDHVLPVFTGECKECDHCKSEESNMCDLLRINVDRGVMIGDGKSRFTIKGKPIFHFVGTSTFSEYTVIHVGCLAKINPEAPLDKVCILSCGFSTGFGATVNVAKPKKGQTVAIFGLGAVGLAAMEGARLSGASRIIGVDLNPAKFEQAKKFGCTDFVNPKDHSKPVHEVLIEMTNGGLDRAVECTGNINAMISCFECVHDGWGVAVLVGVPTKDDVFKTHPMNFLNEKTLKGTFFGNYKPRTDLPNVVELYMKKELELEKFITHSVPFSEINTAFDLMLKGESLRCVMRMDE

SEQ ID NO: 14564 - DNA, 1336 bp, Vitis vinifera
  CDS (49)..(1191)
ttcggcacgagcaactgtcaacagtgtgagaaggaatatagcctaaagatgtcaagcacagctggtcaggttatacgctgcaaagccgcggtggcatgggaagcgggaaagccgttggtgatcgaagaagtggaagtggcgcctccacaggtcatggaggtccgtctgaagatcctcgtcacttctctctgccacaccgatgtttacttctgggaagccaagggacaaacccctttatttcctcgcatatttggtcatgaggcaggcgggattgtggagagcgtgggtgagggtgtgacagatctccaacctggagaccatgttcttcctgtattcaccggagaatgcaaggagtgtcggcattgcaagtcggaggaaagtaacatgtgtgacctcctcaggataaacaccgacagaggcgtgatgctcagtgataacaagtcaagattctctattaatggaaaacccgtttaccattttgtggggacttccacatttagtgaatacactgtggttcatgttggttgcgttgccaagatcaaccccgctgctccactcgacaaagtttgtgttcttagctgtggaatctctacaggtcttggtgctaccttgaatgttgccaaaccatccaagggttcatcagttgccattttcggtttaggagctgtgggacttgctgctgctgagggagctagaattgcaggtgctgccagaattattgggattgatctaaaccctaagagatttaatgacgcaaagaaatttggcgtcactgagtttttgaacccaaaggatcatgacaagcctattcaagaggtgattgctgagatgaccgatgggggagtggacagaagtgttgagtgtaccggaaatgtcaatgctatgatatctgcatttgagtgtgttcatgatgggtggggtgttgctgtactggttggtgtgccaaacaaagacgactcattcaaaacgcatcccgtgaatctattgaacgagaggactctgaagggcactttctttggcaactacaaaccccgttccgaccttccttcagtggtggaaaaatacatgaacaaggagcttgaagtggagaaattcatcacacatgaagtcccttttgcagagatcaacaaggccttcgaatatatgcttagcggggatgggcttcgatgcatcattcgcatggatgcataaaacattggagagatttgcctattccagtcggcataagtgtctaagtacttactctgtcttttaatgcatttgagtttgcttttccaaagtgtgtcagattttgtggagagtaatgctatatggataatgctttaataaaaaaaaa

SEQ ID NO: 14565 - protein, 380 aa, Vitis vinifera
MSSTAGQVIRCKAAVAWEAGKPLVIEEVEVAPPQVMEVRLKILVTSLCHTDVYFWEAKGQTPLFPRIFGHEAGGIVESVGEGVTDLQPGDHVLPVFTGECKECRHCKSEESNMCDLLRINTDRGVMLSDNKSRFSINGKPVYHFVGTSTFSEYTVVHVGCVAKINPAAPLDKVCVLSCGISTGLGATLNVAKPSKGSSVAIFGLGAVGLAAAEGARIAGAARIIGIDLNPKRFNDAKKFGVTEFLNPKDHDKPIQEVIAEMTDGGVDRSVECTGNVNAMISAFECVHDGWGVAVLVGVPNKDDSFKTHPVNLLNERTLKGTFFGNYKPRSDLPSVVEKYMNKELEVEKFITHEVPFAEINKAFEYMLSGDGLRCIIRMDA

SEQ ID NO: 14566 - DNA, 1134 bp, Branchiostoma lanceolatum
  CDS (1)..(1134)
atggcggagactgcaggaaaacccatcacgtgccgcgcggcggttgcctgggaggcgaagaagccgctggtgatcgagacgatcgaagtcgctcctccgagggcgcacgaagtccgcatcaaggtactggctacaggagtctgccacacagatgcctacaccctggacgggtttgactcggagggaaagttcccggtggtgctgggccacgaggggggcggggtggtggagagtgtgggggaaggcgtctccgggttcaagcctggcgaccatgtcatccccctctacgtcccacagtgcaaggagtgcaagttctgcaagagccccaaaaccaacctgtgccagaaaatcagggtgacccaaggtcaaggtgtgatgcctgatggctcgactcgcttcacctgcaaaggtcagacggtgttccacttcatggggacctcgaccttcagcgagtacacggtggtggccgacatctctctctgcaaggttacagaatcggctcctcttgacaaagtgtgtctgctgggctgtggcatctccaccggctacggcgctgctctcaacacagctaaggtcgagtcagggtcaaccgtggcagtctggggcctcggagccgtgggattggctgttatcatgggggcaaaggtcgcaggcgcctcacgtatcatcggagtggacatcaaccctgacaaggcggaaatagcaaagaaattcggcatgacggagttcgttaaccccaaggaccatgacaagcccatccagcaggtgttggtggagctcacggacggcgggctggacttcaccttcgagtgcatcggcaacgtgcacaccatgcgagcagccttggagtcctgccacaagggctggggaacgtccgttatcatcggggtcgctgcagcagggcaggaaatctcgacccgtccgttccagctggtgaccggccgtgtgtggaagggaacggctttcggaggttggaagagtgtggacagcgtgcccaagctggtggaagagtaccagtccgggaagattcaggtcgacgagttcatctcgcacaacttcccgctggacaagatcaacgactccttccacctgatgcatgctggggagagtatccggtctgtggtccacttctga

SEQ ID NO: 14567 - protein, 377 aa, Branchiostoma lanceolatum
MAETAGKPITCRAAVAWEAKKPLVIETIEVAPPRAHEVRIKVLATGVCHTDAYTLDGFDSEGKFPVVLGHEGGGVVESVGEGVSGFKPGDHVIPLYVPQCKECKFCKSPKTNLCQKIRVTQGQGVMPDGSTRFTCKGQTVFHFMGTSTFSEYTVVADISLCKVTESAPLDKVCLLGCGISTGYGAALNTAKVESGSTVAVWGLGAVGLAVIMGAKVAGASRIIGVDINPDKAEIAKKFGMTEFVNPKDHDKPIQQVLVELTDGGLDFTFECIGNVHTMRAALESCHKGWGTSVIIGVAAAGQEISTRPFQLVTGRVWKGTAFGGWKSVDSVPKLVEEYQSGKIQVDEFISHNFPLDKINDSFHLMHAGESIRSVVHF

SEQ ID NO: 14568 - DNA, 1134 bp, Branchiostoma floridae
  CDS (1)..(1134)
atggcggacactgcagggaagcccatctcgtgccgcgctgcggttgcctgggaggcgaagaagccgctggtgatcgagacgatcgaagtcgctcctccgaaggctcacgaggtccgcatcaaggtgctggctacaggagtgtgccacacggatgcctacacgctgtcgggggcggactcggaggggaagttcccggtggtgctgggccatgaggggggcggggtggtggagagtgtgggggaaggcgtgaccgggttccagccaggcgaccatgtcatccccctctacatcccgcagtgcagggactgcaagttctgcaggagcccaaaaactaacctctgccagaaaatcagggtgtcccaaggtcagggagtgatgccggacggctcgtctcgcttcacctgcaaaggtcaaactgtttaccacttcatgggcacctcgaccttcagcgagtacaccgtggtggccgacatctctctgtgcaaggttgcagaatcggctcctctggagaaagtgtgtctgctgggctgtggcatctctactggctatggagctgctctcaacacagctaaggtcgagccagggtcaaccgtggcagtctggggtctcggggccgtcggattggctgttatcatgggggcaaaggtcgccggggcgtcacgcatcatcggagtggacattaaccctgacaaggctgaaatagcacagaagttcggcatgacagagttcgttaaccccaaggaccacgacaggcccatccagcaggtgttggcggacatgacggacggcgggctcgactacaccttcgagtgtatcggcaacgtgcacactatgcgagcagccttggaggcctgccacaagggctggggcacgtccgttattattggggttgctgcagccgggcaggaaatctcgacccgcccgttccagctggtgacagggcgtgtgtggaagggcacggcgttcggaggctggaagagtgtggagagtgtgccgcggctggtgggcgagtaccaggctggcaagatcaaagtggacgagttcatctcccacaccttcccgctcgacaacatcaacgagtccttccgactcatgcatgatggggagagcatccggtctgtgatccacttctga

SEQ ID NO: 14569 - protein, 377 aa, Branchiostoma floridae
MADTAGKPISCRAAVAWEAKKPLVIETIEVAPPKAHEVRIKVLATGVCHTDAYTLSGADSEGKFPVVLGHEGGGVVESVGEGVTGFQPGDHVIPLYIPQCRDCKFCRSPKTNLCQKIRVSQGQGVMPDGSSRFTCKGQTVYHFMGTSTFSEYTVVADISLCKVAESAPLEKVCLLGCGISTGYGAALNTAKVEPGSTVAVWGLGAVGLAVIMGAKVAGASRIIGVDINPDKAEIAQKFGMTEFVNPKDHDRPIQQVLADMTDGGLDYTFECIGNVHTMRAALEACHKGWGTSVIIGVAAAGQEISTRPFQLVTGRVWKGTAFGGWKSVESVPRLVGEYQAGKIKVDEFISHTFPLDNINESFRLMHDGESIRSVIHF

SEQ ID NO: 14570 - DNA, 1500 bp, Acinetobacter baumannii
  CDS (328)..(1437): transl_table=11
atcgatactactcaagctccaaatggcttctttgttgaaaatacgctctatacacctattagtgataacacgccatacccaccggatatttacctataagtaaaaataagctggttacaagataatgatttgataagaaacctcttcaagtaaggggttttctcgttttttaaatgtaggcttgcttagacgtatgtgactggctatgctgtaatggattgctatgaaagccaattttgatttaagcaaaattaagctcttgtattagcattacattatctattttgctcgactataaataccgaatgatataaaggaaacccaaagatgaaatctcgtgcagctgtcgcctttgctccaggaaaacctttagaaattgttgaaattgatgttgcaccacccaaagcgggagaggttttaatcaagattacccatactggagtatgtcacaccgatgcatttaccttatctggcgatgatccggaaggtgttttcccggcaatcttaggtcatgaaggcgcgggggtagtaattgaagttggtgagggggtaacaagcgttcagccgggtgatcatgttattccgctttatacggcagaatgtaaagaatgcttattttgtaaatctggaaaaaccaatctttgtgttgctgtacgtgcaactcaaggtaaaggcgttatgccagatggtactacacgtttttcatataagggcgaaccaatttaccactacatgggctgttcaacctttagtgaatatacggtagtagccgaagtatctttagctaagattaatcctgaggcgaatcacgagcaagtatgtttattaggttgtggggtaactacaggtattggtgccgtgcataacacagcgaaagtacaagagggcgactctgttgctgtatttggcttaggtggtatcggtttagccgttgtacaaggagcacgtcaagcaaaagcagggcgcattattgtcgtagatacaaatccagataaatttgagctggcaaaacagtttggcgctacagatttcttaaatcctaaagattatgaccaacctattcagcaagtcattgtagaaatgacaggctggggcgtagatcattcatttgaatgtattggaaacgtcaatgttatgcgctcagctctagagtgtgcacatcgtggttggggacaatctgtcattattggtgtagcgggtgcaggccaagaaatttcaactcgtccgttccagttagttactggccgtaaatggttgggtacagcatttggtggtgtgaaagggcgctcacaacttcctaaaatggtcgaagatgctatgaaaggtgatattcaacttgaaccttttgttactcataccatgcctttacaagacattaatactgcttttgatttaatgcatgaaggtaaatcaattcgtactgtcattcatttttaaaggaaataaaaagggctatgatttagcccttttttacgcttcatagttttatattttaaatgg

SEQ ID NO: 14571 - protein, 369 aa, Acinetobacter baumannii
MKSRAAVAFAPGKPLEIVEIDVAPPKAGEVLIKITHTGVCHTDAFTLSGDDPEGVFPAILGHEGAGVVIEVGEGVTSVQPGDHVIPLYTAECKECLFCKSGKTNLCVAVRATQGKGVMPDGTTRFSYKGEPIYHYMGCSTFSEYTVVAEVSLAKINPEANHEQVCLLGCGVTTGIGAVHNTAKVQEGDSVAVFGLGGIGLAVVQGARQAKAGRIIVVDTNPDKFELAKQFGATDFLNPKDYDQPIQQVIVEMTGWGVDHSFECIGNVNVMRSALECAHRGWGQSVIIGVAGAGQEISTRPFQLVTGRKWLGTAFGGVKGRSQLPKMVEDAMKGDIQLEPFVTHTMPLQDINTAFDLMHEGKSIRTVIHF

SEQ ID NO: 14572 - DNA, 1140 bp, Boechera parishii
  CDS (1)..(1140)
atgtctaccaccggacagattgttcgatgcaaagctgctgtggcatgggaagccggaaagccactggtgatggaggaagtggaggttgctccaccgcagaaacacgaagttcgtattaagattctattcacttctctctgtcacaccgatgtttacttctgggaagccaagggacaaacaccgttgtttcctcgtatcttcggccatgaagctggaggtattgttgagagtgttggagaaggagtgactgatcttcaaccaggagatcatgttttaccggtcttcaccggagaatgtggtgattgtcgtcattgtcactcggaggaatccaacatgtgtgatcttctcaggatcaacaccgaacgaggcgtgatgattcatgacggtgaatctagattctccattaatggcaaaccgattcatcatttcgttgggacttccacttttagtgagtacactgtcgttcactctggtcaggtcgctaagatcaatcctgatgctccccttgacaaagtttgtatcgtcagttgtggtttatccactgggttaggagccactttgaatgtggctaaacctaagaaaggtcaaagtgttgccattttcggactcggtgctgttggtttagccgctgcagaaggtgctagaattgccggtgcttctagggtcattggtgttgatctcaaccccaaaagattcgatgaagctaagaaattcggtgtgactgagtttgtgaacccaaaggaccatgacaaaccagtccaacaggtgatcgctgaaatgaccgatggtggggtggaccggagtgtggagtgtaccggaagcgttcaggccatgattcaagcatttgaatgtgttcatgatggttggggtgttgcagtactggtcggagtgccaagcaaagacgatgccttcaagtctcatccgatgaatttcttgaatgagaggactcttaagggtactttctttgggaactacaaacccaaaactgacattcctgggattgtcgaaatgtacatgaacaaggagctggagcttgagaaattcatcactcacacagtgccattctcagagatcaacaaggcctttgattacatgttgaagggagagagtatccgctgcatcatcaccatgggtgcttga

SEQ ID NO: 14573 - protein, 379 aa, Boechera parishii
MSTTGQIVRCKAAVAWEAGKPLVMEEVEVAPPQKHEVRIKILFTSLCHTDVYFWEAKGQTPLFPRIFGHEAGGIVESVGEGVTDLQPGDHVLPVFTGECGDCRHCHSEESNMCDLLRINTERGVMIHDGESRFSINGKPIHHFVGTSTFSEYTVVHSGQVAKINPDAPLDKVCIVSCGLSTGLGATLNVAKPKKGQSVAIFGLGAVGLAAAEGARIAGASRVIGVDLNPKRFDEAKKFGVTEFVNPKDHDKPVQQVIAEMTDGGVDRSVECTGSVQAMIQAFECVHDGWGVAVLVGVPSKDDAFKSHPMNFLNERTLKGTFFGNYKPKTDIPGIVEMYMNKELELEKFITHTVPFSEINKAFDYMLKGESIRCIITMGA

SEQ ID NO: 14574 - DNA, 1140 bp, Arabidopsis halleri
  CDS (1)..(1140)
atgattaccaccggacagagtattcgatgcaaagctgctgtggcatgggaagccggaaagccactggttatggaggaagtggaggttgctccgccgcagaaacacgaagttcgtatcaagattctcttcacttccctctgtcacactgatgtttacttctgggaagctaagggacaaacaccgctgtttcctcgtatcttcggccatgaagctggagggattgttgagagtgttggagaaggagtgactgatcttcagccaggagatcatgtgttgcccatcttcaccggagaatgtggagattgtcctcattgtcactcggaggaatcaaacatgtgtgatcttctcaggatcaacaccgagcgaggagggatgattcacgatggtgaatcgagattctccatcaatggcaaaccaattcatcatttccttgggacttccacgtttagtgagtacactgtggttcactccggtcaggtcgctaagatcaatccggatgctcctcttgacaaagtttgcattgttagttgtggtttatccactgggttaggagcaactttgaatgtggctaaacccaagaaaggtcaaagtgttgccattttcggacttggtgctgttggtttagctgctgcagaaggtgctagaatcgctggtgcttctaggatcatcggtgttgatcttaactctcaaagattcgaccaagctaaggaattcggtgtgaccgagtttgtgaacccgagagaccatgacaaaccagttcaacaggtgatcgctgagatgacgaatggaggagtggacaggagtgtggagtgcactggaagcgttcaggccatgattcaagcatttgaatgtgttcatgatggttggggtgttgcggtgctggtcggtgtgccaagcaaagacgatgccttcaagactcatccgatgaatttcttgaatgagaggactcttaagggtactttcttcgggaactacaaacccaaaactgacattcccggggttgtagaaaagtacatgaacaaggagctggagcttgagaaattcatcacccatacagtgccattctcggagatcaacaaggcctttgattacatgttgaagggagagagtattcgttgcatcatcaccatgggtgcttga

SEQ ID NO: 14575 - protein, 379 aa, Arabidopsis halleri
MITTGQSIRCKAAVAWEAGKPLVMEEVEVAPPQKHEVRIKILFTSLCHTDVYFWEAKGQTPLFPRIFGHEAGGIVESVGEGVTDLQPGDHVLPIFTGECGDCPHCHSEESNMCDLLRINTERGGMIHDGESRFSINGKPIHHFLGTSTFSEYTVVHSGQVAKINPDAPLDKVCIVSCGLSTGLGATLNVAKPKKGQSVAIFGLGAVGLAAAEGARIAGASRIIGVDLNSQRFDQAKEFGVTEFVNPRDHDKPVQQVIAEMTNGGVDRSVECTGSVQAMIQAFECVHDGWGVAVLVGVPSKDDAFKTHPMNFLNERTLKGTFFGNYKPKTDIPGVVEKYMNKELELEKFITHTVPFSEINKAFDYMLKGESIRCIITMGA

SEQ ID NO: 14576 - DNA, 1140 bp, Capsella rubella
  CDS (1)..(1140)
  misc_feature (1126)..(1126): n is a, g, c or t
atgattaccaccggactttttattcgatgcaaagctgctgtgtcgtgggaagccggaaagccactggtgatggaggaagtggaggttgctccaccgcagaaacacgaagttcgtatcaagattctcttcacttctctctgtcacaccgacgtttacttctgggaagctaaggggcaaacaccgttgtttcctcgtatcttcggacatgaagctggagggattgttgagagtgttggagaaggagtgactgatcttcaaccaggagatcatgttttacccatcttcaccggagagtgtggggattgtcctcactgtcactccgaggaatccaacatgtgtgatcttctcaggatcaacaccgagcgtggagggatgattcacgacggtgaatctagattctccattaatggcaaacccattcatcatttccttgggacttccacgtttagtgagtacactgtggttcactctggccaggtcgctaagatcaacccggatgctcctcttgacaaagtctgtattgtcagttgtggtttatcgactgggttaggagctactttgaatgtggctaaacccaagaaaggtcaaagtgttgccatttttggactaggtgctgttggtttagccgctgcagaaggtgctaggattgctggcgcttctaggatcattggtgttgatcttaaccccagtagattcgatcaagctaagaaatttggtgtgaccgagtttgtgaacccaaaagaccatgacaaaccagtccaacaggtgatcgctgaaatgaccaatggtggggtggaccggagtgtggagtgtaccggaagcgtccaggccatgatccaagcatttgaatgtgttcatgatggttggggtgttgcggtgctggtcggtgtgccaagcaaagacgatgcattcaagtctcatccgatgaatttcttgaatgagagaacccttaagggtactttctttggaaactacaaacccaaaactgacattcccggggttgtcgaaaaatacatgaacaaggagctggagcttgagaaattcatcactcacacagtgccattctcagagatcaataaggcctttgattacatgttgaagggagagagtatccgttgcatcatcnccatgggtgcttga

SEQ ID NO: 14577 - protein, 379 aa, Capsella rubella
  misc_feature (376)..(376): The Xaa at location 376 stands for Ala, Pro, Ser, or Thr.
MITTGLFIRCKAAVSWEAGKPLVMEEVEVAPPQKHEVRIKILFTSLCHTDVYFWEAKGQTPLFPRIFGHEAGGIVESVGEGVTDLQPGDHVLPIFTGECGDCPHCHSEESNMCDLLRINTERGGMIHDGESRFSINGKPIHHFLGTSTFSEYTVVHSGQVAKINPDAPLDKVCIVSCGLSTGLGATLNVAKPKKGQSVAIFGLGAVGLAAAEGARIAGASRIIGVDLNPSRFDQAKKFGVTEFVNPKDHDKPVQQVIAEMTNGGVDRSVECTGSVQAMIQAFECVHDGWGVAVLVGVPSKDDAFKSHPMNFLNERTLKGTFFGNYKPKTDIPGVVEKYMNKELELEKFITHTVPFSEINKAFDYMLKGESIRCIIXMGA

SEQ ID NO: 14578 - DNA, 1140 bp, Brassica oleracea
  CDS (1)..(1140)
  misc_feature (258)..(258): n is a, g, c or t
atgtctaccaccggacagattattcgatgcaaagctgccgtttgctgggaagctggaaagccactagtgatggaggaagtggaggttgctccaccgcagaaacacgaagttcgtatcaagattctcttcacttctctctgtcacaccgatgtttacttctgggaagctaagggacaaacgcctttgtttccacgtatcttcggacatgaagctggaggtattgtggagagtgttggagaaggagtaactgatctccanccaggagaccacgtcctccccatcttcaccggagaatgcggagactgccctcactgccactccgaggagtccaacatgtgcgaccttctcaggatcaacaccgagagaggagggatgatacacgacggcgaatcgagattctccatcaacggcaaaccgatccaccatttccttgggacctcaacgtttagcgagtacaccgtggtccactctggtcaagtcgctaagatcaaccctgaagctcctcttgacaaagtctgcatcgtcagctgtggcttgtccactgggcttggagctactttgaatgttgctaagcccaagaaaggtcagagcgttgctatcttcggtcttggcgctgttggattggctgctgcggaaggtgctaggattgctggtgctggtaggatcattggtgttgatcttaaccccaagagattcgaggaagctaagaagttcggtgtgacggagtttgtgaaccctaaggaacatgacaagccagttcaggaagtcatcgctgagatgactaacggcggtgtggacaggagtgtggagtgcactggaagcattcaagccatgattcaagcctttgaatgtgttcacgatggctggggtgtggcggtgctggttggtgtgccgagcaaagacgatgccttcaagactcatccgatgaaccttctgaacgagaggacactcaagggtactttctttggcaactacaaacccaaaaccgacattcccggggtggtcgaaaagtacatgaacaaggagctggagcttgagaagttcattactcacacagtgccattctctgagatcaacaaggcctttgattacatgttaaaaggagagagtatccgttgcatcatcaccatgggtgcttga

SEQ ID NO: 14579 - protein, 379 aa, Brassica oleracea
  misc_feature (86)..(86): The Xaa at location 86 stands for Gln, or His.
MSTTGQIIRCKAAVCWEAGKPLVMEEVEVAPPQKHEVRIKILFTSLCHTDVYFWEAKGQTPLFPRIFGHEAGGIVESVGEGVTDLXPGDHVLPIFTGECGDCPHCHSEESNMCDLLRINTERGGMIHDGESRFSINGKPIHHFLGTSTFSEYTVVHSGQVAKINPEAPLDKVCIVSCGLSTGLGATLNVAKPKKGQSVAIFGLGAVGLAAAEGARIAGAGRIIGVDLNPKRFEEAKKFGVTEFVNPKEHDKPVQEVIAEMTNGGVDRSVECTGSIQAMIQAFECVHDGWGVAVLVGVPSKDDAFKTHPMNLLNERTLKGTFFGNYKPKTDIPGVVEKYMNKELELEKFITHTVPFSEINKAFDYMLKGESIRCIITMGA

SEQ ID NO: 14580 - DNA, 1140 bp, Arabis blepharophylla
  CDS (1)..(1140)
atgattaccaccggacagattattcgatgcaaagctgctgtggcatgggaagccggaaaaccactggttatggaggaagtagaggttgctccgccgcaaaaacatgaagttcgtatcaagatcctcttcacttctctttgtcacaccgatgtttacttctgggaagcaaagggacaaacaccgttgtttcctcgtatcttcggtcatgaagctggagggattgtggagagtgttggagaaggtgtgactgatcttgcaccaggagatcatgtgttaccaatcttcaccggagaatgtggtgattgtcctcattgtcactctgaggaatcaaacatgtgtgatcttctcaggatcaataccgaacgaggagggatgatacatgacggtgaatcgaggttctctatcgatgggaaaccgatttatcatttcgttgggacatcaacgtttagtgagtacactgtgattcactctggtcaggttgctaagatcaatcctgatgctcctcttgataaagtctgcattgttagttgtggtttatctactgggttaggagctactttgaatgttgctaaaccgaaaaagggtcaaagtgttgcgatttttggactcggtgctgttggtttagccgctgctgaaggtgctagaatcgctggtgcttctaggatcattggtgttgatctcaactcaaagagattcgatgaagctaagaaattcggtgtgaccgagtttgtgaacccgaaagaccatgacaaacctgttcaacaggtgatcgctgagatgacggatggtggagttgaccgaagtgtggagtgtactggaagcgttcaggccatgattcaagcatttgaatgtgttcacgatggttggggtgttgcggtgcttgtcggtgtgccaagcaaagacgatgccttcaagactcatccaatgaatttcctgaatgagaggactctcaagggtactttctttgggaactacaaacccaaaactgacattcccggggttgtggaacagtacatgaacaaggagctggagattgagaaattcatcactcacacagtgccattctcggagatcaacaaggcctttgattacatgttgaagggagagggtaaccgttgcatcatccgcatgggtgcttga

SEQ ID NO: 14581 - protein, 379 aa, Arabis blepharophylla
MITTGQIIRCKAAVAWEAGKPLVMEEVEVAPPQKHEVRIKILFTSLCHTDVYFWEAKGQTPLFPRIFGHEAGGIVESVGEGVTDLAPGDHVLPIFTGECGDCPHCHSEESNMCDLLRINTERGGMIHDGESRFSIDGKPIYHFVGTSTFSEYTVIHSGQVAKINPDAPLDKVCIVSCGLSTGLGATLNVAKPKKGQSVAIFGLGAVGLAAAEGARIAGASRIIGVDLNSKRFDEAKKFGVTEFVNPKDHDKPVQQVIAEMTDGGVDRSVECTGSVQAMIQAFECVHDGWGVAVLVGVPSKDDAFKTHPMNFLNERTLKGTFFGNYKPKTDIPGVVEQYMNKELEIEKFITHTVPFSEINKAFDYMLKGEGNRCIIRMGA

SEQ ID NO: 14582 - DNA, 1140 bp, Arabis alpina
  CDS (1)..(1140)
atgattaccaccggacagattattcgatgcaaagctgctgtagcatgggaagcaggaaagccactggttatggaagaagtcgaggttgctccacctcaaaaacatgaagttcgtatcaagattctcttcacttctctttgtcacaccgatgtttacttctgggaagctaagggacaaacaccattgtttcctcgtatcttcggtcatgaagctggaggtattgtggagagtattggagaaggagtgactgatctagcaccaggagatcatgtattaccaatctttacaggagaatgtggtgattgtcgttattgtcactctgaggaatcaaacatgtgtgatcttctaaggatcaatacagaccgaggagggatgatacacgacggtgaatcgaggttttctatcgatgggaaaccgatttatcattttcttggtacatctacgtttagtgaatacactgttgttcactctggtcaagttgctaagatcaatcctgaagctcctcttgataaagtctgcattgttagttgtggtgtatctactgggttaggagctactttgaatgttgctaaaccgaaaaagggtcaaagcgttgcgatttttggacttggtgctgttggtttagctgctgctgaaggtgctagaatggctggtgccggtaggattattggtgttgatcttaacccgaagagatttgaagaagctaagaaattcggtgtgaccgagtttgtgaacccgaaagaccatgacaagcctgtacaacaggtgattgctgagatgacagacggtggtgtggaccggagtgtggagtgtaccggaagtgttcaggctatgattcaagcatttgaatgtgttcacgacggttggggtgttgcggtgctggttggtgtgccgagcaaagacgatgcattcaagactcatccgatgaatttgctgaatgagaggactctcaagggtactttctttgggaactacaaaccaaaaaccgatattcccggggttgtcgaacagtacatgaacaaggagctggaggttgagaaattcatcactcacaccgtgccattctcggagatcaacaaggcatttgattacatgttgaagggagagggtatccgttgcatcatcaccatgggtgcttga

SEQ ID NO: 14583 - protein, 379 aa, Arabis alpina
MITTGQIIRCKAAVAWEAGKPLVMEEVEVAPPQKHEVRIKILFTSLCHTDVYFWEAKGQTPLFPRIFGHEAGGIVESIGEGVTDLAPGDHVLPIFTGECGDCRYCHSEESNMCDLLRINTDRGGMIHDGESRFSIDGKPIYHFLGTSTFSEYTVVHSGQVAKINPEAPLDKVCIVSCGVSTGLGATLNVAKPKKGQSVAIFGLGAVGLAAAEGARMAGAGRIIGVDLNPKRFEEAKKFGVTEFVNPKDHDKPVQQVIAEMTDGGVDRSVECTGSVQAMIQAFECVHDGWGVAVLVGVPSKDDAFKTHPMNLLNERTLKGTFFGNYKPKTDIPGVVEQYMNKELEVEKFITHTVPFSEINKAFDYMLKGEGIRCIITMGA

SEQ ID NO: 14584 - DNA, 1140 bp, Aubrieta deltoidea
  CDS (1)..(1140)
atgtctaccaccggacagattattcgatgcaaagctgctgtagcatgggaagccggaaagccactggttatggaggaagtagaggttgctccgccgcaaaaacacgaagtccgtatcaagatcctcttcacttctctttgtcacaccgatgtttacttctgggaagctaagggacaaacaccattgtttcctcgtatcttcggtcatgaagctggagggattgtggagagtattggagaaggtgtgactgatcttgcaccaggagaccatgtgttaccgatattcaccggagaatgtggcgattgtcgtcattgtcattccgaggaatcaaacatgtgtgatcttcttaggatcaatacagagagaggagggatgatacacgacggtgaatcgaggttctcgatcgatgggaaaccgatttatcatttcgtggggacgtcgacgtttagcgagtacactgtggttcactctggtcaggtggctaagatcaatcctgaagctcctcttgataaagtctgcattgttagttgtggtttatctactggtttaggagctactttgaatgttgctaaaccgaaaaagggacagagtgtcgcgattttcggtctcggtgctgttggtttagccgctgctgaaggggcgaggatcgctggtgctggtaggattatcggtgttgatcttaacccgaaaagatttgaagaagctaagaaattcggtgtgaccgagtttgtgaacccgaaagaccatgagaaacccgttcagcaggtgatcgctgagatgacggatggtggagttgaccggagtgtggagtgcaccggaagcgttcaggccatgattcaagcgtttgaatgtgttcatgacggttggggtgttgcggtgctagtcggtgtgccgagcaaagacgatgccttcaagagtcatccaatgaatttcctgaatgagaggacactcaaaggtactttctttgggaactacaaacccaaaaccgacattcccggggttgtcgaaaagtacatgaacaaggagctggatattgagaaattcatcactcacaccgtgccattctcggagatcaacaaggctttcgattacatgttgaagggagaaggtatccgttgcatcatcaccatgggtgcttga

SEQ ID NO: 14585 - protein, 379 aa, Aubrieta deltoidea
MSTTGQIIRCKAAVAWEAGKPLVMEEVEVAPPQKHEVRIKILFTSLCHTDVYFWEAKGQTPLFPRIFGHEAGGIVESIGEGVTDLAPGDHVLPIFTGECGDCRHCHSEESNMCDLLRINTERGGMIHDGESRFSIDGKPIYHFVGTSTFSEYTVVHSGQVAKINPEAPLDKVCIVSCGLSTGLGATLNVAKPKKGQSVAIFGLGAVGLAAAEGARIAGAGRIIGVDLNPKRFEEAKKFGVTEFVNPKDHEKPVQQVIAEMTDGGVDRSVECTGSVQAMIQAFECVHDGWGVAVLVGVPSKDDAFKSHPMNFLNERTLKGTFFGNYKPKTDIPGVVEKYMNKELDIEKFITHTVPFSEINKAFDYMLKGEGIRCIITMGA

SEQ ID NO: 14586 - DNA, 1403 bp, Hibiscus syriacus
  CDS (22)..(1170)
agtatttgaaactcgtagacaatgagctctgctggtcaggttatccgttgcaaagctgcggtagcatgggaggctgggaagccactgtcgatagaagaagtggaagtggcaccaccccaaaaggatgaagtccgtattaagattctcttcactgctttatgtcacactgatgtctactactgggagtgcaagggttacactcctctgtttcctcgcatacttggtcatgaggcctcagggatcgtggagagtgtaggtgagggcgtgaccgacgtgaaaccgggagatcatgtgctccctatcttcaccggagagtgcaagcaatgtcgccactgcctgtccgaagaaagcaataacatgtgcgatctccttcgtattaactgcgaccgaggtgttatgctcgcagacggcaagacccgattttccatcaacggcaagccaatctaccacttcgttggaacctctacttttagccaatatactgtagtccatgttggccaggttgctaagatcaatcccaccgccccgctcgacaaagtctgccctattagctgcggaatatgtacaggttttggggccactgtcaatgttgctaaacccaaaaagggtcaaactgttgcaattttcggactgggtgctgttggccttgctgctgctgaaggtgcaaggatttgtggggcatctcgaatcatcgctgtcgatctgaatccgagaagattcgaagaagctaagaggtttgggattacagaatttgtgaatccaaaagactacgacaagcctgttcaagaggtgatcgttgagatgaccggcggaggagtggatcgcagtgtcgagtgtactgggagcgtccaggccatgatttcggcattcgaatgcgtccatgatggttggggtgtttgtgtgcttgttggtgtgccgaagaaagacgatgcattcaagacccatccaatgaatctactgagtgagaggaccctcaagggtgctttctacggcaactacaaaccgcgcactgatattcccatggttgtcgacaaatacttgaacaaggagctggggctggatatggacaagttcatcactcactctgtcccttttgccgacatcaacaaggctttcgactacatgctgcaaggcataggtctgagatgcatgattcatttggatgcttaagcaagtagtgctgtgctgctgcatattgatctatttgtggatcagaagtctaccttgtattgtactgtgtgatattttgtgtctactttcccagttatcaagagtgctcttgtcaatataaaactctaaactacataagagttttatattatgtgctgagagaataagcaagttatgttgtgtgagtgaaataaatttctacttttgagaaaaaaaaaaaaaaaaaaaaaaaa

SEQ ID NO: 14587 - protein, 382 aa, Hibiscus syriacus
MSSAGQVIRCKAAVAWEAGKPLSIEEVEVAPPQKDEVRIKILFTALCHTDVYYWECKGYTPLFPRILGHEASGIVESVGEGVTDVKPGDHVLPIFTGECKQCRHCLSEESNNMCDLLRINCDRGVMLADGKTRFSINGKPIYHFVGTSTFSQYTVVHVGQVAKINPTAPLDKVCPISCGICTGFGATVNVAKPKKGQTVAIFGLGAVGLAAAEGARICGASRIIAVDLNPRRFEEAKRFGITEFVNPKDYDKPVQEVIVEMTGGGVDRSVECTGSVQAMISAFECVHDGWGVCVLVGVPKKDDAFKTHPMNLLSERTLKGAFYGNYKPRTDIPMVVDKYLNKELGLDMDKFITHSVPFADINKAFDYMLQGIGLRCMIHLDA

SEQ ID NO: 14588 - DNA, 1754 bp, Hordeum vulgare
  CDS (101)..(1240)
acacggatttttgatcctgtgaagtgagagatcagttctcgatttcgattccgggctcacagaatttttcgattcaaggcgacgcgaagcacagagaaagatggcgacggccggcaaggtgatcaagtgcaaagccgcggtggcctgggaggccgggaagccgctgaccatggaggaggtggaggtggcgccgccgcaggccatggaggtgcgcgtcaagatcctcttcacctccctctgccacaccgacgtctacttctgggaggccaaggggcagatccccatgttccctcggatcttcggccatgaagctggaggcatagtggagagtgttggagagggcgtgactgatgttgcccctggtgaccacgtcctccctgtgttcactggggagtgtaaggaatgcccacattgcaagtctgcggagagcaacatgtgtgatctgctcaggatcaacaccgacagaggtgtgatgatcggggatggcaagtcgcgcttctctattggcggcaagccgatttaccatttcgtagggacttccaccttcagtgagtacactgtcatgcatgtcggttgtgttgccaagatcaaccctgaggctccccttgataaagtctgtgttcttagctgtggtatttccactggtcttggcgcgtcaattaatgttgcaaaaccaccaaagggttccacagtggcgatatttgggctaggagctgttggccttgctgctgcagaaggtgcaaggattgcaggtgcatcaaggatcattggtgttgacctgaacgccgtcagatttgaagaggctaggaagtttggctgcacggaatttgtgaacccgaaagatcacaccaagccagttcagcaggtgctcgctgacatgacaaatggcggagttgaccgcagtgttgagtgcactggcaacgtcaatgctatgatacaagcatttgaatgtgttcatgatggctggggtgtagctgtgctggtgggtgtgccacacaaggacgctgaattcaagacccacccgatgaacttcctgaatgagaggaccctgaagggcaccttcttcggtaacttcaagccgcgcactgacctgcccaatgtcgtggagatgtacatgaagaaggagctggaggtggagaagttcatcacacacagcgtgccgttctcggagataaacacagccttcgaccttatggcgaagggggagggcatccgttgcatcatccgcatggacaactaggcgtcctcctcaagtgcttctgatcgctccgatgtaataagcgctgggggccggtcttctgaaccagatcatcggtgatggtaatacacttccatgtatcatcgtctgcggtttcgccttccttggccaaagtggcatagcccagtggttgggggcgcatgattgtaaacctaacgaccagagttcgattctctgtcagagacgaatttctggaattctcatgagggatgcttcttcatatcaataaaccgtgggtgctagtgcccatggagtttcatttttttcaaagtagcgtaatattagttatgtatatctgtaattaccttaccggagaagtggttgtactacgagctctttttcgcagcaaagtaatgctgctgctgctgctgctgctatggccatgagtttcagttgaaaaaaaaaaaaaaaaaaaaaaaaaaaaaaaaaaaaaaaaaaaaaaaaaaaaaaaaaaaaaaaaaaaaaaaaaaaaaaaaaaaaaaaaaaaaaaaaaaaa

SEQ ID NO: 14589 - protein, 379 aa, Hordeum vulgare
MATAGKVIKCKAAVAWEAGKPLTMEEVEVAPPQAMEVRVKILFTSLCHTDVYFWEAKGQIPMFPRIFGHEAGGIVESVGEGVTDVAPGDHVLPVFTGECKECPHCKSAESNMCDLLRINTDRGVMIGDGKSRFSIGGKPIYHFVGTSTFSEYTVMHVGCVAKINPEAPLDKVCVLSCGISTGLGASINVAKPPKGSTVAIFGLGAVGLAAAEGARIAGASRIIGVDLNAVRFEEARKFGCTEFVNPKDHTKPVQQVLADMTNGGVDRSVECTGNVNAMIQAFECVHDGWGVAVLVGVPHKDAEFKTHPMNFLNERTLKGTFFGNFKPRTDLPNVVEMYMKKELEVEKFITHSVPFSEINTAFDLMAKGEGIRCIIRMDN

SEQ ID NO: 14590 - DNA, 1611 bp, Zea mays
  CDS (100)..(1239)
atctcgctttggatcgattggtttcgtaactggtgaaggactgagggtctcggagtggatcgatttgggattctgttcgaagatttgcggaggggggcaatggcgaccgcggggaaggtgatcaagtgcaaagctgcggtggcatgggaggccggcaagccactgtcgatcgaggaggtggaggtagcgcctccgcaggccatggaggtgcgcgtcaagatcctcttcacctcgctctgccacaccgacgtctacttctgggaggccaaggggcagactcccgtgttccctcggatctttggccacgaggctggaggtatcatagagagtgttggagagggtgtgactgacgtagctccgggcgaccatgtccttcctgtgttcactggggagtgcaaggagtgtgcccactgcaagtcggcagagagcaacatgtgtgatctgctcaggatcaacaccgaccgcggtgtgatgattgccgatggcaagtcgcggttttcaatcaatgggaagcctatctaccactttgttgggacttccaccttcagcgagtacaccgtcatgcatgtgggttgtgttgcaaagatcaaccctcaggctccccttgataaagtttgcgtccttagctgtggttattctaccggtcttggtgcatcaattaatgttgcaaaacctccgaagggttcgacagtggctgttttcggtttaggagccgttggtcttgccgctgcagaaggtgcaaggattgctggagcgtcaaggatcattggtgtcgacctgaaccccagcagattcgaagaagctaggaagttcggttgcactgaatttgtgaacccaaaagaccacaacaagccagtgcaggaggtacttgctgagatgaccaacggaggggtcgaccgcagtgtggaatgcactggcaacattaatgctatgatccaagctttcgaatgtgttcatgatggctggggtgttgctgtgctggtgggtgtgccacataaggacgctgagttcaagacccacccgatgaacttcctgaacgaaaggaccctgaaggggaccttctttggcaactataagccacgcactgatctgccaaatgtggtggagctgtacatgaaaaaggagctggaggtggagaagttcatcacgcacagcgtcccgttcgccgagatcaacaaggcgttcgacctgatggccaagggggagggcatccgctgcatcatccgcatggagaactagatttcgctgtctagtttgtgatctggcctaggcttggggttaataaaggaggcaatgctagcctgccctttcgatgaggaggtacatacacgctggcgatggaccgcgcttgtgtgtcgcgttcagtttggcttttgccaagcactagggtagcttcccgtgtcggtaattatatggtatgaaccatcaccttttggctctacacggtatgaacgtaagatacaaattccaactacctctagctcgcttgtgtggtatctgtatcagtatacatgtgtttgtttgcttatgtgtttgtttgcttgtatttgctggtgtctgtatcgcgggatgcaatgagttgttgtttggttgtgtcaaccaggctcaaat

SEQ ID NO: 14591 - protein, 379 aa, Zea mays
MATAGKVIKCKAAVAWEAGKPLSIEEVEVAPPQAMEVRVKILFTSLCHTDVYFWEAKGQTPVFPRIFGHEAGGIIESVGEGVTDVAPGDHVLPVFTGECKECAHCKSAESNMCDLLRINTDRGVMIADGKSRFSINGKPIYHFVGTSTFSEYTVMHVGCVAKINPQAPLDKVCVLSCGYSTGLGASINVAKPPKGSTVAVFGLGAVGLAAAEGARIAGASRIIGVDLNPSRFEEARKFGCTEFVNPKDHNKPVQEVLAEMTNGGVDRSVECTGNINAMIQAFECVHDGWGVAVLVGVPHKDAEFKTHPMNFLNERTLKGTFFGNYKPRTDLPNVVELYMKKELEVEKFITHSVPFAEINKAFDLMAKGEGIRCIIRMEN

SEQ ID NO: 14592 - DNA, 1469 bp, Pennisetum americanum
  CDS (97)..(1236)
tatgaggtattggcttggaggtgaggtgcgtgcttggagttggagggagctgctttgtttgggattccgttcgggaatttggggaaggaagaagcaatggcgacggcggggaaggtgatcaagtgcaaagccgcggtggcatgggaggccggcaagccgctatcgatcgaggaggtggaggtggcgccgccgcaggccatggaagtgcgcgtcaagatcctctacacctcgctctgccacactgacgtctacttctgggaggccaagggacagactcccgtgttccctcggatcttcggtcatgaggctggaggtatcattgagagtgttggagagggtgtgactgacgtggcccctggtgaccatgtccttcctgtgttcactggggagtgcaaggagtgcccccactgtaagtcggctgagagcaacatgtgtgatctgctcaggatcaacactgtccggggtgtgatgattggtgacggcaagtcgaggttttcaatcaatgggaagcctatctaccattttgttgggacttccaccttcagcgagtacactgtcatgcatgttggttgtgttgcaaagatcaaccccgaggctccccttgataaagtttgtgttctaagctgtggtatttctactggtcttggtgcatcaattaatgttgccaaaccaccaaagggttcaactgtggcaattttcggtctaggagctgttggtcttgctgctgcggaaggtgcaaggattgctggagcgtcgaggatcattggtgttgacctgaaccccagcagatttgaagaagctaaaaaatttggctgcactgaatttgtgaacccaaaagaccacaacaagccagtgcaggaggtacttgctgacatgaccaatggaggagttgaccgcagcgtcgaatgcactggaaacatcaacgctatgatccaagcatttgagtgtgttcatgatggctggggtgtcgctgtgctggtgggtgtgccacacaaggatgccgagttcaagactcacccaatgaacttcctgaacgagaggaccctgaagggaaccttctttggcaacttcaagccacgcactgacctgcccaatgtggtggagctgtatatgaagaaggagctggaagtggagaagttcatcacacacagcgtcccattctcggagatcaacaaggccttcgacctgatggccaagggggagggcatccgctgcatcatccgcatggagaactagattcagtcgcctgggtttcatccggttcgggtcgggtcaataaacatggcagcgcccagagtgaggctgccactgcctggtgcaagatacacgcctgtgtgtatcacgtgaagtttggcattgtcaatcagtagggtagctctagattctgtaattatctatcggtattggcatgagtcttgcgaactgtctttcggcttaacatatatgtaccttataccactatgagtctc

SEQ ID NO: 14593 - protein, 379 aa, Pennisetum americanum
MATAGKVIKCKAAVAWEAGKPLSIEEVEVAPPQAMEVRVKILYTSLCHTDVYFWEAKGQTPVFPRIFGHEAGGIIESVGEGVTDVAPGDHVLPVFTGECKECPHCKSAESNMCDLLRINTVRGVMIGDGKSRFSINGKPIYHFVGTSTFSEYTVMHVGCVAKINPEAPLDKVCVLSCGISTGLGASINVAKPPKGSTVAIFGLGAVGLAAAEGARIAGASRIIGVDLNPSRFEEAKKFGCTEFVNPKDHNKPVQEVLADMTNGGVDRSVECTGNINAMIQAFECVHDGWGVAVLVGVPHKDAEFKTHPMNFLNERTLKGTFFGNFKPRTDLPNVVELYMKKELEVEKFITHSVPFSEINKAFDLMAKGEGIRCIIRMEN

SEQ ID NO: 14594 - DNA, 1149 bp, Petunia hybrida
  CDS (1)..(1149)
atgtcgagcaatactgctggtcaagtcattcgttgcaaagctgcggttgcatgggaagcggggaagccattggtaattgaagaagtggaggtggcacctccccagaaaatggaagttcgcctcaagattctgttcacctccctgtgccatactgatgtttacttttgggaagctaaggggcaaacacctctatttcctcgaatttttggacatgaagccggagggattgtggagagtgtaggtgaaggtgtcactgatctcaaaccaggagaccatgttcttcctgtgttcactggtgagtgccagcagtgtcgacactgtaaatcagaggaaagcaacatgtgcgacctcttaaggataaacaccgacaggggagttatgatccatgatggtcaaacaagattctccaaagatgggaagccgatataccactttgttggaacttcaacctttagtgaatacaccgtttgccattctggatgcgtcaccaagattgatccacaggcaccgcttgacaaagtttgcgttctgagttgtggaatatcaacaggacttggagcaactctgaatgttgccaaacctactaaaggttctactgtggctatttttggcttgggagctgttggccttgctgctgctgaaggagctaggattgcaggggcttctaggattattggtgttgatttgaatcctagcagattcaatgatgccaagaagtttggagtcaccgagtttgtgaatccaaaagatcacggtgataagcctgttcagcaggtaattgctgagatgaccgatggaggtgttgatcggagtgtcgagtgcactggaaatgtcaatgccatgatctctgcttttgaatgtgttcatgatggttggggtgtggctgtgcttgttggtgttccaaacaaagatgatgcattcaaaactcatcccatgaatcttttgaatgagaggactctgaagggcaccttctttggcaattacaagcccaaatctgacattccatctgtggtggacaagtatatgaaaaaggaactagagctggagaaattcattactcaccaagttccattttcggagatcaacaaagcatttgattatatgctgaaaggggaaagtattcgttgcatgattactatggaacattga

SEQ ID NO: 14595 - protein, 382 aa, Petunia hybrida
MSSNTAGQVIRCKAAVAWEAGKPLVIEEVEVAPPQKMEVRLKILFTSLCHTDVYFWEAKGQTPLFPRIFGHEAGGIVESVGEGVTDLKPGDHVLPVFTGECQQCRHCKSEESNMCDLLRINTDRGVMIHDGQTRFSKDGKPIYHFVGTSTFSEYTVCHSGCVTKIDPQAPLDKVCVLSCGISTGLGATLNVAKPTKGSTVAIFGLGAVGLAAAEGARIAGASRIIGVDLNPSRFNDAKKFGVTEFVNPKDHGDKPVQQVIAEMTDGGVDRSVECTGNVNAMISAFECVHDGWGVAVLVGVPNKDDAFKTHPMNLLNERTLKGTFFGNYKPKSDIPSVVDKYMKKELELEKFITHQVPFSEINKAFDYMLKGESIRCMITMEH

SEQ ID NO: 14596 - DNA, 1448 bp, Solanum tuberosum
  CDS (41)..(1183)
aaagttctcatatttagtgatcagtaaaaagatcaagaaaatgtcgactactgtaggccaagtcattcgttgcaaagctgctgtggcatgggaggctggtaagccattagtgatggaggaagtggatgttgctcctccacagaaaatggaagttcgtctcaagatcctctatacttcactctgtcatactgatgtatacttctgggaagctaagggtcaaaatccagtctttcctagaattcttggacatgaagcagcagggattgtggagagtgttggagaaggagtaacagaacttggaccaggagaccatgttcttcctgtctttacaggagaatgcaaagattgtgctcactgtaaatctgaagaaagcaatatgtgtagcctcttaaggattaacactgacaggggagtgatgattaatgatggacaatcaagattttccatcaatggaaagcccatttaccattttgttgggacctccacttttagtgagtacactgtggttcatgttggatgtgtcgccaaaattaacccccttgctcctcttgacaaagtatgtgtccttagttgtggaatctcgacaggccttggagcaactttgaatgttgctaaaccaacaaaaggctcaagtgtggctatatttggactaggagctgtaggccttgcagctgcagaaggagccagaattgctggtgcttcaaggataattggtgttgatttaaatgctagtagatttgagcaagctaagaaatttggtgtgacagagtttgtgaacccaaaggactatagtaaaccagttcaagaggtaattgctgagatgactgatggcggagtcgataggagtgtggaatgtactggccatattgatgctatgatttcagcatttgaatgtgtccatgatggctggggagtggctgtacttgttggagtaccccataaagaagctgtgttcaagacacaccctatgaacttattgaatgaaaggactctcaaaggaaccttctttggaaactacaaacctcgttcggatattccttctgttgttgagaaatacatgaacaaagaacttgaattggagaaattcatcactcatacacttccatttgctgaaatcaataaggcttttgatttaatgttgaagggagaaggccttcgttgcatcatcaccatggaggactaaacttactgtcctagaaaaggagcttctggctagtcgctactgtttgagaaaagaccaataaattgtcactgtcctattttccctttcttgtttggtgattgagttgtaacattcctgtccaagtccatccatgtcttttcttttggtttttttgcttatagatgtgctttgtctttcgcaatgccatccatgtctatttctgttcttgtaaaaaaaatgcaattatctctgttttatctctaagtatatttacagaatttcattg

SEQ ID NO: 14597 - protein, 380 aa, Solanum tuberosum
MSTTVGQVIRCKAAVAWEAGKPLVMEEVDVAPPQKMEVRLKILYTSLCHTDVYFWEAKGQNPVFPRILGHEAAGIVESVGEGVTELGPGDHVLPVFTGECKDCAHCKSEESNMCSLLRINTDRGVMINDGQSRFSINGKPIYHFVGTSTFSEYTVVHVGCVAKINPLAPLDKVCVLSCGISTGLGATLNVAKPTKGSSVAIFGLGAVGLAAAEGARIAGASRIIGVDLNASRFEQAKKFGVTEFVNPKDYSKPVQEVIAEMTDGGVDRSVECTGHIDAMISAFECVHDGWGVAVLVGVPHKEAVFKTHPMNLLNERTLKGTFFGNYKPRSDIPSVVEKYMNKELELEKFITHTLPFAEINKAFDLMLKGEGLRCIITMED

SEQ ID NO: 14598 - DNA, 1268 bp, Trifolium repens
  CDS (86)..(1228)
cacagagttaacaaaacaaagcaaagcaaagaaaaagaaaaacaaagcaaacaaagaactcagtcatcatcatcatctgataatcatgtcgaacactgctggtcaggtcatcaagtgcagagctgcggttgcatgggaggcagggaagccactggtgattgaagaagtagaggtggcgccaccacaggccggtgaagtccgtcttaagatactcttcacctccctttgccacactgatgtttacttctgggaagctaagggtcagactccattgtttcctcgtatatttggtcatgaagctggagggattgtggagagcgtaggcgaaggtgtgactcatctgaaaccaggagaccatgccctgcctgtattcacaggcgagtgtggggaatgcccacattgtaagtcagaggagagtaacatgtgtaatcttcttaggattaacaccgacagaggtgtcatgatcaatgacaacaagtcaagattctctattaagggacaacctgtacaccattttgtcggtacctctacattcagcgagtacactgtcgttcatgcgggatgtgttgcaaagatcaaccctgatgcaccacttgacaaagtttgtattctcagctgtggaatatgcacaggtcttggtgctactgtcaatgttgcaaaaccgaaacccggttcttctgttgcaatctttggacttggagctgttggccttgctgctgctgaaggggcaaggatgtctggtgcatctcgaatcattggagttgatttagtttctagccgatttgaattagctaagaagtttggggtaaatgagttcgtcaacccgaaagatcatgacaaacctgttcaacaggtaattgctgaaatgactgatggaggtgtggatcgtgctgttgaatgtaccgggagcatccaggccatgatctcagcattcgaatgtgtccatgacggatggggtgttgctgtacttgttggagttccaaaaaaagatgatgcattcaaaactcatcctatgaatttcttgaatgagaggactcttaagggtactttctatggtaactacaagcctcgaaccgatcttcctaatgttgtagagcaatacatgaaaggggagctggaacttgaaaaattcatcactcactcaatcccattttcagagattaacaaagcttttgattacatgctgaaaggggagtccatcagatgtatcatccgaatggaggagtaaaactgtaaaacaatgatgaaatagtccctactgggggact

SEQ ID NO: 14599 - protein, 380 aa, Trifolium repens
MSNTAGQVIKCRAAVAWEAGKPLVIEEVEVAPPQAGEVRLKILFTSLCHTDVYFWEAKGQTPLFPRIFGHEAGGIVESVGEGVTHLKPGDHALPVFTGECGECPHCKSEESNMCNLLRINTDRGVMINDNKSRFSIKGQPVHHFVGTSTFSEYTVVHAGCVAKINPDAPLDKVCILSCGICTGLGATVNVAKPKPGSSVAIFGLGAVGLAAAEGARMSGASRIIGVDLVSSRFELAKKFGVNEFVNPKDHDKPVQQVIAEMTDGGVDRAVECTGSIQAMISAFECVHDGWGVAVLVGVPKKDDAFKTHPMNFLNERTLKGTFYGNYKPRTDLPNVVEQYMKGELELEKFITHSIPFSEINKAFDYMLKGESIRCIIRMEE

SEQ ID NO: 14600 - DNA, 1122 bp, Hordeum vulgare
  CDS (1)..(1122)
atggcgaccgccgggaaggtgatcaagtgcaaagcggcggtggcctgggaggccgggaagccgctgtcgatggaggaggtggaggatgcgccgccgcaggccatggaggtgcgcgacaagatcctctacaccgccctctgccacaccgacgtctacttctgggaggcgaacggccaaactccggtcttccctaggatcttgggccatgaagctggaggcattgtggagagcgttggcgagggcgtgacggagctggtgccgggagaccatgtcctcccggtgttcaccggagagtgcaaggagtgtgcccactgcatgtcagaggagagcaacctctgtgacctcctcaggatcaatgtcgaccgtggcgtgatgattgacgatgggcagtcccgcttcaccatcgacgggaaacccatcttccacttcctcgggacgtccaccttcagcgagtacaccgtgatccatgtcgggtgcgtcgccaagatcgaccccgaggcgcccctcgacaaagtctgcctccttagctgtggtatctcgaccgggctcggtgcgacgctcaacgtcacgaaaccgaagaagggtatgacggtggcgattttcggtcttggagctgtaggcctcgctgccatggaaggggccaggatgtccggcgcatcaaggattatcggcgtggacttgaaccctgcaaaacacgaacaagctaagaaatttggctgcaccgactttgtgaaccccaaagaccacaccaagccggtgcaagaggtgatcgtggagatgaccgatggaggagtcaaccgggcggtggagtgcacgggcaacgccgacgccatgatatccgcctttgaatgcgtgcacgacgggtggggcgtggcgcacaaggaggcggtgttcaagacccaccccatgaacttcctcaacgagaggacgctcaggggcaccttcttcggcaactacaagccgcgcaccggcctccccggcgtcgtcgacatgtacatgaggaaggagctggagctggacaagttcatcacccacagcctgcccttctcgcagatcaacacggccttcgacctcatgctcaggggggaaggcctgcgctgcgtcatcaggagtgaggagtag

SEQ ID NO: 14601 - protein, 373 aa, Hordeum vulgare
MATAGKVIKCKAAVAWEAGKPLSMEEVEDAPPQAMEVRDKILYTALCHTDVYFWEANGQTPVFPRILGHEAGGIVESVGEGVTELVPGDHVLPVFTGECKECAHCMSEESNLCDLLRINVDRGVMIDDGQSRFTIDGKPIFHFLGTSTFSEYTVIHVGCVAKIDPEAPLDKVCLLSCGISTGLGATLNVTKPKKGMTVAIFGLGAVGLAAMEGARMSGASRIIGVDLNPAKHEQAKKFGCTDFVNPKDHTKPVQEVIVEMTDGGVNRAVECTGNADAMISAFECVHDGWGVAHKEAVFKTHPMNFLNERTLRGTFFGNYKPRTGLPGVVDMYMRKELELDKFITHSLPFSQINTAFDLMLRGEGLRCVIRSEE

SEQ ID NO: 14602 - DNA, 1600 bp, Zea mays
  CDS (127)..(1266)
accaacttctcatcatcagccaagtgtaaagagtgcgaagaagcagtagcaaaaggattccattctcgtgttcttggagtggtccatcgatcgagctccgtgaaagagagagagagagagcaagcaatggcgacagcaggaaaggtgatcaagtgcagagctgccgtgacgtgggaggccggcaaaccgctgtccatcgaggaggtggaggtagcgccgccgcaggccatggaggtgcgtatcaagatcctctacaccgcgctctgccacaccgacgtctacttctgggaggccaaggggcaaaccccggtgttcccgaggatcttaggacacgaagcgggaggcatcgtggagagcgtcggagagggcgtgaccgacgtcgcgccaggcgaccacgtcctcccggtgttcaccggcgagtgcaaggagtgcgcccactgcaagtcggaggagagcaacatgtgcgacctcctcaggatcaacgtcgaccgcggcgtgatgatcggcgacggtaagtcccgcttcaccatcagcgggcagcccatcttccacttcgtcgggacgtccaccttcagcgagtacaccgtcatccatgtcggctgcctggccaagatcaaccccgaggcgcctctcgacaaagtctgcatcctcagctgtggtatctcgaccggccttggcgcgacactgaatgtggcgaaaccagccaagggctcgacggtggcgattttcgggcttggggctgtaggccttgctgctatggaaggtgctagactggctggtgcatcaaggatcatcggcgtggacatcaacccagcaaaatacgagcaagctaagaaatttggctgcactgaattcgttaaccccaaggaccacgacaagccagtgcaagaggtgctgattgagctgaccaacggcggcgtcgaccgcagcgtggagtgcaccggtaacgtcaacgccatgatatccgccttcgaatgtgtccacgacggctggggtgtcgccgtgctggtgggtgtcccgcacaaggacgaccagttcaagacccaccccatgaacttcctcagcgagaagacactcaagggcaccttcttcggaaactacaagccccgcaccgacctgcccaacgtggtcgagatgtacatgaaaaaggagctggagctggagaagttcatcacgcacagcgtgcccttctcggagatcaacacggcgttcgacctgatgctcaagggggagagcctgcgctgcatcatgaggatggaggattagagcttcattgcaagcttgctcctcctgcagggcaggcatgtcgcacagcaaatgggcatgaaaagttgaaggcgctccagtcctccagcttgtgtagtacacagtagcaataaaacgttagtgtttgtcctgtgcccatcctgtattattctgttccagggtttcacctttatcgtcagtgtgtggtcaggtttcaacccttctcagaacaacccccctcccagaaaaaaaacaaaggaagaagtttgtgtttcaagtttcagaatcccctgtctgtaatatccatttgcatgacaataatgagatactgtagataaaaaaaaaaaaaaaaaaa

SEQ ID NO: 14603 - protein, 379 aa, Zea mays
MATAGKVIKCRAAVTWEAGKPLSIEEVEVAPPQAMEVRIKILYTALCHTDVYFWEAKGQTPVFPRILGHEAGGIVESVGEGVTDVAPGDHVLPVFTGECKECAHCKSEESNMCDLLRINVDRGVMIGDGKSRFTISGQPIFHFVGTSTFSEYTVIHVGCLAKINPEAPLDKVCILSCGISTGLGATLNVAKPAKGSTVAIFGLGAVGLAAMEGARLAGASRIIGVDINPAKYEQAKKFGCTEFVNPKDHDKPVQEVLIELTNGGVDRSVECTGNVNAMISAFECVHDGWGVAVLVGVPHKDDQFKTHPMNFLSEKTLKGTFFGNYKPRTDLPNVVEMYMKKELELEKFITHSVPFSEINTAFDLMLKGESLRCIMRMED

SEQ ID NO: 14604 - DNA, 1420 bp, Solanum lycopersicum
  CDS (65)..(1207)
aaaccaaaatttgtgttctataaaaagttttcatattaatgatcactaaaaaaaaatcaagaagatgtcgactactgtaggccaagtcattcgttgcaaagctgctgtggcatgggaagctggtaagccattagtgatggaggaagtagatgttgctcctccacagaaaatggaagttcgtctgaagatcctctatacttcactctgtcatactgatgtatacttctgggaagctaagggtcaaaatccagtctttcctcgaattcttggacatgaagcagcagggattgtggagagtgttggagagggagtaacagaccttgcaccaggagaccatgttcttcctgtctttacaggggaatgtaaagattgtgctcactgtaaatctgaagaaagcaatatgtgtagcctcttaaggattaacactgacaggggagtgatgcttaatgatggaaaatcaagattttccatcaatggaaaccccatttaccattttgttgggacctctacttttagtgagtacaccgtggttcatgttggatgtgttgcaaaaattaaccctcttgctcctcttgacaaagtatgtgtccttagttgtggaatttcgacaggccttggagcaagtttgaatgttgctaaaccaacaaaaggctcaagtgtggctatatttggactaggagctgtaggcctcgcggctgcagaaggagccagaattgctggtgcctcgaggataattggtgttgatttaaatgctagtagatttgagcaagctaagaaatttggtgtgacagagtttgtgaacccaaaggactatagtaaaccagttcaagaggtaattgctgagatgactgatggcggagtcgataggagtgtggaatgtactggtcacattgatgctatgatttcagcatttgaatgtgtccatgatggctggggagtggcggttcttgttggtgtaccccataaagaagctgtgttcaagacacatcctctgaactttttgaatgaacggactctcaaaggaaccttctttggaaactacaaacctcgttcggatattccttgtgttgttgagaaatacatgaacaaagaacttgaattggagaaattcatcactcatacacttccatttgctgaaatcaataaggctttcgatttaatgctgaagggagaaggccttcgttgcatcatcaccatggcggactaaactttctgtcctagaaaaggagcttctactgtttgagaaaaaagaccaataaattgtcactgtcttattttccctttcgtgtttggttgagttgtaacattccatccatgtctcttcttttgtcttttgcttagatgttgtgctttgccatatctctttcgattcttgtaaaaaatgcaaattctctctgttttatctcaagtatatttacag

SEQ ID NO: 14605 - protein, 380 aa, Solanum lycopersicum
MSTTVGQVIRCKAAVAWEAGKPLVMEEVDVAPPQKMEVRLKILYTSLCHTDVYFWEAKGQNPVFPRILGHEAAGIVESVGEGVTDLAPGDHVLPVFTGECKDCAHCKSEESNMCSLLRINTDRGVMLNDGKSRFSINGNPIYHFVGTSTFSEYTVVHVGCVAKINPLAPLDKVCVLSCGISTGLGASLNVAKPTKGSSVAIFGLGAVGLAAAEGARIAGASRIIGVDLNASRFEQAKKFGVTEFVNPKDYSKPVQEVIAEMTDGGVDRSVECTGHIDAMISAFECVHDGWGVAVLVGVPHKEAVFKTHPLNFLNERTLKGTFFGNYKPRSDIPCVVEKYMNKELELEKFITHTLPFAEINKAFDLMLKGEGLRCIITMAD

SEQ ID NO: 14606 - DNA, 1110 bp, Escherichia coli
  CDS (1)..(1110): transl_table=11
atgaaatcacgtgctgccgttgcatttgctcccggtaaaccgctggaaatcgttgaaattgacgttgcaccaccgaaaaaaggtgaagtgctgattaaagtcacccataccggcgtttgccataccgacgcatttaccctctccggggatgacccggaaggtgtattcccggtggttctcggtcacgaaggggccggcgttgtggttgaagtcggtgaaggcgtaaccagcgtcaaacctggcgaccatgtgatcccgctttacaccgcggagtgcggcgagtgtgagttctgtcgttctggcaaaactaacctctgtgttgcggttcgcgaaacccagggtaaaggcctgatgccagacggcaccacccgtttttcttacaacgggcagccgctttatcactacatggggtgctctacattcagtgaatacaccgtagtcgcggaagtgtctctggcaaaaattaatccagaagcaaaccatgaacacgtctgcctgctgggctgtggcgtgaccaccggtattggcgcggtacacaacacagctaaagtccagccaggtgattctgttgccgtgtttggtcttggcgcgattggtctggcagtggttcagggcgcgcgtcaggcgaaagcgggtcggattatcgctatcgataccaacccgaagaaattcgatctggcgcgtcgcttcggtgctaccgactgcattaacccgaatgactacgacaaaccgataaaagatgtcctgttggatatcaacaaatggggtatcgaccatacctttgaatgcatcggtaacgtcaacgtgatgcgtgcggcgctggaaagtgcgcaccgcggctggggtcagtcggtgatcatcggggtcgcggttgccggtcaggaaatctccacccgtccattccagttggtcactggtcgcgtatggaaaggttccgcgtttggcggcgtgaaaggtcgttcccagttaccgggcatggttgaagatgcgatgaaaggtgatatcgatctggaaccgtttgtcacgcataccatgagcctggatgaaattaatgacgccttcgacctgatgcatgaaggcaaatccattcgaaccgtaattcgttactga

SEQ ID NO: 14607 - protein, 369 aa, Escherichia coli
MKSRAAVAFAPGKPLEIVEIDVAPPKKGEVLIKVTHTGVCHTDAFTLSGDDPEGVFPVVLGHEGAGVVVEVGEGVTSVKPGDHVIPLYTAECGECEFCRSGKTNLCVAVRETQGKGLMPDGTTRFSYNGQPLYHYMGCSTFSEYTVVAEVSLAKINPEANHEHVCLLGCGVTTGIGAVHNTAKVQPGDSVAVFGLGAIGLAVVQGARQAKAGRIIAIDTNPKKFDLARRFGATDCINPNDYDKPIKDVLLDINKWGIDHTFECIGNVNVMRAALESAHRGWGQSVIIGVAVAGQEISTRPFQLVTGRVWKGSAFGGVKGRSQLPGMVEDAMKGDIDLEPFVTHTMSLDEINDAFDLMHEGKSIRTVIRY

SEQ ID NO: 14608 - DNA, 1140 bp, Hordeum vulgare
  CDS (1)..(1140)
atggcgaccgctgggaaggtgatcaagtgcaaagcggcggtggcgtgggaggccgggaagccgctgtcgatcgaggaggtggaggtggcgccgccgcaggccatggaggtgcgcgtcaagatcctctacactgccctctgccacaccgacgtctacttctgggaagccaaggggcaaactccggttttccctaggatcttaggccatgaagctggaggcattgtcgagagcgtcggagagggcgtgactgagcttgtgccgggtgaccatgtcctcccggtgttcaccggcgagtgcaaggactgtgcccactgcaagtcagaggagagcaacctttgtgatctccttaggatcaatgtggatcgtggcgtgatgatcggcgatgggcagtctcgcttcaccatcaacggaaaaccgatcttccacttcgtcgggacctccaccttcagtgagtacaccgtcatccatgtcggttgcctcgcaaagatcaaccccgaggctcccctcgacaaagtttgtgtcctcagctgtggtctctcaactggacttggtgctacgctcaatgtcgcaaaaccaaaaaagggttccacggtggccattttcggtcttggagctgtaggactggctgccatggaaggggccaggatggctggggcatcaaggatcattggtgtggatttgaaccctgcaaaatacgaacaagctaagaaatttggatgcacagactttgtgaacccgaaggaccacactaagcccgtgcaggaggtgctcgtcgagatgaccaatggcggagtcgaccgggcagtcgagtgcactggccacatcgacgccatgatcgccaccttcgaatgcgtccatgatgggtggggcgtggctgtgctggtgggtgtgccgcacaaggaggcggtgttcaagacccacccaatgaacttcctcaacgagaagaccctgaaaggcaccttcttcggtaactacaagccgcgcaccgacctgccggaagtggtcgagatgtacatgaggaaggagctcgacctggagaagttcatcacacatagcgtgcccttctcgcagatcaacacggcgttcgacctcatgctcaagggggagggcctgcgctgcatcacgaggacggaccagtag

SEQ ID NO: 14609 - protein, 379 aa, Hordeum vulgare
MATAGKVIKCKAAVAWEAGKPLSIEEVEVAPPQAMEVRVKILYTALCHTDVYFWEAKGQTPVFPRILGHEAGGIVESVGEGVTELVPGDHVLPVFTGECKDCAHCKSEESNLCDLLRINVDRGVMIGDGQSRFTINGKPIFHFVGTSTFSEYTVIHVGCLAKINPEAPLDKVCVLSCGLSTGLGATLNVAKPKKGSTVAIFGLGAVGLAAMEGARMAGASRIIGVDLNPAKYEQAKKFGCTDFVNPKDHTKPVQEVLVEMTNGGVDRAVECTGHIDAMIATFECVHDGWGVAVLVGVPHKEAVFKTHPMNFLNEKTLKGTFFGNYKPRTDLPEVVEMYMRKELDLEKFITHSVPFSQINTAFDLMLKGEGLRCITRTDQ

SEQ ID NO: 14610 - DNA, 1431 bp, Solanum tuberosum
  CDS (30)..(1172)
atttagtgatcagtaaaaaaatcaagaaaatgtcgactactgtaggccaagtcattcgttgcaaagctgctgtggcatgggaggctggtaagccattagtgatggaggaagtggatgttgctcctccacagaaaatggaagttcgtcttaagatcctctacacttcactctgtcatactgatgtatacttctgggaagctaagggtcaaaatccagtctttcctagaattcttggacatgaagcagcagggattgtggagagtgttggagagggagtaacagaacttgcaccaggagaccatgttcttcctgtctttacaggagaatgcaaagattgtgctcactgtaaatctgaagaaagcaatatgtgtagcctcttaaggattaacactgacaggggagtgatgattaatgatggacaatcaaggttttccatcaatggaaagcccatttaccattttgttgggacctccacttttagtgagtacactgtggttcatgttggatgtgtcgccaaaattaacccccttgctcctcttgacaaagtatgtgtccttagttgtggaatctcgacaggccttggagcaactttgaatgttgctaaaccaacaaaaggctcaagtgtggctatttttggactaggagctgtaggccttgcagccgcagaaggagccagaattgctggtgcttcaaggataattggtgttgatttaaatgctagtagatttgagcaagctaagaaatttggtgtgacagagtttgtgaacccaaaggactatagtaaaccagttcaagaggtaattgctgagatgactgatggcggagtcgataggagtgtggaatgtactggccatattgatgctatgatttcagcatttgagtgtgtccatgatggctggggagtggctgtacttgttggagtaccccataaagaagctgtgttcaagacacaccctatgaactttttgaatgaaaggactctcaaaggaaccttctttggaaactacaaacctcgttcggatattccttctgttgttgagaaatacatgaataaagaacttgaattggagaaattcatcactcatacacttccatttgctgaaatcaataaggcttttgatttaatgttgaagggagaaggccttcgttgcatcatcaccatggaggactaaacttactgtcctagaaaaggagcttctagctagtcgctactctttgagaaaagaccaataaattgtcactgtcttattttccctttcttgtttggtgattgagttgtaacattcctgtccaactccatccatatcttttcttttgtttttttgcttatagatgtgcttttgtgtttcgcaatgccatatctctttcggttcttgtaaaaaatgcaaattctctctgttttatctcaagtatatttacagaatttccgcg

SEQ ID NO: 14611 - protein, 380 aa, Solanum tuberosum
MSTTVGQVIRCKAAVAWEAGKPLVMEEVDVAPPQKMEVRLKILYTSLCHTDVYFWEAKGQNPVFPRILGHEAAGIVESVGEGVTELAPGDHVLPVFTGECKDCAHCKSEESNMCSLLRINTDRGVMINDGQSRFSINGKPIYHFVGTSTFSEYTVVHVGCVAKINPLAPLDKVCVLSCGISTGLGATLNVAKPTKGSSVAIFGLGAVGLAAAEGARIAGASRIIGVDLNASRFEQAKKFGVTEFVNPKDYSKPVQEVIAEMTDGGVDRSVECTGHIDAMISAFECVHDGWGVAVLVGVPHKEAVFKTHPMNFLNERTLKGTFFGNYKPRSDIPSVVEKYMNKELELEKFITHTLPFAEINKAFDLMLKGEGLRCIITMED

SEQ ID NO: 14612 - DNA, 2127 bp, Rhodobacter sphaeroides
  CDS (346)..(1476): transl_table=11
ggatccgcgcggctgcgcgagctggggctcgagccctacgatgcgctctcgccgcccctgatggatgcgatcgcgacccatgtcgcgaaacgctccggcaagctcgcggcctgagggctgcggccgctccctcccgcgaggcggggagcggcttcttctgaacgtgccgggcgcggtccgatggcggcaggcctgccgacgcgggacccccgcaggctttcgccgcagaggcaagacccgcgctcctcatccttttttccgaatgccgggcgcggattttcctcttaaggtcagccatgacaggcccgacgccctgccgtccggttgattgagagggagagtaacatgcgcacccgtgccgccgtcgccgtcgaggccggcaagccgctcgagatcatggaggtcaatctcgaaggccccaaggccggcgaggtcatggtcgagatcaaggccaccggcatctgccacaccgacgaattcaccctctccggcgccgatcccgagggcatgttcccggcgatcctcggccacgagggcgcgggcgtggtggtcgaggtcggccccggcgtgaccagcgtgaagcccggcgatcatgtgatcccgctctacacgcccgagtgccggcagtgcccctcctgcctcagccagaagacgaacctctgcaccgcgatccgcggcacgcaggggcaggggctgatgcccgacggcaccagccgcttctcgatgctcgatggcacgccgatcctgcattacatgggctgctcgaccttctcgaactacacggtcctgcccgagatcgcggtggcgaaggtgcgcccggatgcgcccttcgacaagatctgctacatcggctgcggcgtcaccaccggcatcggcgcggtcatcaacacggccaaggtcgagatcggcgccaaggccgtggtgttcgggctgggcggcatcggtctcaacgtgatccagggcctgaagctcgcgggcgccgacatgatcatcggcgtggatctgaacaacgccaagaaggaatggggcgagcgcttcggcatgacccatttcgtgaatccgtccgagatcgacggcgatgtggtggcgcatctggtcaatatgaccaagacgcccttcgaccagatcggcggggcggactacaccttcgactgcaccggcaacgtgaaggtgatgcgtcaggcgctggaggcgtgccatcgtggctggggccagtcgatcgtgatcggtgtggcgccggcgggggccgagatccagacgcggccgttccagctggtgacggggcgggtctggaagggctcggccttcggcggcgcgcgcggccggaccgacgtgccgaagatcgtcgactggtacatggagggcaagatccagatcgacccgatgatcacccacatcctgagcctcgaagagatcaacaagggcttcgacctcatgcacgcgggcgagtccatccgctcggtcgtggtgttctgatcggccacccctccaagacggtgacgatttcccgagtaacggtgccagcgacccggccggtcccttgaccggccgcgggcggcctgccgcgcaggacgcccccgagccatccgcaaagggagaagaccatgagattgaccaccatcctcgccggggcgctcgctctcggtgccgcgcaggccgccttcgccgaaggcgacccggcggccggcgagaaggccttccggaaatgtcaggcctgccaccagatcggcgccgaggcgcagaacaagaccgggcccgtcctgaccggcgtcatcggtcgcccggcggcctcgatcgagggcttcagctattccaagaccctgaccgaggccgcggccgatggcctcgtctgggatcatgctgcgctcgagaccttcctggccaatccgcgcaaggcgatgccgggcaccaagatggccttccccggcatcaagaaaccgcaggagctggccgacatcctggcctatctcgacaccttctcggacggggaaacgcgggaggccgaagagacccccgcggcggcgccggcggagggctgaaatgcctgtctgccaaggctttcgccctcgtcatggcgccaccggcgatcgtcatactttgggcttaaagcgggaccgcagcgttaac

SEQ ID NO: 14613 - protein, 376 aa, Rhodobacter sphaeroides
MRTRAAVAVEAGKPLEIMEVNLEGPKAGEVMVEIKATGICHTDEFTLSGADPEGMFPAILGHEGAGVVVEVGPGVTSVKPGDHVIPLYTPECRQCPSCLSQKTNLCTAIRGTQGQGLMPDGTSRFSMLDGTPILHYMGCSTFSNYTVLPEIAVAKVRPDAPFDKICYIGCGVTTGIGAVINTAKVEIGAKAVVFGLGGIGLNVIQGLKLAGADMIIGVDLNNAKKEWGERFGMTHFVNPSEIDGDVVAHLVNMTKTPFDQIGGADYTFDCTGNVKVMRQALEACHRGWGQSIVIGVAPAGAEIQTRPFQLVTGRVWKGSAFGGARGRTDVPKIVDWYMEGKIQIDPMITHILSLEEINKGFDLMHAGESIRSVVVF

SEQ ID NO: 14614 - DNA, 1140 bp, Arabidopsis thaliana
  CDS (1)..(1140)
atggcgactcaaggtcaggttatcacttgcaaagctgcggtggcttacgagccgaacaagcctctggtcatcgaagatgtgcaagtggctccacctcaagctggtgaggttcggatcaagatcctctacactgctctttgtcacaccgacgcttacacttggagcggcaaggatcctgaaggtctctttccttgtattctaggtcatgaggctgctgggattgttgagagtgttggtgaaggagtaactgaagttcaagctggagatcatgttatcccttgttatcaagctgagtgtcgtgaatgcaagttttgcaaatctgggaagactaacctttgtggcaaggtgagatctgctactggtgttgggattatgatgaatgaccgtaagtcgaggttctcggttaatgggaaacccatttatcacttcatgggtacttccacgtttagtcagtatactgttgttcatgatgttagcgtcgccaaaattgatcctactgctcctttggataaagtttgccttcttggatgtggtgttcccactggccttggagcagtttggaatactgcaaaagtagaaccagggtcaaatgttgccattttcggtcttggcactgtcggacttgctgttgccgagggtgcgaaaacagctggtgcttcaaggatcattggcattgacatcgatagcaagaagtatgaaactgcaaagaagtttggtgttaacgaatttgtgaacccaaaggatcacgacaagccaattcaggaagtgattgtcgatctcactgatggcggtgttgactacagctttgagtgcatcgggaatgtctccgtgatgagagctgcattggagtgctgtcacaagggatggggaacttcggtcatagttggtgttgcagcatcaggacaagagatatcaactcgtccgttccaactcgtgactggccgtgtgtggaaaggaacagcttttggtggtttcaagagtcgaacccaagtgccttggcttgtagaaaagtacatgaacaaggagataaaagtggatgaatacataacacacaacttgaccttgggagaaatcaataaggctttcgatctattgcacgaaggtacttgccttcgttgtgtcctcgataccagcaaatga

SEQ ID NO: 14615 - protein, 379 aa, Arabidopsis thaliana
MATQGQVITCKAAVAYEPNKPLVIEDVQVAPPQAGEVRIKILYTALCHTDAYTWSGKDPEGLFPCILGHEAAGIVESVGEGVTEVQAGDHVIPCYQAECRECKFCKSGKTNLCGKVRSATGVGIMMNDRKSRFSVNGKPIYHFMGTSTFSQYTVVHDVSVAKIDPTAPLDKVCLLGCGVPTGLGAVWNTAKVEPGSNVAIFGLGTVGLAVAEGAKTAGASRIIGIDIDSKKYETAKKFGVNEFVNPKDHDKPIQEVIVDLTDGGVDYSFECIGNVSVMRAALECCHKGWGTSVIVGVAASGQEISTRPFQLVTGRVWKGTAFGGFKSRTQVPWLVEKYMNKEIKVDEYITHNLTLGEINKAFDLLHEGTCLRCVLDTSK

SEQ ID NO: 14616 - DNA, 1140 bp, Drosophila melanogaster
  CDS (1)..(1140)
atgtctgctaccgagggcaaggttatcacatgcaaggccgccgtcgcttgggaggcaaagaaaccgctggtcatcgaggatatcgaggtggcgccgcccaaggctcatgaggtgcgcatcaagatcacggccacgggcgtctgccacacggatgccttcaccctgagcggtgccgatccggagggcctgttcccagtggtgttgggacatgagggcgccggcatcgtggagagcgtcggcgagggcgtgaccaacttcaaggctggcgaccatgtcatcgctctctacatcccccagtgcaacgagtgcaagttctgcaagagcggcaagacgaatctctgccaaaagatccgacttacccagggcgctggagtcatgcccgagggcacctcccgtctcagctgcaagggacagcagttgttccacttcatgggcacctccaccttcgcagagtacaccgtggtggccgacatttcgctgacaaagatcaacgaaaaggcgccgctggagaaagtctgcctgctggggtgcggcatttccacaggctacggagccgccctcaacactgccaaggtggaagccggtagcacctgcgctgtttggggcttgggagctgtgggcttggccgtgggtttgggctgcaagaaggctggtgccggcaagatctacggcattgacatcaatcccgacaagtttgagctggccaagaagttcggattcaccgactttgtcaaccccaaggatgtggccgacaagggttcgatccagaactacctgatcgatctgaccgatggtggattcgattacaccttcgaatgcattggcaatgtgaacaccatgcgctccgctttggaggccacacacaagggttggggcacttcggtggtgatcggagtggccggtgctggacaggagatttccacgcgacccttccagctggtcgtgggtcgcgtgtggaagggttccgccttcggaggctggcgctccgtttccgatgttcccaaattggtggaggactacctgaagaaggatctgctggtggacgagttcatcacccacgagctgccgctgtcgcagatcaacgaggcattcgatctgatgcacaagggcgagagtatccgatccattattaagtactaa

SEQ ID NO: 14617 - protein, 379 aa, Drosophila melanogaster
MSATEGKVITCKAAVAWEAKKPLVIEDIEVAPPKAHEVRIKITATGVCHTDAFTLSGADPEGLFPVVLGHEGAGIVESVGEGVTNFKAGDHVIALYIPQCNECKFCKSGKTNLCQKIRLTQGAGVMPEGTSRLSCKGQQLFHFMGTSTFAEYTVVADISLTKINEKAPLEKVCLLGCGISTGYGAALNTAKVEAGSTCAVWGLGAVGLAVGLGCKKAGAGKIYGIDINPDKFELAKKFGFTDFVNPKDVADKGSIQNYLIDLTDGGFDYTFECIGNVNTMRSALEATHKGWGTSVVIGVAGAGQEISTRPFQLVVGRVWKGSAFGGWRSVSDVPKLVEDYLKKDLLVDEFITHELPLSQINEAFDLMHKGESIRSIIKY

SEQ ID NO: 14618 - DNA, 1446 bp, Zea mays
  CDS (82)..(1227)
ggccggggacctcacagccacatctctccactgctccgtccagcgcgtccacctcccaaacccctactcccccaggaagcaatggcttcccccacccagggccaggtcatcacctgcaaagcggcggtggcgtacgagccgaacaagccactcgtgatcgaggacgtgcaggtggcgccgccgcaggccggcgaggtccgcgtcaagatcctcttcaccgcgctctgccacaccgaccactacacctggagcggcaaggatcctgagggtctttttccttgcattcttggccacgaagctgctggaattgtggaaagtgtcggtgaaggagtaactgatgtgcagcctggggatcatgtcattccttgctaccaagcagaatgcaaagaatgcaagttttgcaagagcggaaagaccaacctctgtggtaaggtccgtagtgccacaggcgtaggtgtcatgatgaatgatatgaagagcaggttctctgtaaatggaaagcccatttaccatttcatggggacatcgacattcagccagtacactgtggtgcatgatgtcagtgttgcaaagatcaacccacaggcacccttagataaagtctgcctgctcggttgtggtgttcctactggtcttggagcggtgtggaatactgcaaaggttgaatctggctcagttgttgctgtttttggccttggaacagttggacttgcagttgctgagggagcaaaagctgctggtgcttctcgagttattggcattgacatcgacaataaaaagtttgatgttgcaaagaactttggagttacagaatttgttaacccaaaagagcatgacaaaccgatacagcaggtcctggtcgatcttacagatggcggcgtggattacagctttgagtgcattggaaatgtttcgattatgagggctgcactggaatgctccgacaagggctggggaacctccgtcatcgtcggagttgccgcctctggccaggagatctccacacgaccattccagctcgtgactggtcgtgtctggaagggaaccgcttttggtggcttcaagagccggacccaggtcccatggcttgttgacaagtacatgaagaaggaaattaaggtggacgagtacattacgcacaacatgaacctggctgacatcaacgacgccttccacctgctgcacgaaggtggctgtctgcgttgtgtgctggcgatgcagatctgaaattcctaagctaagcagtttttggatgtgtcggcatagactgtcttttgttttggaactagaattcctttttgcctcgttaggcctggacccactgtataatgctatgttgctttggatggctgacgatggttaccgctgtgttgctagccatgtggtacttgatctgtatcacggttgcaaataagtgctgtttctaaaacactccctcggtgaata

SEQ ID NO: 14619 - protein, 381 aa, Zea mays
MASPTQGQVITCKAAVAYEPNKPLVIEDVQVAPPQAGEVRVKILFTALCHTDHYTWSGKDPEGLFPCILGHEAAGIVESVGEGVTDVQPGDHVIPCYQAECKECKFCKSGKTNLCGKVRSATGVGVMMNDMKSRFSVNGKPIYHFMGTSTFSQYTVVHDVSVAKINPQAPLDKVCLLGCGVPTGLGAVWNTAKVESGSVVAVFGLGTVGLAVAEGAKAAGASRVIGIDIDNKKFDVAKNFGVTEFVNPKEHDKPIQQVLVDLTDGGVDYSFECIGNVSIMRAALECSDKGWGTSVIVGVAASGQEISTRPFQLVTGRVWKGTAFGGFKSRTQVPWLVDKYMKKEIKVDEYITHNMNLADINDAFHLLHEGGCLRCVLAMQI

SEQ ID NO: 14620 - DNA, 1393 bp, Oryza sativa
  CDS (84)..(1229)
gcaatcacatcctcttcccttctcttctccatcgcatctaccaccgagcgtgcaaggaggggggggggggggggggggtgaaaatggcttcctcgacccagggccaggtcatcacctgcaaagcggcggtggcatgggaggccaacaggccgatgacgatcgaggacgtgcaggtggcgccgccgcaggccggcgaggtccgtgtcaagatcctcttcaccgcgctctgccacaccgaccactacacctggagcggcaaggatcctgagggtctatttccttgcattcttggtcatgaagctgctggaattgttgaaagtgttggggaaggagtaactgaggtgcagcctggggaccatgtcattccttgttaccaagcagaatgcagagaatgcaagttttgcaagagtggaaagaccaacctctgtggcaaagttcgtgctgccacaggggtcggtgtcatgatgaatgatcgcaagagccgtttctcaataaatggaaaacccatttatcatttcatgggaacatctacattcagccagtatactgttgtgcacgatgtcagtgtcgcaaagataaacccacaggcacctctagacaaagtttgcctgcttggctgcggtgtttctactggcctcggagcagtatggaataccgcaaaggttgaagcaggttccatcgttgctatttttggacttggcacagttggacttgcagttgctgagggggcaaaatcagctggtgcttctcggattattggcatcgacattgatagcaaaaagtttgatgtcgcaaagaactttggggttacagaatttgtgaacccaaaggaccatgacaaaccaatccaacaggtcatagttgaccttacagacggtggtgtggactacagctttgaatgcattggaaatgtttctgttatgaggtctgcattggagtgctgccacaagggctggggaacctctgtcatcgttggtgtagctgcttctgggcaagaaatctctacacgaccattccagctcgtcactggccgtgtctggaagggaacagctttcggcggtttcaagagccgaagccaagttccatggctcgttgagaagtacttgaacaaggaaatcaaggtggacgagtacgttactcacagcatgaacctgactgacatcaacaaggcgtttgacctgctgcatgaaggtggctgcctgcggtgtgttctggcaactgataaatgaaccgatgatggttcatctgcttttggctgtgcttctgagctatgtcacgccaaattgtaatccagatctaccagccttggaaattgaattattctgctcgtttcgcttagaagcactttgaactgtgacaccactctgctataataatatatgtgctgtttgga

SEQ ID NO: 14621 - protein, 381 aa, Oryza sativa
MASSTQGQVITCKAAVAWEANRPMTIEDVQVAPPQAGEVRVKILFTALCHTDHYTWSGKDPEGLFPCILGHEAAGIVESVGEGVTEVQPGDHVIPCYQAECRECKFCKSGKTNLCGKVRAATGVGVMMNDRKSRFSINGKPIYHFMGTSTFSQYTVVHDVSVAKINPQAPLDKVCLLGCGVSTGLGAVWNTAKVEAGSIVAIFGLGTVGLAVAEGAKSAGASRIIGIDIDSKKFDVAKNFGVTEFVNPKDHDKPIQQVIVDLTDGGVDYSFECIGNVSVMRSALECCHKGWGTSVIVGVAASGQEISTRPFQLVTGRVWKGTAFGGFKSRSQVPWLVEKYLNKEIKVDEYVTHSMNLTDINKAFDLLHEGGCLRCVLATDK

SEQ ID NO: 14622 - DNA, 1143 bp, Fragaria ananassa
  CDS (1)..(1143)
atgtcaagtactgagggaaaggtcatatgctgcagagctgctgtggcatgggaagcagggaagccattagtgattgaagaagtagaggtagcacctcctcaggctaatgtagttcgtgtcaaaattctttatacctccttgtgccatactgacgtctacttctgggaagccaagggacaaaaccctttatttccaaggatctatggccatgaagcaggagggattgtggagagtgttggtgaaggggtgactgatctcaaagcgggtgatcatgtgctcccggtgttcactggggaatgtaaggagtgtgatcactgcaaatcagaagagagtaacatgtgtgacctgctcaggataaacacagacagaggagtgatgcttaatgatggaaaatcaaggttttcgattaagggcaaacctatataccactttgttgggacttcaacttttagtgtgtacaccgtgactcatgttggctgccttgccaagatcaacccccaaagtcctctagacaaagtttgcatcctcagctgtggaatctcaactggtttgggagctactcttaatgttcgaaaaccaaaaaagggctcaacagtggctgtgtttggattgggagctgtaggccttgcagctgctgaaggagcccggatggctggggcgtcaagaattattggtgttgatttgaattccaacagatttgaagaagctaagaagtttggtatcactgaatttgtgaaccccaaagaccacaagaaaccagttcaagaggtgattgctgagctgaccaatggaggagttgatcgaagcattgaatgcactggaaatattcaagccatgatacctgcatttgaatgtgtccatgatggttggggtgttgctgttcttgtgggagtgccacacaaagatgctgtcttcacgactcatccaatgaactttctgaatgagaggactctcaagggaaccttcttcggaaactacaagccacgaactgacattccctctgttgtggagaagtacatgaacaaggaactcgaggtagacaaattcatcacccatcaactcccattctcacaaatcaacaaggcatttgactacatgcttaaaggggaaggtattcgttgcataattaccatggaggagtga

SEQ ID NO: 14623 - protein, 380 aa, Fragaria ananassa
MSSTEGKVICCRAAVAWEAGKPLVIEEVEVAPPQANVVRVKILYTSLCHTDVYFWEAKGQNPLFPRIYGHEAGGIVESVGEGVTDLKAGDHVLPVFTGECKECDHCKSEESNMCDLLRINTDRGVMLNDGKSRFSIKGKPIYHFVGTSTFSVYTVTHVGCLAKINPQSPLDKVCILSCGISTGLGATLNVRKPKKGSTVAVFGLGAVGLAAAEGARMAGASRIIGVDLNSNRFEEAKKFGITEFVNPKDHKKPVQEVIAELTNGGVDRSIECTGNIQAMIPAFECVHDGWGVAVLVGVPHKDAVFTTHPMNFLNERTLKGTFFGNYKPRTDIPSVVEKYMNKELEVDKFITHQLPFSQINKAFDYMLKGEGIRCIITMEE

SEQ ID NO: 14624 - DNA, 1444 bp, Malus domestica
  CDS (95)..(1237)
tttctcaccacaaaaaattaaacagttcaaactgttcttccaaaaagctttgagatttcaatttcatcaagtttttattggattctaagcaagaatgtctaatactgctggtcaggtcatacgctgcagagctgctgtagcttgggaagcagggaagccactggtgattgaagaagttgaggtggcaccaccacaagcaaatgaagttcgcataaagatcctttttacatctttgtgccacactgatgtctacttctgggaagccaagggacaaaaccctttatttcctagaatttatggtcatgaggcaggagggattgtggagagtgttggtgagggcgtgacggatctgaaagccggcgatcatgtcctgccggtgttcacaggggaatgcaaggactgcgctcactgcaaatcagaagagagcaacatgtgtgacctcctcaggataaacactgacaggggagtgatgctcagtgatggaaaatcaagattttcaatcaaaggcaagcctatctaccattttgttgggacttccaccttcagcgagtacactgttgttcacgttggctgccttgccaagatcaatccctcggcgcctctagacaaagtctgtctcctcagttgtggaatctccacaggtctcggagctactctaaatgttgcaaaaccaaaaaagggatcaaccgtggctgttttcggattgggagctgtaggccttgcagctgctgaaggagccaggttgtctggcgcttcaagaattatcggtgttgatttgcattcggacagatttgaagaagcaaaaaagtttggcgtgacagaattcgtgaacccaaaagcgcacgaaaaaccagttcaagaggtgattgctgagttgacgaatcgaggagtggacagaagcattgaatgtacaggaagcactgaagccatgatatctgcatttgaatgtgtccatgatggttggggtgttgctgttcttgtgggagtaccacacaaagatgccgtcttcaagacgcatccggttaactttctgaatgagaggactctcaagggtacattcttcggaaactacaagactcgaacggacattccctctgtcgtggagaagtacatgaacaaggaactggagctagagaaattcatcacccacaaagtcccgttctcagaaatcaacaaggcatttgagtacatgcttaaaggggaaggtcttcgttgcataatccgcatggaggaatgaaaactaaaaaagcttcatcttttgatgttctgtgttcttaaattctaaattttcgatttcgtctttcggttttctttgttttctccagtttgatatgtttgtaatgcatatgagaatctgtttgcttctgtttggacagtttctatgaccatacatgtatatcaataaataaagaatacaagtcaatcaaaaaaaaaaaaaaaaaaa

SEQ ID NO: 14625 - protein, 380 aa, Malus domestica
MSNTAGQVIRCRAAVAWEAGKPLVIEEVEVAPPQANEVRIKILFTSLCHTDVYFWEAKGQNPLFPRIYGHEAGGIVESVGEGVTDLKAGDHVLPVFTGECKDCAHCKSEESNMCDLLRINTDRGVMLSDGKSRFSIKGKPIYHFVGTSTFSEYTVVHVGCLAKINPSAPLDKVCLLSCGISTGLGATLNVAKPKKGSTVAVFGLGAVGLAAAEGARLSGASRIIGVDLHSDRFEEAKKFGVTEFVNPKAHEKPVQEVIAELTNRGVDRSIECTGSTEAMISAFECVHDGWGVAVLVGVPHKDAVFKTHPVNFLNERTLKGTFFGNYKTRTDIPSVVEKYMNKELELEKFITHKVPFSEINKAFEYMLKGEGLRCIIRMEE

SEQ ID NO: 14626 - DNA, 1137 bp, Schizosaccharomyces pombe
  CDS (1)..(1137)
atgtctttcgaaggtaaaacgatcacttgcaaggcagccgtagcttggggtgcaaaggaacctttatctatagaggatattcaggttgcccctccaaaagctcatgaggttcgtgtgaaagtcgattggagtgctgtttgtcacacagatgcttacacgctgtctggtgtagatccagaaggcgcattccctattgttcttggtcatgagggtgctggtattgtggaaagcattggcgaaggggttatcaacgtgcgtcctggagaccatgttattttgctatatactccggaatgtaaagagtgtaaattctgtcgtagtggtaaaactaatttgtgctccaaaattcgtgaaacacaaggtcgaggtttaatgcctgacggtactagtcgcttttcctgtcgcgataaaacgttgcttcattacatgggatgttctagctttagtcaatacacagttgtagctgatatctcgcttgtggctatttcacactccgcacctcttcgcagtatttgcttgttgggctgcggtgtcacaactggatttggtgctgtgacacactctgctaaggttgagtctggttcaacggtagctgttgttggatgtggatgcgtaggtctcgctgcaatgcagggtgcggttgcagctggtgcttcgagaatcattgctattgatatcaatgcagataaggaagtatatgccaagaaatttggtgctactgactttatcgattcttctaaagttaaagacctcgtacagtatgttattgatgtgactgatggtggtgttgactatgcatttgattgcactggaaatgtcactgtcatgcagcaggaacttcaattctgccacaaaggttggggtaaactgtgtgttataggcgtcgccgcagctggtaaaacccttgattttcgtccattccttgtagtaactggtcgtcaagtgttgggttcagcttttggaggagttaaagggcgttctgaattgccgaactttgttgatgagtacatgcaaggccacttcaaagtggatgaatatatcactaatgaagaaccacttaagaacataaacaaagctttcgaccatatgcacgaaggaaagtgcataagatgcgtcgtggatatgaataagccataa

SEQ ID NO: 14627 - protein, 378 aa, Schizosaccharomyces pombe
MSFEGKTITCKAAVAWGAKEPLSIEDIQVAPPKAHEVRVKVDWSAVCHTDAYTLSGVDPEGAFPIVLGHEGAGIVESIGEGVINVRPGDHVILLYTPECKECKFCRSGKTNLCSKIRETQGRGLMPDGTSRFSCRDKTLLHYMGCSSFSQYTVVADISLVAISHSAPLRSICLLGCGVTTGFGAVTHSAKVESGSTVAVVGCGCVGLAAMQGAVAAGASRIIAIDINADKEVYAKKFGATDFIDSSKVKDLVQYVIDVTDGGVDYAFDCTGNVTVMQQELQFCHKGWGKLCVIGVAAAGKTLDFRPFLVVTGRQVLGSAFGGVKGRSELPNFVDEYMQGHFKVDEYITNEEPLKNINKAFDHMHEGKCIRCVVDMNKP

SEQ ID NO: 14628 - DNA, 1143 bp, Schizosaccharomyces pombe
  CDS (1)..(1143)
atgcaacagtcacccaccgcaggcaagatcattaactgtaaagctgctgtagcatggcaaccagcagctccactgtcgattgaaaatgttcaggtatttcccccacgagtgcacgaagtaagaatcaaaatcgtaaattcaggagtctgtcacactgatgcctacacactctctggaaaagatcctgaaggtcttttcccagtaattcttggtcatgaaggtgctggcattgttgaatccgttggtcctcaagttacgacagtccaagtaggagatccagtgatcgccttgtatacaccagaatgtaagacgtgtaaattttgcaagtccggcaagacgaacctttgtggacgcattcgcactactcaaggaaaaggtttaatgccggacggaaccagccgcttctcctgtaatggaaataccttgttgcatttcatgggatgctcgacatttagtgaatataccgttgtagcagacatatcagtggtagcaattgaacgattggcacccttagatagcgtctgtcttctcggttgtggtatcaccactggctatggagccgcgacgatcactgctgatattaaggagggtgactcagtagctgtttttggtttgggaagtgttgggctagctgttatacaaggagcagttaaaaaacgtgcgggccggatttttggcatagatgttaatcccgaaaaaaaaaattgggcgatgagttttggagccactgatttcattaaccctaatgatctccaaagtccaattcaagatgtactaatacatgaaacagatggtggattagactggacctttgattgtacaggtaatgtgcacgtaatgcgatccgctttagaagcatgccataaaggttggggacaatccattgttatcggtgtagcagctgccggacaagaaatttccaccaggccgttccaacttgttactggtcgagtatggagaggatgtgcatttggaggtgtgaaaggacgaagtcagcttcccgatttggtgaaagagtacctagatcacaaattggaaattgataaatatatcacacatcgtcgacctctcaaagaaatcaatgaagcattcactgacatgcataacggcaattgcattaaaacagttttatcgattccttga

SEQ ID NO: 14629 - protein, 380 aa, Schizosaccharomyces pombe
MQQSPTAGKIINCKAAVAWQPAAPLSIENVQVFPPRVHEVRIKIVNSGVCHTDAYTLSGKDPEGLFPVILGHEGAGIVESVGPQVTTVQVGDPVIALYTPECKTCKFCKSGKTNLCGRIRTTQGKGLMPDGTSRFSCNGNTLLHFMGCSTFSEYTVVADISVVAIERLAPLDSVCLLGCGITTGYGAATITADIKEGDSVAVFGLGSVGLAVIQGAVKKRAGRIFGIDVNPEKKNWAMSFGATDFINPNDLQSPIQDVLIHETDGGLDWTFDCTGNVHVMRSALEACHKGWGQSIVIGVAAAGQEISTRPFQLVTGRVWRGCAFGGVKGRSQLPDLVKEYLDHKLEIDKYITHRRPLKEINEAFTDMHNGNCIKTVLSIP

SEQ ID NO: 14630 - DNA, 1140 bp, Pichia pastoris
  CDS (1)..(1140)
atgtctaccgaaggtcaaatcatcaaatgtaaggcagctgttgcctgggaggcaggaaaggatctctctattgaggagattgaggttcttcctccaagagcccatgaagttagagtgaaagtggaattcactggtgtatgccacactgatgcttacacgctttctggtgcagatgcagagggaagtttccctgttgtgttcggccatgaaggtgctggtgttgtcgagtcagttggagaaggtgttgagtccgtgaaggttggggattctgtagtgcttctgtacactcctgagtgcagagagtgcaagttctgtctgtctggtaagacgaacctctgtggtaaaatcagagccacccagggtaaaggtttgttaccagacgggacttctcgtttccgttgtaagggcaaggatttgtttcactatatgggatgttcttccttttctcaatacactgtggtggctgacatctcagtggttaaagtccaagacgaagctcctaaggacaagacatgtctgttgggttgtggtgttaccacagggtacggtgctgctatcaacactgctaagatctctaagggtgacaagatcggtgtgtttggtgctggatgtattggattatctgtcatccaaggtgcagtttccaaaggtgcaagcgagattattgtaattgacatcaatgattcaaagaaggcatgggcggaccaatttggtgcaactaagtttgtcaatcctacaaccttaccagaaggtaccaatattgttgactacttgattgatatcactgacggaggctttgactataccttcgactgtaccggtaatgttcaagtaatgagaaatgcacttgaatcttgccacaagggttggggtgagtcgatcatcatcggtgtcgctgctgctggtaaagaaatctctacccgtcctttccagttggttactggcagagtctggagaggatgcgcctttggaggtatcaagggacgtactcaaatgccatctttggttcaggactatcttgatggtaagattaaagttgacgagtttatcacacacagacatgacctggacaacatcaacaaagcatttcatgacatgcatgctggaaactgtattcgtgctgtgattactatgcactaa

SEQ ID NO: 14631 - protein, 379 aa, Pichia pastoris
MSTEGQIIKCKAAVAWEAGKDLSIEEIEVLPPRAHEVRVKVEFTGVCHTDAYTLSGADAEGSFPVVFGHEGAGVVESVGEGVESVKVGDSVVLLYTPECRECKFCLSGKTNLCGKIRATQGKGLLPDGTSRFRCKGKDLFHYMGCSSFSQYTVVADISVVKVQDEAPKDKTCLLGCGVTTGYGAAINTAKISKGDKIGVFGAGCIGLSVIQGAVSKGASEIIVIDINDSKKAWADQFGATKFVNPTTLPEGTNIVDYLIDITDGGFDYTFDCTGNVQVMRNALESCHKGWGESIIIGVAAAGKEISTRPFQLVTGRVWRGCAFGGIKGRTQMPSLVQDYLDGKIKVDEFITHRHDLDNINKAFHDMHAGNCIRAVITMH

SEQ ID NO: 14632 - DNA, 1146 bp, Oryza sativa
  CDS (1)..(1146)
atggccgcggcgtcgtctccggcggcggccatcacctgccgagcggcggtggcgtgggcgcccggtcaggcgctggtgatggaggaggtggaggtggcgccgccggaggccatggagatccgcgtcaaggtcgtctccacctccatctgccgcagtgacgtcacccagtggcaatccacggctcaaaccgatctgttccccagaattttcgggcacgaagcatccggtgtggttgagagtgttggtgaaggtgtgaccgagttcgaagtgggagaccatgtgctcaccgtcttcatcggagagtgcatgagctgcaagcactgcgtttcagggaagagcaacatgtgccagaagctcggcctggagaggaggggtgtcatgcacagcgatcagaagacccgcttctcgctcagggggaaacctgtgtaccattactgtgcagtgtcaagcttcagcgagtacacggttgtgcactccggttgcgcggtgaaggtcggcccaaccgtgccgatggacaggatatgcctgctgagctgtggtgtatctgcagggcttggtgcagcctggaaggttgctgatatctcgaaggggtcgagtgtggttatatttggccttggaactgtagggctttctgttgctcaaggtgctaagctgcgcggggcttctataattatcggtgttgatactaatcctgaaaagcaagaaaaggggaaagcttttggtgtcacagattttattaatccagaagaattgaatgaacctgttcagcaggtggtgaagcggctgaccaatggaggtgcagattactcttttgagtgcgtgggtgatacaggagtagtgtcgactgcactgcaatcatgttctgatggttgggggctgactgtaactcttggtgtgccaaaagcaaagccagaggtttctgctcattatgcactacttctgtctggaagaacattgaaggggtctttgtttggaggatggagacctaaatctgatctacctttgttagtggacaagtatgcaaacaaggaaatccaagtcgatgaccttgttacacatgatttgtcattcgattacatcaacaaggcacttgaactgatgctagaaaacaagtgtttgcgatgtgtgattcacatgcctcagtga

SEQ ID NO: 14633 - protein, 381 aa, Oryza sativa
MAAASSPAAAITCRAAVAWAPGQALVMEEVEVAPPEAMEIRVKVVSTSICRSDVTQWQSTAQTDLFPRIFGHEASGVVESVGEGVTEFEVGDHVLTVFIGECMSCKHCVSGKSNMCQKLGLERRGVMHSDQKTRFSLRGKPVYHYCAVSSFSEYTVVHSGCAVKVGPTVPMDRICLLSCGVSAGLGAAWKVADISKGSSVVIFGLGTVGLSVAQGAKLRGASIIIGVDTNPEKQEKGKAFGVTDFINPEELNEPVQQVVKRLTNGGADYSFECVGDTGVVSTALQSCSDGWGLTVTLGVPKAKPEVSAHYALLLSGRTLKGSLFGGWRPKSDLPLLVDKYANKEIQVDDLVTHDLSFDYINKALELMLENKCLRCVIHMPQ

SEQ ID NO: 14634 - DNA, 1146 bp, Oryza sativa
  CDS (1)..(1146)
atggcgggtcagatcccccaacccatccgttgcaaagcggccgtgtgcagggccgctggcgagccgctggccgtcgaggagatcgtcgtggacccgcccaaggcgcacgaggtccggatcaagatcgtctgcacctcgctctgccacagcgacgtcacgttctggcgtatgcaggatttccccggcgttttcccgaggatttttgggcacgaagccttcggggtggtggagagcgtaggggagcatgtggaagggttcgccgccggcgacccggtggtgcccacgttcctgggccagtgcaccgagtgcgtggactgcgcctcggagcggagcaacgtgtgctccacgtaccggttcgcggtgcgccccgggatgccgcgcgacggcaccgcccgcttccgcgaccgccacggcgccccgatccaccacttcctcggcgtctccagcttcagcgagtacaccgtcgtggacgccaaccaggtcgtccgcgtcgaccccgccgtgccgcccgccacggcctccctcctcagctgcggcgccaccaccggggtcggagcagcgtggaagctggctaaagtcgagccggggtcttcggttgctatctttggcctcggcgccgtaggattagcggtagctgaaggggccaggatttgcggtgcgtcaacgatcatcggcgtggatttgaaccctgagaaacatgaacttggaaagaagttcggtgtgacgcacttcatcaatccacaagaacttggggacaaacctgtcagccaagcgatcatcgagatgactgacggtggcgcggactactgcttcgagtgcatcgggctggcgtcggtgatgagcgatgcatttcggagctcccgagagggatggggcaagacgatcattcttggcgtcgaaatgcacggtgcccctttgtccattccttcgttggagatcctcaacggcaaatgcgtaatgggatcactcttcggaggggtgaaacccaagcaggacattcccatcctggccgacaagtatctgaacaaggagctggagttggacaagttcataactcacgaggttcccctgaaggacatcaacacggcatttgaccttctgttgcaggggaagagtctcagatgcaccatttggatggacaagtga

SEQ ID NO: 14635 - protein, 381 aa, Oryza sativa
MAGQIPQPIRCKAAVCRAAGEPLAVEEIVVDPPKAHEVRIKIVCTSLCHSDVTFWRMQDFPGVFPRIFGHEAFGVVESVGEHVEGFAAGDPVVPTFLGQCTECVDCASERSNVCSTYRFAVRPGMPRDGTARFRDRHGAPIHHFLGVSSFSEYTVVDANQVVRVDPAVPPATASLLSCGATTGVGAAWKLAKVEPGSSVAIFGLGAVGLAVAEGARICGASTIIGVDLNPEKHELGKKFGVTHFINPQELGDKPVSQAIIEMTDGGADYCFECIGLASVMSDAFRSSREGWGKTIILGVEMHGAPLSIPSLEILNGKCVMGSLFGGVKPKQDIPILADKYLNKELELDKFITHEVPLKDINTAFDLLLQGKSLRCTIWMDK

SEQ ID NO: 14636 - DNA, 1140 bp, Oryza sativa
  CDS (1)..(1140)
atggaagatcagagcctgaagcccatccgttgcaaagcggcggtctgtagagcggccagtgagccactgatcgtcgaggagatcgtcgtcgatcctccgaaagcctacgagatccgcatcaagatcatctgcacctccctgtgccacaccgatgtcaccctctggcacaaggtagaccctgcctttccaagaatcttgggccacgaggcctacggggtggtggagagcgtgggggagaacgtggaggggctcgcggcgggggacacggtggtgccgacgttcatggggcagtgcgactcgtgcgccagctgcgcggcggagtggacgaaccagtgcaccgccgtgccgttcaccatgggccccgggatgcggcgcgacggcacaaccaggttctgggacggcgaagggaagccgctcagcgacacggtggccgtcaccagcttcagccagtacaccgtcgtcgacgtcaaccaggtcgtcaaggtcgaccccgccgtgccgcccaaaatcgcctgcctcctcggctgctgcggcggcaccggggtaggagcagcatggaggttggccaaagtgcaacccggttcgtcggtggttgtcttcgggctgggatccgtcggattggcggtagtgcaaggggcaaaaatgtgtggagcaacgaagattatcggtgttgatttgaatcctaacaaagaggaagttggaaaagagttcggtgtgactgatttcgtcaatccatcccaactcggcgacaaatccgtcagtgaggtgatcaatgcgatgacagacggtggcgctgactacagcttcgagtgcatcggtatctcgtcggtgatgactgaggcagtcagaagcaccaaatcaggacggggcaagacgatcattctgggggtcgagaaggacagccagccgttgtgcctgccgtccttcgagtttctgttcggcaagtgcgtcatgggatcgctcttcggtggggccaaacccaaaactgacatcccaatcctcgccgagaaatgcatgaacaaggagctggaactggagaagctggtcactcatgaggtaggcctgacggagataaacacagccttcgatttgcttctgcagggaaagagcctgagatgcatcatatggatggacaagtga

SEQ ID NO: 14637 - protein, 379 aa, Oryza sativa
MEDQSLKPIRCKAAVCRAASEPLIVEEIVVDPPKAYEIRIKIICTSLCHTDVTLWHKVDPAFPRILGHEAYGVVESVGENVEGLAAGDTVVPTFMGQCDSCASCAAEWTNQCTAVPFTMGPGMRRDGTTRFWDGEGKPLSDTVAVTSFSQYTVVDVNQVVKVDPAVPPKIACLLGCCGGTGVGAAWRLAKVQPGSSVVVFGLGSVGLAVVQGAKMCGATKIIGVDLNPNKEEVGKEFGVTDFVNPSQLGDKSVSEVINAMTDGGADYSFECIGISSVMTEAVRSTKSGRGKTIILGVEKDSQPLCLPSFEFLFGKCVMGSLFGGAKPKTDIPILAEKCMNKELELEKLVTHEVGLTEINTAFDLLLQGKSLRCIIWMDK

SEQ ID NO: 14638 - DNA, 1173 bp, Oryza sativa
  CDS (1)..(1173)
atggagcagatgaacactgctgctgcaaagtccatcaggtgcagagcggcggtgagcagggtggccgggcagccgctggagatggaggaggtggaggtggcgccgccgcgggcgcacgaggtccggatcaagatcctctgcacatccatctgccacacggacatcaccttctggcgtatggaaggcaatcatccgtctatctttggccatgaagcagtcggtgtggtggagagcgtgggggagcacgtgcaggaggtggcggtgggtgacatggtggtgccggtgttcgccgcgcagtgcagtgagtgccctgactgcctctccgaccgcagcaacctctgctccaaactgcccaacgtcgccggcctcatgcctcgcgaccgcacgacgcgcttctcctccgtctccaccggcgagcccatccgccacttcctctccgtctccagcttcgccgagtacaccgtcgttgacatcacccacattgtcaagctcgatgttggattcccaccggcgatggcatgcctcctcagttgtggcatttccaccggtgttggtgcggcatggaaggtggcagcagtggagcccggctcgagtgtcgccgtgttcggcctgggtgccgttgggttagcggttgctcaaggggcgaggatgcgtggggctaagaggattattggggtggacctgaacccggacaaattcgacgttggtaagaggctgggcatgaccgacttcatcaacccgaacgataccggcgggaagaccgtgagcgaggtcatcaaggagatgaccgggggcggcggcgccgactactgcttcgagtgcatcggctcgacttcggtcatggcggaagccttccaaagcactcgaaatgggtgggggaagacgatcctgctcggcgtctccggcaacaaggcgccgatcagcatcccgtcgcacgagatcctccggggaagatcggtcatcgggtcgctcttcggcggcatcaagcccaagaacgacatcccgatgctggctcagaagtacctggacaaggagctggagctggaggagttcatcacgcacgagatggggttcgaggagatcaacagggcgttcgagctgctcacgcaggggaagagcatccgctgcatcatctggatggacggcgccaaggtgatcgacaacggcgagtga

SEQ ID NO: 14639 - protein, 390 aa, Oryza sativa
MEQMNTAAAKSIRCRAAVSRVAGQPLEMEEVEVAPPRAHEVRIKILCTSICHTDITFWRMEGNHPSIFGHEAVGVVESVGEHVQEVAVGDMVVPVFAAQCSECPDCLSDRSNLCSKLPNVAGLMPRDRTTRFSSVSTGEPIRHFLSVSSFAEYTVVDITHIVKLDVGFPPAMACLLSCGISTGVGAAWKVAAVEPGSSVAVFGLGAVGLAVAQGARMRGAKRIIGVDLNPDKFDVGKRLGMTDFINPNDTGGKTVSEVIKEMTGGGGADYCFECIGSTSVMAEAFQSTRNGWGKTILLGVSGNKAPISIPSHEILRGRSVIGSLFGGIKPKNDIPMLAQKYLDKELELEEFITHEMGFEEINRAFELLTQGKSIRCIIWMDGAKVIDNGE

SEQ ID NO: 14640 - DNA, 1140 bp, Oryza sativa
  CDS (1)..(1140)
atggcgaccgcagggaaggtgatcaagtgcaaagcggcggtggcatgggaggccgcgaagccgctggtgatcgaggaggtggaggtggcgccgccgcaggccatggaggtgcgcgtcaagatcctcttcacctcgctctgccacaccgacgtctacttctgggaggccaagggacagactcccgtgttccctcggatcttcggccatgaagctggaggtattgtggagagtgttggagagggtgtgactgatcttgcccctggtgaccatgttctccctgtgttcactggggagtgcaaggagtgtgcccactgcaagtcagcagagagcaacatgtgtgatctgctcaggatcaacactgacaggggtgtgatgattggtgatggcaaatcacgcttttccatcaacgggaagcccatttaccatttcgtcgggacttcgaccttcagcgagtacactgtcatgcatgttggttgcgttgcgaagatcaacccggcagctccacttgataaagtttgcgttcttagctgtggtatttctactggtcttggtgctacaatcaatgtggcaaagccaccaaagggttcgacggtggcgatatttggtctaggagctgtaggccttgctgccgcagaaggtgcaaggattgcaggagcgtcaaggatcattggcattgacctgaacgccaacagatttgaagaagctaggaaatttggttgcactgaatttgtgaacccaaaggaccatgacaagccagttcagcaggtacttgctgagatgaccaatggcggagttgaccgcagcgttgaatgcactggcaacatcaacgccatgatccaagcatttgaatgtgttcatgatggctggggtgttgctgttttggtcggcgtgccacacaaggacgccgagttcaagacccacccgatgaacttcctgaacgagaggactctcaagggaaccttcttcggcaactacaagccacgcaccgatctgcccaacgtcgtcgagctctacatgaagaaggagctggaggtggagaagttcatcacacacagcgtgccgttctcggagatcaacacggcgttcgacctgatgcacaagggcgagggcatccgctgcatcatccgcatggagaactga

SEQ ID NO: 14641 - protein, 379 aa, Oryza sativa
MATAGKVIKCKAAVAWEAAKPLVIEEVEVAPPQAMEVRVKILFTSLCHTDVYFWEAKGQTPVFPRIFGHEAGGIVESVGEGVTDLAPGDHVLPVFTGECKECAHCKSAESNMCDLLRINTDRGVMIGDGKSRFSINGKPIYHFVGTSTFSEYTVMHVGCVAKINPAAPLDKVCVLSCGISTGLGATINVAKPPKGSTVAIFGLGAVGLAAAEGARIAGASRIIGIDLNANRFEEARKFGCTEFVNPKDHDKPVQQVLAEMTNGGVDRSVECTGNINAMIQAFECVHDGWGVAVLVGVPHKDAEFKTHPMNFLNERTLKGTFFGNYKPRTDLPNVVELYMKKELEVEKFITHSVPFSEINTAFDLMHKGEGIRCIIRMEN

SEQ ID NO: 14642 - DNA, 1155 bp, Triticum aestivum
  CDS (1)..(1155)
atggctgccgctgcatcgtcgccctcccctccggcggtcatcacctgccgagcggcggtggcatgggggccggggcaggcgctggtgatggaggacgtggaggtcgccccgccggggccactggagatccgcgtcaaggtcgtctccacctccatctgccgcagcgacgtcacccagtggcagtccacggcgcagcccgatctgttccccagaattttcgggcacgaagcatccggggtggtcgagagcgtcggggaaggagtgaccgagttccaagtgggagaccacgcgctcaccgtcttcatcggggaatgcatgagctgcaagcactgcgtgtcggggaaaagcaacatgtgccagacgctcggtctggagaggaagggcgtcatgcacagcgaccagaccacccgcttctccatcggcgggaagcccgtgtaccattactgcgccgtgtcgagcttcagcgagtacgcggttgtccactcgggctgcgcggtcaaggtcagccccaccatgcccatggacaggatatgcctgctcagctgcggcgcgtccgcaggccttggtgcggcttggaatgttgctgatgtatccaaggggtcaagtgtagttatatttggtctgggaactgtaggactttcggtagctcaaggtgctaagctacggggagcttccaagattattggagtagataccaatcctgctaagcaagaaaaggggaaggcttttggtgttacagattttattaatcctgccgaattgaatgaacctgttcagcaggtagtaaaacggcttactgatggaggggctgattactcttttgaatgtgtgggtgataccggagtagtctcgactgcattgcaatcatgttctgatggatggggactgactgtaactcttggtgtaccaaaagcaaaaccagaagtttctgctcattatggattgcttctctctggaagaacactgaaggggtctttgtttggaggatggagacccaaaactgatatacctttgttagtggagaagtacgcaaacaaggaaatccaagttgatggccttgtcacacatgatatgccattcagtgacatcaacaaagcgcttgaactgatgctacaaaacaggtgtttgcgatgcgtgattcacatgccaaagtga

SEQ ID NO: 14643 - protein, 384 aa, Triticum aestivum
MAAAASSPSPPAVITCRAAVAWGPGQALVMEDVEVAPPGPLEIRVKVVSTSICRSDVTQWQSTAQPDLFPRIFGHEASGVVESVGEGVTEFQVGDHALTVFIGECMSCKHCVSGKSNMCQTLGLERKGVMHSDQTTRFSIGGKPVYHYCAVSSFSEYAVVHSGCAVKVSPTMPMDRICLLSCGASAGLGAAWNVADVSKGSSVVIFGLGTVGLSVAQGAKLRGASKIIGVDTNPAKQEKGKAFGVTDFINPAELNEPVQQVVKRLTDGGADYSFECVGDTGVVSTALQSCSDGWGLTVTLGVPKAKPEVSAHYGLLLSGRTLKGSLFGGWRPKTDIPLLVEKYANKEIQVDGLVTHDMPFSDINKALELMLQNRCLRCVIHMPK

SEQ ID NO: 14644 - DNA, 1155 bp, Zea mays
  CDS (1)..(1155)
atggccgccgccgatgcatcttcgttgcctccgtccgccatcacctgccgagcggcggtggcgtggggaccgggccagccactggtgatggaggaggtggaggtcgccccgccggggcccatggagatccgtgtcaaggtcgtctccacctccgtctgccgcagcgacgtcactgcctggcaatccaaggcgcaacttgatctgttccccagagtcttcggccacgaggcatccggagtagtagagagtgtcggtgaaggtgtgaccgagttccaagtcggtgaccacgttctcactgtcttcattggggaatgcaagagctgcaagcactgcgtctcagggaagagcaacatgtgccagaagctcggtctggagaggaagggtgtcatgcacagcgatcagaagacacgcttctctgtcaaggggaaacctgtgtaccattactgtgcagtgtcaagcttcagcgagtacacggttgtccattccggatgtgcggtgaaggttggcttgaccgtgccaatggacagggtgtgcctgctgagctgcggtgtgtctgcaggactcggtgcagtctggaatgtagctaatgtatcaaagggctcaagtgtagctatatttggtcttgggaccgtaggactttctgtcgctcaaggtgctaagcttcgaggggcgtccaagattataggagttgatactaatcctgagaagcaagaaaaggggaaatcatttggtgtcacggactttattaacccagatgaattgagtgaacctgttcaacaggtaatcaaaaggattactgatggaggggtggattactcatttgaatgtgtgggtgattctggagtagtctccactgcacttcaatcatgttctgatggttggggagtaactgtaactcttggcttaccaaaaggaaaactagaagtgtctactcattatgcatttcttctatccggaagaacactgaagggatctatgtttggaggatggaaacctaaatctgatctaccttcattggtggataaatatgcagcaaaggaaatccaagttgatggcctagtcacgcatgatataccattcaatgaaatcaacaaagcgcttgagttgatgctagaaaacaagtgcttgagatgtgtgattcacatgccacggtaa

SEQ ID NO: 14645 - protein, 384 aa, Zea mays
MAAADASSLPPSAITCRAAVAWGPGQPLVMEEVEVAPPGPMEIRVKVVSTSVCRSDVTAWQSKAQLDLFPRVFGHEASGVVESVGEGVTEFQVGDHVLTVFIGECKSCKHCVSGKSNMCQKLGLERKGVMHSDQKTRFSVKGKPVYHYCAVSSFSEYTVVHSGCAVKVGLTVPMDRVCLLSCGVSAGLGAVWNVANVSKGSSVAIFGLGTVGLSVAQGAKLRGASKIIGVDTNPEKQEKGKSFGVTDFINPDELSEPVQQVIKRITDGGVDYSFECVGDSGVVSTALQSCSDGWGVTVTLGLPKGKLEVSTHYAFLLSGRTLKGSMFGGWKPKSDLPSLVDKYAAKEIQVDGLVTHDIPFNEINKALELMLENKCLRCVIHMPR

SEQ ID NO: 14646 - DNA, 1140 bp, Brassica napus
  CDS (1)..(1140)
atggcgactcaaggtcaggttatcacatgcaaagctgcggtggcttacgagccgaacaaacctctggtcatcgaagacgtgcaagtggctccccctcaggccggtgaggttcgcatcaagatcctcttcaccgctctctgtcacaccgacgcctacacctggagcggcaaggatcctgaaggtctcttcccttgtatcctcggtcacgaggctgctgggattgttgagagtgttggtgaaggtgtaactgaggttcaacctggggaccatgttatcccttgttaccaagctgagtgccgtgaatgcaagttctgcaaatctggcaagactaacctctgcggcaaggttcgatccgctactggtgttggggtcatgatgaacgaccgtaagagccgcttctccgttaatgggaaacccatttatcacttcatgggtacctccacgtttagtcagtacactgttgttcatgatgttagtgtcgccaagatcgatcctcaggctcctttggagaaagtctgccttcttggatgtggtgttcccactggccttggagcagtttggaacactgcaaaagtagagcctgggtcaaatgttgccatttttggtcttgggaccgtggggcttgctgttgctgagggtgcgaaaacagctggtgctacaaggatcattggcattgatatcgacagcaagaagtatgaaactgcaaagaagtttggtgttaatgagtttgtgaacccaaaggaccaccaaaagccaattcaggaagtgattgtcgacctcactgatggaggtgttgactacagctttgagtgcatcgggaatgtctccgtgatgagagccgcattggagtgctgtcacaagggatggggaacttcagttatagtgggtgttgcagcatcaggacaagagatatcaacacgaccgttccaacttgtgactggccgtgtgtggaaaggaacagcatttggtggtttcaagagtcgaacccaagtgccttggcttgtagagaagtatatgaacaaggagatcaaagtggatgagtacataacgcacaacatgacattgggagagatcaacaaggcttttgatctgctgcatgaaggcacttgtcttcgttgtgtcctcagtaccagcgaatga

SEQ ID NO: 14647 - protein, 379 aa, Brassica napus
MATQGQVITCKAAVAYEPNKPLVIEDVQVAPPQAGEVRIKILFTALCHTDAYTWSGKDPEGLFPCILGHEAAGIVESVGEGVTEVQPGDHVIPCYQAECRECKFCKSGKTNLCGKVRSATGVGVMMNDRKSRFSVNGKPIYHFMGTSTFSQYTVVHDVSVAKIDPQAPLEKVCLLGCGVPTGLGAVWNTAKVEPGSNVAIFGLGTVGLAVAEGAKTAGATRIIGIDIDSKKYETAKKFGVNEFVNPKDHQKPIQEVIVDLTDGGVDYSFECIGNVSVMRAALECCHKGWGTSVIVGVAASGQEISTRPFQLVTGRVWKGTAFGGFKSRTQVPWLVEKYMNKEIKVDEYITHNMTLGEINKAFDLLHEGTCLRCVLSTSE

SEQ ID NO: 14648 - DNA, 1140 bp, Brassica napus
  CDS (1)..(1140)
atgtctacgaccggacaaatcattcgatgcaaagctgccgtttgctgggaagctggaaagccactagtgatggaggaagtggaggttgctccaccgcagaagcatgaagtccgtatcaagattctcttcacttctctctgtcacaccgatgtttacttctgggaagctaagggacaaacgcctttgtttccacgtatcttcggacatgaagctggaggtattgtggagagtgttggagaaggagtgactgatctccaaccaggagaccacgtcctccccatcttcaccggagaatgcggagactgccctcactgccactctgaggagtccaacatgtgcgaccttctcaggatcaacaccgagagaggagggatgatacacgacggcgaatcgagattctccatcaacggcaaaccgatctaccatttccttgggacctcaacgttcagcgagtacaccgtggttcactctggtcaagtcgctaagatcaaccctgaagctcctcttgacaaagtctgcatcgtcagctgtggcttgtccactgggctgggagctactttgaatgttgctaaacccaagaaaggtcagagcgttgctatctttggtcttggtgctgttgggttggctgctgcggaaggtgctaggattgctggtgctggtaggatcattggtgttgatcttaaccccaagagattcgaggaagctaagaagttcggtgtgacggagtttgtgaaccctaaggaacatgacaagccagttcagcaagtcatcgctgagatgactaacggcggtgtggacaggagtgtggagtgcactggaagcattcaagccatgattcaagcctttgaatgtgttcacgatggctggggtgttgcggtgctggttggtgtgccgagcaaagacgacgctttcaagactcatccgatgaacctcctgaacgagaggacactcaagggtactttctttggcaactacaaacccaaaaccgacattcccggggtggtcgaaaagtacatgaacaaggagctggagcttgagaagttcatcactcacacagtgccattctctgagatcaacaaggcctttgattacatgttgaagggagagagtatccgttgcatcatcaccatgggtgcttga

SEQ ID NO: 14649 - protein, 379 aa, Brassica napus
MSTTGQIIRCKAAVCWEAGKPLVMEEVEVAPPQKHEVRIKILFTSLCHTDVYFWEAKGQTPLFPRIFGHEAGGIVESVGEGVTDLQPGDHVLPIFTGECGDCPHCHSEESNMCDLLRINTERGGMIHDGESRFSINGKPIYHFLGTSTFSEYTVVHSGQVAKINPEAPLDKVCIVSCGLSTGLGATLNVAKPKKGQSVAIFGLGAVGLAAAEGARIAGAGRIIGVDLNPKRFEEAKKFGVTEFVNPKEHDKPVQQVIAEMTNGGVDRSVECTGSIQAMIQAFECVHDGWGVAVLVGVPSKDDAFKTHPMNLLNERTLKGTFFGNYKPKTDIPGVVEKYMNKELELEKFITHTVPFSEINKAFDYMLKGESIRCIITMGA

SEQ ID NO: 14650 - DNA, 1140 bp, Brassica napus
  CDS (1)..(1140)
atggccactcaaggtcaggttatcacttgcaaagctgcggtggcttacgagcccaacaaacctctcgtcatcgaagatgtgcaagtcgctccccctcaggccggtgaggttcggatcaagatcctattcacggctctctgtcacaccgacgcctacacttggagcggcaaggatcctgaaggtctcttcccatgtatcctcggtcatgaagctgctggggttgttgagagtgttggtgaaggtgtaactgaagttcagcctggagaccatgttatcccatgttaccaagctgagtgccgtgaatgcaaattctgcaaatccggcaagactaacctctgcggcaaggttcggtccgctactggtgttggggtcatgatgaacgaccgtaagagccggttctcggttaatgggaaacccatttatcacttcatgggtacctccacgtttagtcagtacactgttgttcatgacgtcagtgtcgccaagattgatcctaaggctcctttggagaaagtctgccttcttggatgtggtgttcccactggccttggagctgtttggaacactgcaaaagtagaaccagggtctaatgttgccatctttggtcttgggactgtgggacttgctgttgctgagggtgcgaaaacagctggtgctacaaggatcattggcattgatatcgacagcaagaagtatgaaactgcaaagaagtttggtgttaatgagtttgtgaacccaaaggaccaccaaaagccaattcaggaagtgattgtcgacctcactgatggcggtgttgactacagctttgagtgtattgggaatgtctccgtgatgagagccgcattggagtgctgtcacaagggatggggaacttcagttatagtcggtgttgcagcatcaggacaagagatatcaacccgaccgttccaactcgtgactggccgtgtgtggaaaggaacagcttttggtggtttcaagagtcgaacccaagtgccttggcttgtagagaagtatatgaacaaggagatcaaagtggatgagtacataacgcacaacatgaccttgggagagatcaacaaggcttttgacctgttgcatgaaggcacttgccttcgttgtgtcctcagtaccagcgaatga

SEQ ID NO: 14651 - protein, 379 aa, Brassica napus
MATQGQVITCKAAVAYEPNKPLVIEDVQVAPPQAGEVRIKILFTALCHTDAYTWSGKDPEGLFPCILGHEAAGVVESVGEGVTEVQPGDHVIPCYQAECRECKFCKSGKTNLCGKVRSATGVGVMMNDRKSRFSVNGKPIYHFMGTSTFSQYTVVHDVSVAKIDPKAPLEKVCLLGCGVPTGLGAVWNTAKVEPGSNVAIFGLGTVGLAVAEGAKTAGATRIIGIDIDSKKYETAKKFGVNEFVNPKDHQKPIQEVIVDLTDGGVDYSFECIGNVSVMRAALECCHKGWGTSVIVGVAASGQEISTRPFQLVTGRVWKGTAFGGFKSRTQVPWLVEKYMNKEIKVDEYITHNMTLGEINKAFDLLHEGTCLRCVLSTSE

SEQ ID NO: 14652 - DNA, 1140 bp, Brassica napus
  CDS (1)..(1140)
atgtctacgaccggacaaatcattcgatgcaaagctgccgtttgctgggaagctggaaagccactagtgatggaggaagtggaggttgctccaccgcagaagcatgaagtccgtatcaagattctcttcacttctctctgtcacaccgatgtttacttctgggaagctaagggacaaacgcctttgtttccacgtatcttcggacatgaagctggagggattgtggagagtgttggagaaggagtgactgatctccaaccaggagaccacgtcctccccatcttcaccggagaatgcggagactgccctcactgccactctgaggagtccaacatgtgcgaccttctcaggatcaacaccgagagaggagggatgatacacgacggcgaatcgagattctccatcaacggcaaaccgatctaccatttccttgggacctcaacgttcagcgagtacaccgtggttcactctggtcaagtcgctaagatcaaccctgaagctcctcttgacaaagtctgcatcgtcagctgtggcttgtccactgggctgggagctactttgaatgttgctaagcccaagaaaggtcagagtgttgctatcttcggtcttggcgctgttggattggctgctgcggaaggtgctaggattgctggtgctggtaggatcattggtgttgatcttaaccccaagagattcgaggaagctaagaagttcggtgtgacggagtttgtgaaccctaaggaacatgacaagccagttcagcaagtcatcgctgagatgactaacggcggtgtggacaggagtgtggagtgcactggaagcattcaagccatgattcaagcctttgaatgtgttcacgatggctggggtgttgcggtgctggttggtgtgccgagcaaagacgatgctttcaagactcatccgatgaacctcctgaacgagaggacactcaagggtactttctttggcaactacaaacccaaaaccgacatccccggggtggtcgaaaagtacatgaacaaggagctggagcttgagaagttcattactcacacagtgccattctctgagatcaacaaggcctttgattacatgttgaagggagagggtatccgttgcatcatcaccatgggtgcttga

SEQ ID NO: 14653 - protein, 379 aa, Brassica napus
MSTTGQIIRCKAAVCWEAGKPLVMEEVEVAPPQKHEVRIKILFTSLCHTDVYFWEAKGQTPLFPRIFGHEAGGIVESVGEGVTDLQPGDHVLPIFTGECGDCPHCHSEESNMCDLLRINTERGGMIHDGESRFSINGKPIYHFLGTSTFSEYTVVHSGQVAKINPEAPLDKVCIVSCGLSTGLGATLNVAKPKKGQSVAIFGLGAVGLAAAEGARIAGAGRIIGVDLNPKRFEEAKKFGVTEFVNPKEHDKPVQQVIAEMTNGGVDRSVECTGSIQAMIQAFECVHDGWGVAVLVGVPSKDDAFKTHPMNLLNERTLKGTFFGNYKPKTDIPGVVEKYMNKELELEKFITHTVPFSEINKAFDYMLKGEGIRCIITMGA

SEQ ID NO: 14654 - DNA, 1143 bp, Glycine max
  CDS (1)..(1143)
atgtctagcaccgttggccagaccatcaagtgcaaagctgcgattgcatgggaggctgggaagccgctggtgattgaagaagtggaggttgcgccaccgcaagccggtgaagtccgtttgaagatcctctacacctctctttgccacactgatgtttacttctgggatgcgaagggccagactccattgtttcctcgcatttttggccatgaagcttcggggattgtggagagcgtaggcgagggtgtgactcatctgaaaccaggtgaccatgccctccctgtgttcacaggagagtgtggagattgcgcccattgcaagtcagaggagagcaacatgtgtgagctactcaggatcaacaccgataggggtgtcatgatccatgatggccaatcaaggttctctaagaatggacaacccatacaccatttcttgggaacctctacattcagtgaatacactgttgtccatgctggatgtgttgcaaagatcaaccctgctgctccacttgacaaagtttgtgttctcagttgtggaatttgcacaggttttggtgctactgtaaatgtagcaaaaccaaaacctggttcctctgttgccatatttggacttggagctgttggccttgcggctgctgaaggtgcaagagtttcaggtgcttcaagaatcattggagttgatttagtttctgcccgatttgaagaagctaagaagttttgggttaatgagtttgtgaacccaaaggatcatgataaacctgtgcaacaggtaattgctgaaatgaccaatggaggtgtggatcgggctgttgaatgtactggcagcatccaagccatggtctcagcattcgaatgcgtccacaatggttggggtcttgctgtacttgttggtgtgcctagtaaagatgatgcattcaaaactgctcctattaatttcctgaacgagaggactcttaagggcaccttttatggcaactacaaaccacgcaccgatcttccatctgttgtcgagaagtacatgagtggggagctagaagtggacaaattcatcactcacacagttccattctcagagatcaacaaagcttttgatttaatgctgaagggacagtccattaggtgtatcatccgcatgcaagagtga

SEQ ID NO: 14655 - protein, 380 aa, Glycine max
MSSTVGQTIKCKAAIAWEAGKPLVIEEVEVAPPQAGEVRLKILYTSLCHTDVYFWDAKGQTPLFPRIFGHEASGIVESVGEGVTHLKPGDHALPVFTGECGDCAHCKSEESNMCELLRINTDRGVMIHDGQSRFSKNGQPIHHFLGTSTFSEYTVVHAGCVAKINPAAPLDKVCVLSCGICTGFGATVNVAKPKPGSSVAIFGLGAVGLAAAEGARVSGASRIIGVDLVSARFEEAKKFWVNEFVNPKDHDKPVQQVIAEMTNGGVDRAVECTGSIQAMVSAFECVHNGWGLAVLVGVPSKDDAFKTAPINFLNERTLKGTFYGNYKPRTDLPSVVEKYMSGELEVDKFITHTVPFSEINKAFDLMLKGQSIRCIIRMQE

SEQ ID NO: 14656 - DNA, 1128 bp, Glycine max
  CDS (1)..(1128)
atgtcgaaaacctcagagattattacatgcaaagctgctatttgctggggaataggaaaacctgtgactgtggaagagatacaagtagaccctcccaaagccaccgaagttcgagttaagatgctttgtgccagtatatgctccacagacatctctagcacaaaaggattcccacataccaattttcctatagcacttggacacgaaggagttggtattatagagagtgtcggtgatcaagtaacgaatctgaaagaaggggatgtggtaattccaacatacataggcgagtgccaagaatgtgagaattgtgtttcagaaaaaaccaatttgtgtatgacatacccagtaagatggactggtctaatgccagataacacttcaaggatgtccatccgaggagagaggatataccatattttcagttgtgctacatggtcagaatacatggttagtgatgccaactacgttctcaaagttgatccaaccattgatcgagctcatgccagtttcatctcatgtggcttttcaactggatttggagctgcttggaaggaagccaaggttgaaagtggatccactgtagctgtttttggtcttggggctgttggattaggggctgtaattggatccaaaatgcagggagcaagtaggataattggaattgacacaaacgagaacaagagagcaaaaggagaagcttttggaataactgactttataaatccgggtgattctaataaatctgcttcagaattggtcaaggaactaagtggtggaatgggtgccgactattcttttgagtgtactggagtttccactttactctctgaatccttggaagccacaaaaattggaacaggtaaagcaatagtaataggtgtaggaattgaaattactttgccattgggtctttttgccattctgcttggtagaactttgaaaggttctgtttttggaggactcagggccatttcagacctttccattttagctgacaaaggccacaaaaaggaattccctcttcaagaactcttcacccatgaggtcacattagcagacataaacaaagcatttgagctactaaaacaacccaattgtgtcaaagttgtcatcaacatgccatag

SEQ ID NO: 14657 - protein, 375 aa, Glycine max
MSKTSEIITCKAAICWGIGKPVTVEEIQVDPPKATEVRVKMLCASICSTDISSTKGFPHTNFPIALGHEGVGIIESVGDQVTNLKEGDVVIPTYIGECQECENCVSEKTNLCMTYPVRWTGLMPDNTSRMSIRGERIYHIFSCATWSEYMVSDANYVLKVDPTIDRAHASFISCGFSTGFGAAWKEAKVESGSTVAVFGLGAVGLGAVIGSKMQGASRIIGIDTNENKRAKGEAFGITDFINPGDSNKSASELVKELSGGMGADYSFECTGVSTLLSESLEATKIGTGKAIVIGVGIEITLPLGLFAILLGRTLKGSVFGGLRAISDLSILADKGHKKEFPLQELFTHEVTLADINKAFELLKQPNCVKVVINMP

SEQ ID NO: 14658 - DNA, 1203 bp, Glycine max
  CDS (1)..(1203)
atggcaagttcagttgtggttgctaatgggaacttgaatccaaatgatacaaggggaaagaccattacatgcaaagctgccgtggcatatggtcctggagagccctttgtggtggaacgtgtccttgtccatcctcctcagaaaatggaggttcgaatcaagatcctcttcacttcaatctgtcacaccgatctcagtgcttggcaaggcgagaatgaggctcaacgtgcttatcctcggattttcggccatgaagcttccgggattgtggagagtgtgggtgaaggtgtaagtgacatgaatgaaggggacttggtggtgccaatcttcaatggggaatgtggggattgcaaatattgcaagtgcgagaagaccaacaagtgtgagagatttggggtggatgctatgaagaaggtgatggctagtgatggtgcaacaaggttttacacaatggatggaaaacccatattccatttcttgaacacttcaactttcactgagtacacagtggtggattcagcatgcatcgtcaagattcacattgatggtagtaatggcgatctcaaccccaacatcaaaagactcaccttactcagttgtggcgtatctacgggtgttggagctgcttggaataccgctgatgtgcattttggttcaactgtagctgtctttggtttaggtgttgtgggtctcgctgtagcagaaggggcacgagccagaggtgcatccagaattataggcgtagatatcaactcagacaaattcatcaaagcccgagaaatgggtatcaccgacttcataaatccaaaggatgatgagagaccagtatatgagataattggggaaatgactggtgggggcgtgcactatagttttgaatgtgctggaaatttgaacgttctaagggatgccttcttgtctgctcatgagggttggggattgactgtgctagtagggattcatctatcaccaaaaatgcttcccatccacccaatggagttgttccatggtcgcagaatagtaggatcaaatttcggaggcatcaaagggaagactcaattgccacattttgccaaagaatgcatgaatggagtggtgaagttagatgattttatcactcacgagcttcctatcaaggagataaaccaggccttcgatcttttgaccactggaaagtcactgagatgtcttctacacttctga

SEQ ID NO: 14659 - protein, 400 aa, Glycine max
MASSVVVANGNLNPNDTRGKTITCKAAVAYGPGEPFVVERVLVHPPQKMEVRIKILFTSICHTDLSAWQGENEAQRAYPRIFGHEASGIVESVGEGVSDMNEGDLVVPIFNGECGDCKYCKCEKTNKCERFGVDAMKKVMASDGATRFYTMDGKPIFHFLNTSTFTEYTVVDSACIVKIHIDGSNGDLNPNIKRLTLLSCGVSTGVGAAWNTADVHFGSTVAVFGLGVVGLAVAEGARARGASRIIGVDINSDKFIKAREMGITDFINPKDDERPVYEIIGEMTGGGVHYSFECAGNLNVLRDAFLSAHEGWGLTVLVGIHLSPKMLPIHPMELFHGRRIVGSNFGGIKGKTQLPHFAKECMNGVVKLDDFITHELPIKEINQAFDLLTTGKSLRCLLHF

SEQ ID NO: 14660 - DNA, 1164 bp, Glycine max
  CDS (1)..(1164)
atggaacacaaagtagccacaacaactgaaggacaatccataagatgtaaagcggcaatttgtcgcaaagcaggtgaaccactgtgtattgaggagatcattgtggcgccaccaatgcctggtgaagctcgcattcgtattatatgctcctctctctgtcaaaccgatatcagttttcggaacatgcaggaccatcctgccatttatccaagaattctgggtcacgaggcaataggggttgtggaaagtgtaggagaggatgtaactgaagttacaaaaggagatgtggttgttccaattttcttacctgattgtggggagtgtatcgattgcaaatcaagcaagagcaacctttgttcaaagtttccatttgaggtgtctccctggatgcctagatatgccacttctagattcacagatttaaaaggagagatcatacaccatttcttgtctgtttctagttttagcgagtacactgtggtcgacattgcccatctaatcaagattgatccggcaataccacccaacagggcatgcctcatcagctgtggtatatcagcagggataggtgctgcttggagagcagcaggtgtggagccagggtctacagtagctatttttgggctggggagtattggattagcagttgctgagggagctagactttgtggagcaactaagattataggtgtggatgtcaacccagaaagatatgaaatcggaaaaaggtttggactcacggactttgtccattctggagaatgtgaaaataaatctgtgagccaggttatcatagagatgactggtgggggagcagattattgctttgaatgtgttggtatggcatcattgatgcacgaagcatatgcttcttgtagaaagggttgggggaaaacaatagttttgggagtggacaagccaggatccaagttgaaccttagctgtagtgaggtcctagttagtgggaagagcctcaggggatgtttatttggaggactcaaacctaagtctcatgtacccattctccttaaacgctacatggacaaggaactgagtttggacgaagttgtcacacatgaaatggagttcaaggatatcaataaagcttttgatctattgattgaaggacagtgtcttcgatgtgtgatttggatggacaaatga

SEQ ID NO: 14661 - protein, 387 aa, Glycine max
MEHKVATTTEGQSIRCKAAICRKAGEPLCIEEIIVAPPMPGEARIRIICSSLCQTDISFRNMQDHPAIYPRILGHEAIGVVESVGEDVTEVTKGDVVVPIFLPDCGECIDCKSSKSNLCSKFPFEVSPWMPRYATSRFTDLKGEIIHHFLSVSSFSEYTVVDIAHLIKIDPAIPPNRACLISCGISAGIGAAWRAAGVEPGSTVAIFGLGSIGLAVAEGARLCGATKIIGVDVNPERYEIGKRFGLTDFVHSGECENKSVSQVIIEMTGGGADYCFECVGMASLMHEAYASCRKGWGKTIVLGVDKPGSKLNLSCSEVLVSGKSLRGCLFGGLKPKSHVPILLKRYMDKELSLDEVVTHEMEFKDINKAFDLLIEGQCLRCVIWMDK

SEQ ID NO: 14662 - DNA, 1167 bp, Glycine max
  CDS (1)..(1167)
atgaaagatgacaaacaggctccagttcctgcttctacaaccgaaggacaacctatacgatgtaaagcggcggtttctagaagagctggtgagccgttggttattgaggacatcattgtggcgccgccaaagcctcgtgaggctcggattcgtattatttgttcctctctctgccacagcgacatcacacttcggaaccttcaggaccctcctgccattttcccaaggattctaggtcatgaggcaactggggttgtggaaagtgttgggaaggatgtaactgaagttacaaaaggtgatgtggtaattccagttatcctaccagaatgtggggagtgcatagattgcaaatcaaccaagagcaaccggtgcactaattttcctttcaaggtgtctccttggatgcctcgagatggcaccacaagattcactggccaaaatggagagatcatataccatttcttgtttatttcaagtttcagtgagtacactgtggtggacattgctaatctgataaagattgatccagaaattcctcctgacagagcatgccttctcggatgtggtgtttcaacaggggtaggtgctgcttggagaactgcaggtgtggaacccgggtcaacagtagctatttttgggttgggatctattggattagctgttgcaaagggagctagactttgtggagcaactaggattataggtgtggacatcaacccagaaaagtttgaaattggaaagaagtttggagtcacagactttgtcaatgctggagaatgtgggggcaaacctgttggccaggttatcatagagataactgatggaggagcagattattgctttgaatgtgttggtaatgcatcattgatgcatgaagcatatgcttcttgtagaaagggttggggaaaaacaatagttttgggatcggacaagccaagctccaagttgagccttatctgtagtgagatcctcgttagtgggaaaagcctcgtgggatacatgtttagaggactcaaacccaagtctcatatgcctattctcattaaacactacttggacaaagaactaaatttagatgggtttgtcacacataaagtgaagttcaaacatatcaacaaagcttgtaatttaataattaaaggacagtgtcttcgatatgtaatttag

SEQ ID NO: 14663 - protein, 388 aa, Glycine max
MKDDKQAPVPASTTEGQPIRCKAAVSRRAGEPLVIEDIIVAPPKPREARIRIICSSLCHSDITLRNLQDPPAIFPRILGHEATGVVESVGKDVTEVTKGDVVIPVILPECGECIDCKSTKSNRCTNFPFKVSPWMPRDGTTRFTGQNGEIIYHFLFISSFSEYTVVDIANLIKIDPEIPPDRACLLGCGVSTGVGAAWRTAGVEPGSTVAIFGLGSIGLAVAKGARLCGATRIIGVDINPEKFEIGKKFGVTDFVNAGECGGKPVGQVIIEITDGGADYCFECVGNASLMHEAYASCRKGWGKTIVLGSDKPSSKLSLICSEILVSGKSLVGYMFRGLKPKSHMPILIKHYLDKELNLDGFVTHKVKFKHINKACNLIIKGQCLRYVI

SEQ ID NO: 14664 - DNA, 1161 bp, Glycine max
  CDS (1)..(1161)
atggaacataaattagcaacaactgaaggacaacccataagatgtaaagcggcggtttgtcgcaaagctggtgagccactgggtattgaggagatcatggtggcgccaccaatgcctggtgaagctcgcattcgtattatatgctcctctctctgtcgaactgatatcagtttccggaacatgcaggggcctccggccaatttcccaacaattctgggtcatgaggcaataggggttgtggagagcgtaggagaggatgtaactgaagttgcaaaaggagatatggttgtcccaattttcatagctgaatgtggggagtgtatagattgcaaatcaagcaagagcaacctttgttcaaagtttcctttcaagctgtctccttggatgcctagacatgccacttctagattcgtggatttaaaaggagagatcatacaccacttcttgtctgtttctagttttagcgagtacaccgtggtcgacatcgcccatctaaccaagattgatccggaagttcctcccagcaaggcatgcctcctcagttgtggtgtatcaaccggggtaggtgctgcttggagaacagcaggtgtggagccagggtctacagtagctattttcgggctgggaagtattggattagctgttgctgagggagctagactttgtggagcaacaaggattataggtgtggatatcaactcagaaaaatatgaaatcggaaagaagtttggaatcacggattttgttcattctggagaatgtgaaaacaaatctgcgagccaggttatcatagagatgactgatggaggagcagattattgttttgaatgtgttggtaatgcatcattgatgcatgaggcatatgcttcttgtagaaagggttggggaaaaacaatagttttgggatcggacaagccaggctccaagttgagccttagctgtagtgagatcctcgttagtgggaagagcctcgtgggatgcatgtttggaggactcaaacccaagtctcatgtgcctattctcattaaacgctacttggacaaggaactgaatttggatgggtttgtcacacatgaagtggagttcaaagatatcaacaaagcttttgatttaatgattaaaggacagtgtcttcgatgtgtgatttggatggacaaatga

SEQ ID NO: 14665 - protein, 386 aa, Glycine max
MEHKLATTEGQPIRCKAAVCRKAGEPLGIEEIMVAPPMPGEARIRIICSSLCRTDISFRNMQGPPANFPTILGHEAIGVVESVGEDVTEVAKGDMVVPIFIAECGECIDCKSSKSNLCSKFPFKLSPWMPRHATSRFVDLKGEIIHHFLSVSSFSEYTVVDIAHLTKIDPEVPPSKACLLSCGVSTGVGAAWRTAGVEPGSTVAIFGLGSIGLAVAEGARLCGATRIIGVDINSEKYEIGKKFGITDFVHSGECENKSASQVIIEMTDGGADYCFECVGNASLMHEAYASCRKGWGKTIVLGSDKPGSKLSLSCSEILVSGKSLVGCMFGGLKPKSHVPILIKRYLDKELNLDGFVTHEVEFKDINKAFDLMIKGQCLRCVIWMDK

SEQ ID NO: 14666 - DNA, 1140 bp, Glycine max
  CDS (1)..(1140)
atgtctacagctggtcaggtcatcaagtgcagagctgcggtggcatgggaagcagggaagccactatcgatagaaaccatagaagtggcaccaccccagaaaggtgaagtgcgtttgaagatcctcttcaactccctttgccgtacagatgtttactggtgggatgctaagggccagactccgctgtttcctcgtatcttaggccacgaagcttcggggattgtggagagcgtgggcaagggtgtgacacatctgaaaccaggtgaccatgctctcccaatattcactggggagtgtggtgaatgcacctattgcaagtctgaagagagcaacctgtgtgagcttctcaggatcaacactgacagaggagtgatgctcagtgatggcaaaacaaggttctccaaaaatggacaacctatttaccacttcgttggaacctccactttcagtgaatacactgttctccatgaaggatgtgtcgccaagatcaaccctgctgcccctcttgacaaagttgctgttgtcagttgtggattctgcacaggttttggggctactgtgaatgttgcaaagccaaagcctaataatactgttgctgtatttggattaggagctgttggtcttgctgcctgtgaaggggcaagggtttctggtgcatctagaatcatcggggttgatttacttaccaatcgatttgaacaagccaaacaatttggggtcactgattttgtgaacccgaaagatcacaacaaaccagttcaagaggtcattgctgaaatgactaatggaggagtagatcgtgctattgaatgcacaggaagcatccaagcatcaatctcggcatttgaatgcactcatgatggttggggtactgctgtccttgttagtgtgccaaagaaggatgcagaattcaaaactcatcctatgaagttcatggaagggagaactcttaagggtaccttctatggtcactatagaccccgcactgacattcctggtgttgtggagaagtacctcaacaaggagctggagctggacaaatttatcactcactctgtcccattctcagagatcaacactgcatttgatcttatgctgaaaggggagggaataaggtgcctcatctgcatggaagagtaa

SEQ ID NO: 14667 - protein, 379 aa, Glycine max
MSTAGQVIKCRAAVAWEAGKPLSIETIEVAPPQKGEVRLKILFNSLCRTDVYWWDAKGQTPLFPRILGHEASGIVESVGKGVTHLKPGDHALPIFTGECGECTYCKSEESNLCELLRINTDRGVMLSDGKTRFSKNGQPIYHFVGTSTFSEYTVLHEGCVAKINPAAPLDKVAVVSCGFCTGFGATVNVAKPKPNNTVAVFGLGAVGLAACEGARVSGASRIIGVDLLTNRFEQAKQFGVTDFVNPKDHNKPVQEVIAEMTNGGVDRAIECTGSIQASISAFECTHDGWGTAVLVSVPKKDAEFKTHPMKFMEGRTLKGTFYGHYRPRTDIPGVVEKYLNKELELDKFITHSVPFSEINTAFDLMLKGEGIRCLICMEE

SEQ ID NO: 14668 - DNA, 1143 bp, Glycine max
  CDS (1)..(1143)
atgtcgagcacagctggccaagtcatcaaatgcaaagctgcggtttcatgggaggcagggaagccacttgtgattgaagaagtagaggttgcgccaccacaagctggtgaagtgcgtttgaagatcctctacacctctctttgccacactgatgtttacttctgggaagctaagggccaaactccattgtttcctcgtatatttggtcatgaagctggagggattgtggagagcgtaggtgagggtgtgactcatctgaaaccaggggaccatgccctccctgtgtttaccggggagtgtggggactgccctcattgcaagtcagaggagagcaacatgtgtgatcttctcaggatcaacactgataggggtgtcatgatccatgatagccaaacaaggttttctataaagggacaacctatttaccattttgttggtacctccacattcagtgaatacactgttgttcatgccggatgtgttgccaaagtcaaccctgctgccccacttgacaaaatttgtgttctcagttgtggaatttgcacaggtcttggggctactatcaatgttgcaaaaccaaaacctggttcttctgttgccatttttggacttggagctgttggccttgctgctgctgaaggggcaaggatttctggtgcatcaagaattattggggttgatttagtttctagcagatttgaagaagctaagaagtttggggtcaatgaatttgtgaacccaaaagaccatgacaagcctgtacaagaggtgattgctgcaatgacgaatgggggtgtggatcgtgctgttgaatgtactggcagcatccaagccatgatctcggcattcgaatgcgtccacgatggttggggtgttgctgtacttgttggagtgccaaacaaagatgatgcattcaaaactcatccagtgaatttcttgaacgagagaactctaaagggtaccttctacggaaactacaaaccccgcactgatcttccttctgttgtggagaagtacatgaatggggaattggaactggagaaattcatcactcacacagttccattctcagagattaacaaggcttttgattacatgctgaaaggggagtccatcagatgcatcattcgaatgggggagtaa

SEQ ID NO: 14669 - protein, 380 aa, Glycine max
MSSTAGQVIKCKAAVSWEAGKPLVIEEVEVAPPQAGEVRLKILYTSLCHTDVYFWEAKGQTPLFPRIFGHEAGGIVESVGEGVTHLKPGDHALPVFTGECGDCPHCKSEESNMCDLLRINTDRGVMIHDSQTRFSIKGQPIYHFVGTSTFSEYTVVHAGCVAKVNPAAPLDKICVLSCGICTGLGATINVAKPKPGSSVAIFGLGAVGLAAAEGARISGASRIIGVDLVSSRFEEAKKFGVNEFVNPKDHDKPVQEVIAAMTNGGVDRAVECTGSIQAMISAFECVHDGWGVAVLVGVPNKDDAFKTHPVNFLNERTLKGTFYGNYKPRTDLPSVVEKYMNGELELEKFITHTVPFSEINKAFDYMLKGESIRCIIRMGE

SEQ ID NO: 14670 - DNA, 1140 bp, Glycine max
  CDS (1)..(1140)
atgtctacagctggtcaggtcatcaagtgcagagctgcggtggcatgggaagcagggaagccactatcgatagaaaccatagaagtggcaccaccccagaaaggtgaagtgcgtttgaagatcctcttcaactccctttgccgtacagatgtttactggtgggatgctaagggccagactccgctgtttcctcgtatcttaggccacgaagcttcggggattgtggagagcgtgggcaagggtgtgacacatctgaaaccaggtgaccatgctctcccaatattcactggggagtgtggtgaatgcacctattgcaagtctgaagagagcaacctgtgtgagcttctcaggatcaacactgacagaggagtgatgctcagtgatggcaaaacaaggttctccaaaaatggacaacctatttaccacttcgttggaacctccactttcagtgaatacactgttctccatgaaggatgtgtagccaagatcaaccctgatgccccacttgacaaagttgctattgtcagctgtggattctgcacaggttttggggctactgtgaatgttgcaaaaccaaagcctagtaatactgttgctgtctttggcttaggagctgttggtcttgctgcctgtgaaggggcaagggtttctggtgcatctagaatcatcggggttgatttacttaccaatcgatttgaacaagccaaacaatttggggtcactgattttgtgaacccgaaagatcacaacaaaccagttcaagaggtcattgctgaaatgactaatggaggagtagatcgtgctattgaatgcacaggaagcatccaagcatcaatctcggcatttgaatgcactcatgatggttggggtactgctgtccttgttagtgtgccaaagaaggatgcagaattcaaaactcatcctatgaagttcatggaagggagaactcttaagggtaccttctatggtcactatagaccccgcactgacattcctggtgttgtggagaagtacctcaacaaggagctggagctggacaaatttatcactcactctgtcccattctcagagatcaacactgcatttgatcttatgctgaaaggggagggaataaggtgcctcatctgcatggaagagtaa

SEQ ID NO: 14671 - protein, 379 aa, Glycine max
MSTAGQVIKCRAAVAWEAGKPLSIETIEVAPPQKGEVRLKILFNSLCRTDVYWWDAKGQTPLFPRILGHEASGIVESVGKGVTHLKPGDHALPIFTGECGECTYCKSEESNLCELLRINTDRGVMLSDGKTRFSKNGQPIYHFVGTSTFSEYTVLHEGCVAKINPDAPLDKVAIVSCGFCTGFGATVNVAKPKPSNTVAVFGLGAVGLAACEGARVSGASRIIGVDLLTNRFEQAKQFGVTDFVNPKDHNKPVQEVIAEMTNGGVDRAIECTGSIQASISAFECTHDGWGTAVLVSVPKKDAEFKTHPMKFMEGRTLKGTFYGHYRPRTDIPGVVEKYLNKELELDKFITHSVPFSEINTAFDLMLKGEGIRCLICMEE

SEQ ID NO: 14672 - DNA, 1140 bp, Glycine max
  CDS (1)..(1140)
atggcaactcaaggtcaagtcattacctgcaaagctgcggtggcctgggaacccaacaagcccttaaccgtccaagacgttcaggttgctccgcctcaggccggcgaggtccgtgtccaaatcctcttcaccgctctctgccacaccgatgcttacacttggggcggcaaggatcccgaaggtctcttcccctgtattctcggccacgaagctgcagggattgtggagagtgttggagaaggtgttactaatgttcagcctggggatcatgtcattccctgttaccaggctgagtgtggggagtgcaagacttgcaaatcggggaagacaaacctctgtggcaaggttcgttccgccactggagttggggtcatgctcaatgatggaaagagccggttctccattaatgggaagcccatttatcatttcatgggaacatccacttttagtcaatacactgttgttcatgacgttagtgtagctaagattgacccggtagctcccttggagaaagtttgccttcttggatgtggtgtttcaactggacttggagctgtctggaacactgcaaaagtggagtcagggtcaattgttgctatttttggccttggaactgttgggcttgctgttgcagagggtgcaaaaactgctggtgcatcccgggttattggcatagatattgacagcaagaagtttgatatagcgaaaaactttggagtcaccgagtttataaatccaaacgaacatgataaaccaatccagcaggtcatcattgatcgcacagatggtggagttgattatagctttgagtgcattggaaatgtctctgtgatgagagctgctttggaatgctgccacaagggctgggggacgtcagttattgtgggtgttgcagcatcagggcaggaaatatctacccgtcctttccagttggtgagtggacgtgtctggaaaggaacagcttttggtggcttcaagagcaggtcacaggtgccttggcttgtagacaagtacttgaagaaagaaatcaaggttgatgagtatattacccatactttgaccctttcggagatcaacaaggcttttgatcttttgcatgaagggagatgtcttcgttgcgtgctgtcaacacaagaatga

SEQ ID NO: 14673 - protein, 379 aa, Glycine max
MATQGQVITCKAAVAWEPNKPLTVQDVQVAPPQAGEVRVQILFTALCHTDAYTWGGKDPEGLFPCILGHEAAGIVESVGEGVTNVQPGDHVIPCYQAECGECKTCKSGKTNLCGKVRSATGVGVMLNDGKSRFSINGKPIYHFMGTSTFSQYTVVHDVSVAKIDPVAPLEKVCLLGCGVSTGLGAVWNTAKVESGSIVAIFGLGTVGLAVAEGAKTAGASRVIGIDIDSKKFDIAKNFGVTEFINPNEHDKPIQQVIIDRTDGGVDYSFECIGNVSVMRAALECCHKGWGTSVIVGVAASGQEISTRPFQLVSGRVWKGTAFGGFKSRSQVPWLVDKYLKKEIKVDEYITHTLTLSEINKAFDLLHEGRCLRCVLSTQE

SEQ ID NO: 14674 - DNA, 1146 bp, Glycine max
  CDS (1)..(1146)
atgtcgtcgagcacagttggtcaagtcatcaaatgcaaagctgcggtttcatgggaggcagggaagccacttgtgattgaagaagtagaggttgcgccaccacaagctggtgaagtgcgtttgaagatcctctacacctctctttgccacactgatgtttacttctgggaagccaagggccaaactccattgtttcctcgtatatttggtcatgaagctggagggattgtggagagcgtaggtgagggtgtgactcatctcaaaccaggggaccatgccctcccagtgtttaccggggagtgtggagaatgccctcattgcaagtcagaggagagcaacatgtgtgatcttctcaggatcaacactgataggggtgtcatgatccatgacagccaaacaagattttctattaagggacaacctatttaccattttgttggtacctccacattcagtgaatacactgttgttcatgccggatgtgttgccaaagtcaaccctgctgccccacttgacaaaatttgtgttctcagttgtggaatttgcacaggtcttggggctactatcaatgttgcaaaaccaaaacctggttcttctgttgccatttttggacttggagctgttggccttgctgctgctgaaggggcaaggatttctggtgcatcaagaattattggggttgatttagtttctagcagatttgaagaagctaagaagtttggggtcaatgaatttgtgaacccaaaagaccatgacaagcctgtacaagaggtgattgctgcaatgacgaatgggggtgtggatcgtgctgttgaatgtactggcagcatccaagccatgatctcggcattcgaatgcgtccacgatggttggggtgttgctgtacttgttggagtgccaaacaaagatgatgcattcaaaactcatccagtgaatttcttgaacgagagaactctaaagggtaccttctacggaaactacaaaccccgcactgatcttccttctgttgtggagaagtacatgaatggggaattggaactggagaaattcatcactcacacagttccattctcagagattaacaaggcttttgattacatgctgaaaggggagtccatcagatgcatcattcgaatgggggagtaa

SEQ ID NO: 14675 - protein, 381 aa, Glycine max
MSSSTVGQVIKCKAAVSWEAGKPLVIEEVEVAPPQAGEVRLKILYTSLCHTDVYFWEAKGQTPLFPRIFGHEAGGIVESVGEGVTHLKPGDHALPVFTGECGECPHCKSEESNMCDLLRINTDRGVMIHDSQTRFSIKGQPIYHFVGTSTFSEYTVVHAGCVAKVNPAAPLDKICVLSCGICTGLGATINVAKPKPGSSVAIFGLGAVGLAAAEGARISGASRIIGVDLVSSRFEEAKKFGVNEFVNPKDHDKPVQEVIAAMTNGGVDRAVECTGSIQAMISAFECVHDGWGVAVLVGVPNKDDAFKTHPVNFLNERTLKGTFYGNYKPRTDLPSVVEKYMNGELELEKFITHTVPFSEINKAFDYMLKGESIRCIIRMGE

SEQ ID NO: 14676 - DNA, 1152 bp, Zea mays
  CDS (1)..(1152)
atggcggaggaccggagccccaagcccatccactgcaaagcggcggtgtgccgagccgccggcgagccactcaccatcgaggagatcgtcgtcgacccgccgaaagcgtacgagatccgcatccgggtcatctgcacctcactctgccacaccgatatcaccttctggaaagctaaggtggcaccggtgtttccaagaatactagggcatgaggcgtacggggtagtggagagcgtgggggagcacgtggagggcttcgcggcgggggacaccgtggtgccgacgttcctggggcagtgcgagcgctgcgccagctgcgcgtcggagcacagcaacgtgtgcgacgcggtgccgttcgtcatcggccccgggatgcggcgcgacggcaccacccggttccgggacgcgcgggggagcccgctgcacgacctcctcgccgtctccagcttcagcgagtacaccgtcgtggacgtgaaccaggtggtcaaggtcgaccccgccgtgccgcccaagctcgcctgcctcctcagctgcggcgccggcaccggggtaggagcagcgtggaggtctgccaaggtggagccaggatccactgttgcaatctttggcctcggatctgtcggtttggcggtggtccaaggcgcgaaaatgtgtggcgcatccaagatcatcggcgttgatctcaaccctgacaaggaggaagtagggagatcgttcggcgtcacagacttcgtcaatccatcgcagctggacaagcgttccgtcgtagaggtgatcgttgagatgaccggcggcggcgtggactacagcttcgagtgcatcggcgtgccgtcggtgatgaccgacgccttcagatgcaccaagatggggaagggcaagacgatcgtgctggggctggggagggacagcgacgaggtgtgcctgccgtcgctggagctgctgttcgggaggtgcgtcatggggtcgctcttcggcgggctgaagcccaagacccacatccccgtcctcgccaagaaatgcatggacaaggagctgcagctggacgcgctggtcacgcatgagcttggactgcaggacatcaacaaggccttcgacctgctcctgcaggggaaaagtctgcgctgcatcctctggatggacaaggacaagtaa

SEQ ID NO: 14677 - protein, 383 aa, Zea mays
MAEDRSPKPIHCKAAVCRAAGEPLTIEEIVVDPPKAYEIRIRVICTSLCHTDITFWKAKVAPVFPRILGHEAYGVVESVGEHVEGFAAGDTVVPTFLGQCERCASCASEHSNVCDAVPFVIGPGMRRDGTTRFRDARGSPLHDLLAVSSFSEYTVVDVNQVVKVDPAVPPKLACLLSCGAGTGVGAAWRSAKVEPGSTVAIFGLGSVGLAVVQGAKMCGASKIIGVDLNPDKEEVGRSFGVTDFVNPSQLDKRSVVEVIVEMTGGGVDYSFECIGVPSVMTDAFRCTKMGKGKTIVLGLGRDSDEVCLPSLELLFGRCVMGSLFGGLKPKTHIPVLAKKCMDKELQLDALVTHELGLQDINKAFDLLLQGKSLRCILWMDKDK

SEQ ID NO: 14678 - DNA, 1197 bp, Zea mays
  CDS (1)..(1197)
atggcggccaacggcaagagcagcttggcgaacggcgcctccaccgggggaaagcccatcaaatgcaaagcggcggtggcgtgggggcccggcgagccgcttgtgatggaggaggtggaggtggcgccgccggggcgcctggaggtgcgcgtgaagctgctcttcacctccatctgccacaccgatctcagtttcttgaagggagagaacgagctgcaccgcaagttcccccgcatcctgggccatgaggcagccggagtggtggagagcgtgggggacggggtggaggatctggccgccggcgaccatgtgatccccatcttcaacggcgagtgcggggcgtgcgcctactgcgagtccgatcggacaaacctgtgcgggacctaccgcgtggacgcttccaagagcaccatggtctctgacggcggcaccaggttctccgtagcggaccgcgtgtccggccgcaccgtgccggtctaccacttcctcaacacctccacctttgccgagtacaccgtgctggacgcggcctgcgccgtcaaggtcaaccccgaggcaccactgcaaaagatgtgcctcctcagctgtggcatctccacaggagttggggctgtatggaacacagccaacgtttccgcgggctccaccgttgcgattttcggccttggcgctgtcgggctcgcggttgctgagggtgccaggctacgaggggcagctcggatcatcggtgttgacataaaccctgaaaagttcaccaaagggagagagatgggcgtcactgactttgtcgactccagggcctctgacaaaccggtgcacgaggtgatcagggagatgacccatggaggtgtcgactacagctttgagtgtaccgggatcaacggcgtgctgcgagaggccttcgtgtccacgcatgacggttggggcctgacggtggtgctggggatccatgcgacgcccaagatgctgccgctgcacccgatggagctcttcgacggccgtcggatcaccgcctgcgtcttcggtgacgtcaaggggaagtcccagctgccggccatcgtcgacaagtgcgtcaacggggacctggatataaaccttgacgggttcataacacacaggatgcccttctcggacatcaacaaagccatccagttgctggaggaaggcaagtcccttagatgcgtgctcaacctctga

SEQ ID NO: 14679 - protein, 398 aa, Zea mays
MAANGKSSLANGASTGGKPIKCKAAVAWGPGEPLVMEEVEVAPPGRLEVRVKLLFTSICHTDLSFLKGENELHRKFPRILGHEAAGVVESVGDGVEDLAAGDHVIPIFNGECGACAYCESDRTNLCGTYRVDASKSTMVSDGGTRFSVADRVSGRTVPVYHFLNTSTFAEYTVLDAACAVKVNPEAPLQKMCLLSCGISTGVGAVWNTANVSAGSTVAIFGLGAVGLAVAEGARLRGAARIIGVDINPEKFTKGREMGVTDFVDSRASDKPVHEVIREMTHGGVDYSFECTGINGVLREAFVSTHDGWGLTVVLGIHATPKMLPLHPMELFDGRRITACVFGDVKGKSQLPAIVDKCVNGDLDINLDGFITHRMPFSDINKAIQLLEEGKSLRCVLNL

SEQ ID NO: 14680 - DNA, 1164 bp, Glycine max
  CDS (1)..(1164)
atggaagataaactagcaacaacaagtgaaggacaacccataagatgtaaagctgcgatttgtcgcaagccaggttctccattgagtattgaggagatcattgtggcaccaccaatgcctcgtgaagctcggattcgtgttatatgcacttctctttgtcacagcgatgttactttttggaaaatggaggtccctcctgcaatttgtccaagaattttgggtcatgaggctgttggggttgtggaaagcgtaggagaggatgtaaccgaagtcacaaaaggagatgtggttgttccaattttcttacctgattgtggggagtgtatagattgcaaatcaagcaagagcaacctttgttcaaagtttccttttgaggtgtctccttggatgcctagacatgccacctctagattcacggatttaaaaggagatatcatacaccatttcttgtttgtgtctagttttagcgagtataccgtggttgacattgctcatctaaccaagattgatccagcaataccacccaacagggcatgcctacttagttgtggtgtatcaaccggggtaggtgctgcttggagaacagcaggtgtggagccagggtctacagtagtcatttttgggttgggaagtattggattagcagttgccgagggagctagactttgtggagcaactaggattataggtgtggatgtcaacccagaaaaatatgaaactggaaaaaagtttggactcactgactttgtccatgctggagaaagtgaaaacaaatctgtgagccaggttatcataaagatgactggtgggggagcagattattgctttgaatgtgttggaatggcaacattggtgcaggaagcatatgcttcttgtagaaagggttggggaaaagcaatagttttaggagtggagaagccgggatccatgttgagccttagctgtaatgaggtcctccatagtgggaagagcctcgtggggtgcttatttggaggactcaaacccaagtctgatgtacctattctccttaaacgctacatggacaaggaactgaatttggatgagtttgtcacacatgaggtggagttcaaggatatcaacaaagcttttgatttattgattgaaggacagtgccttcggtgtgtgatttggatggacagatga

SEQ ID NO: 14681 - protein, 387 aa, Glycine max
MEDKLATTSEGQPIRCKAAICRKPGSPLSIEEIIVAPPMPREARIRVICTSLCHSDVTFWKMEVPPAICPRILGHEAVGVVESVGEDVTEVTKGDVVVPIFLPDCGECIDCKSSKSNLCSKFPFEVSPWMPRHATSRFTDLKGDIIHHFLFVSSFSEYTVVDIAHLTKIDPAIPPNRACLLSCGVSTGVGAAWRTAGVEPGSTVVIFGLGSIGLAVAEGARLCGATRIIGVDVNPEKYETGKKFGLTDFVHAGESENKSVSQVIIKMTGGGADYCFECVGMATLVQEAYASCRKGWGKAIVLGVEKPGSMLSLSCNEVLHSGKSLVGCLFGGLKPKSDVPILLKRYMDKELNLDEFVTHEVEFKDINKAFDLLIEGQCLRCVIWMDR

SEQ ID NO: 14682 - DNA, 1140 bp, Zea mays
  CDS (1)..(1140)
atggcgacagcagggaaggtgatcaagtgcagagctgccgtggcgtgggaggccggcaagccgctgtccatcgaggaggtggaggtagcgccgccgcaggccatggaggtgcgtgtcaagatcctctacaccgcgctctgccacaccgacgtctacttctgggaggccaaggggcaaaccccggtgttcccgaggatcttaggacacgaagcgggaggcatcgtggagagcgtcggagagggcgtgaccgagctcgcgccaggcgaccacgtcctcccggtgttcaccggcgagtgcaaggagtgcgcccactgcaagtcggaggagagcaacatgtgcgacctcctcaggatcaacgtcgaccgcggcgtgatgatcggcgacggcaagtcccgcttcaccatcagcgggcagcccatcttccacttcgtcgggacgtccaccttcagcgagtacaccgtcatccacgtcggctgcctggccaagatcaaccccgaggcgcctctcgacaaagtctgcatcctcagctgtggtatctcgaccggccttggcgcgacactgaatgtggcgaaaccagccaagggctcgacggtggcgattttcgggcttggggctgtaggccttgctgctatggaaggtgctagactggctggtgcatcaaggatcatcggcgtggacatcaacccagcaaaatacgagcaagctaagaaatttggctgcactgaattcgttaaccccaaggaccacgacaagccagtgcaagaggtgctgattgagctgaccaacggcggcgtcgaccgcagcgtggagtgcaccggtaacatcaacgccatgatatccgccttcgaatgtgtccacgacggctggggtgtcgccgtgctggtgggtgtcccgcacaaggacgaccagttcaagacccaccccatgaacttcctcagcgagaagacactcaagggcaccttcttcggaaactacaagccccgcaccgacctgcccaacgtcgtcgagatgtacatgaagaaggagctggagctggagaagttcatcacgcacagcgtgcccttctcggagatcaacacggcgttcgacctgatgctcaagggggagagcctgcgctgcatcatgaggatggaggattag

SEQ ID NO: 14683 - protein, 379 aa, Zea mays
MATAGKVIKCRAAVAWEAGKPLSIEEVEVAPPQAMEVRVKILYTALCHTDVYFWEAKGQTPVFPRILGHEAGGIVESVGEGVTELAPGDHVLPVFTGECKECAHCKSEESNMCDLLRINVDRGVMIGDGKSRFTISGQPIFHFVGTSTFSEYTVIHVGCLAKINPEAPLDKVCILSCGISTGLGATLNVAKPAKGSTVAIFGLGAVGLAAMEGARLAGASRIIGVDINPAKYEQAKKFGCTEFVNPKDHDKPVQEVLIELTNGGVDRSVECTGNINAMISAFECVHDGWGVAVLVGVPHKDDQFKTHPMNFLSEKTLKGTFFGNYKPRTDLPNVVEMYMKKELELEKFITHSVPFSEINTAFDLMLKGESLRCIMRMED

SEQ ID NO: 14684 - DNA, 1155 bp, Zea mays
  CDS (1)..(1155)
atggccgccgccgatgcatcttcgttgcctacgtccgccatcacctgccgagcggcggcggcgtggggaccgggccagccactggtgatggaagaggtggaggtcgccccgccggggcccatggagatccgtgtcaaggtcgtctccacctccgtctgccgcagcgacgtcactgcctggcaatccaaggcgcaacttgatctgttccccagagtcttcggccacgaggcatccggagtagtagagagtgtcggtgaaggtgtgaccgagttccaagtcggtgaccacgttctcactgtcttcattggggaatgcaagagctgcaagcactgcgtctcagggaagagcaacatgtgccagaagctcggtctggagaggaagggtgtcatgcacagcgatcagaagacacgcttctctgtcaaggggaaacctgtgtaccattactgtgcagtgtcaagcttcagcgagtacacggttgtccattccggatgtgcggtgaaggttggcttgaccgtgccaatggacagggtgtgcctgctgagctgcggtgtgtctgcaggactcggtgcagtctggaatgtagctaatgtatcaaagggctcaagtgtagctatatttggtcttgggaccgtaggactttctgtcgctcaaggtgctaagcttcgaggggcgtccaagattataggagttgatactaatcctgagaagcaagaaaaggggaaatcatttggtgtcacggactttattaacccagatgaattgagtgaacctgttcaacaggtaatcaaaaggattactgatggaggggtggattactcatttgaatgtgtgggtgattctggagtagtctccactgcacttcaatcatgttctgatggttggggagtaactgtaactcttggcttaccaaaaggaaaactagaagtgtctactcattatgcatttcttctatccggaagaacactgaagggatctatgtttggaggatggaaacctaaatctgatctaccttcattggtggataaatatgcagcaaaggaaatccaagttgatggcctagtcacgcatgatataccattcaatgaaatcaacaaagcgcttgagttgatgctagaaaacaagtgcttgagatgtgtgattcacatgccacggtaa

SEQ ID NO: 14685 - protein, 384 aa, Zea mays
MAAADASSLPTSAITCRAAAAWGPGQPLVMEEVEVAPPGPMEIRVKVVSTSVCRSDVTAWQSKAQLDLFPRVFGHEASGVVESVGEGVTEFQVGDHVLTVFIGECKSCKHCVSGKSNMCQKLGLERKGVMHSDQKTRFSVKGKPVYHYCAVSSFSEYTVVHSGCAVKVGLTVPMDRVCLLSCGVSAGLGAVWNVANVSKGSSVAIFGLGTVGLSVAQGAKLRGASKIIGVDTNPEKQEKGKSFGVTDFINPDELSEPVQQVIKRITDGGVDYSFECVGDSGVVSTALQSCSDGWGVTVTLGLPKGKLEVSTHYAFLLSGRTLKGSMFGGWKPKSDLPSLVDKYAAKEIQVDGLVTHDIPFNEINKALELMLENKCLRCVIHMPR

SEQ ID NO: 14686 - DNA, 1146 bp, Zea mays
  CDS (1)..(1146)
atggcttcccccacccagggccaggtcatcacctgcaaagcggcggtggcgtacgagccgaacaagccactcgtgatcgaggacgtgcaggtggcgccgccgcaggccggcgaggtccgcgtcaagatcctattcaccgcgctctgccacaccgaccactacacctggagcggcaaggatcctgagggtcttttcccttgcattcttggccacgaagctgccggaattgtggaaagtgtcggtgaaggagtaactgatgtgcagcctggggatcatgtcattccttgctaccaagcagaatgcaaagaatgcaagttttgcaagagcggaaagaccaacctctgtggtaaggtccggagtgccacaggcgtaggtgtcatgatgaatgatatgaagagcaggttctctgtaaatggaaagcccatttaccatttcatggggacatcaacattcagccagtacactgtggtgcatgatgtcagtgttgcaaagatcaacccacaggcacccttagataaagtctgcctgctcggttgtggtgttcctactggtcttggagcggtgtggaatactgcaaaggttgaatctggctcagttgttgctgtttttggccttggaacagttggacttgcagttgctgagggagcaaaagctgctggtgcttctcgagttattggcattgacatcgacaataaaaagtttgatgttgcaaagaactttggagttacagaatttgttaacccaaaagagcatgacaaaccgatacagcaggtcctggtcgatcttacagatggcggcgtggattacagctttgagtgcattggaaatgtttcgattatgagggctgcactggaatgctgccacaagggctggggaacctccgtcatcgtcggcgtcgccgcctctggccaggagatcgccacacgaccattccagctcgtgactggtcgtgtctggaagggaaccgctttcggtggcttcaagagccggacccaggtcccatggcttgttgacaagtacatgaagaaggaaattaaggtggacgagtacattacgcacaacatgaacctggctgacatcaatgacgccttccacctgctccacgaaggtggctgtctgcgttgtgtgctggcgatgcagatctga

SEQ ID NO: 14687 - protein, 381 aa, Zea mays
MASPTQGQVITCKAAVAYEPNKPLVIEDVQVAPPQAGEVRVKILFTALCHTDHYTWSGKDPEGLFPCILGHEAAGIVESVGEGVTDVQPGDHVIPCYQAECKECKFCKSGKTNLCGKVRSATGVGVMMNDMKSRFSVNGKPIYHFMGTSTFSQYTVVHDVSVAKINPQAPLDKVCLLGCGVPTGLGAVWNTAKVESGSVVAVFGLGTVGLAVAEGAKAAGASRVIGIDIDNKKFDVAKNFGVTEFVNPKEHDKPIQQVLVDLTDGGVDYSFECIGNVSIMRAALECCHKGWGTSVIVGVAASGQEIATRPFQLVTGRVWKGTAFGGFKSRTQVPWLVDKYMKKEIKVDEYITHNMNLADINDAFHLLHEGGCLRCVLAMQI

SEQ ID NO: 14688 - DNA, 1140 bp, Zea mays
  CDS (1)..(1140)
atggcgacagcagggaaggtgatcaagtgcagagccgccgtggcgtgggaggccggcaaaccgctgtccatcgaggaggtggaggtagcgccgccgcaggccatggaggtgcgtatcaagatcctctacaccgcgctctgccacaccgacgtctacttctgggaggccaaggggcaaaccccggtgttcccgaggatcttaggacacgaagcgggaggcatcgtggagagcgtcggagagggcgtgaccgagctcgcgccaggcgaccacgtcctcccggtgttcaccggcgagtgcaaggagtgcgcccactgcaagtcggaggagagcaacatgtgcgacctcctcaggatcaacgtcgaccgcggcgtgatgatcggcgacggtaagtcccgcttcaccatcagcgggcagcccatcttccacttcgtcgggacgtccaccttcagcgagtacaccgtcatccacgtcggctgcctggccaagatcaaccccgaggcgcctctcgacaaagtctgcatcctcagctgtggtatctcgaccggccttggcgcgacactgaatgtggcgaaaccagccaagggctcgacggtggcgattttcgggcttggggctgtaggccttgctgctatggaaggtgctagactggctggtgcatcaaggatcatcggcgtggacatcaacccagcaaaatacgagcaagctaagaaatttggctgcactgaattcgttaaccccaaggaccacgacaagccagtgcaagaggtgctgattgagctgaccaacggcggcgtcgaccgcagcgtggagtgcaccggtaacatcaacgccatgatatccgccttcgaatgtgtccacgacggctggggtgtcgccgtgctggtgggtgtcccgcacaaggacgaccagttcaagacccaccccatgaacttcctcagtgagaagacactcaagggcaccttcttcggaaactacaagccccgcaccgacctgcccaacgtcgtcgagatgtacatgaagaaggagctggagctggagaagttcatcacgcacagcgtgcccttctcggagatcaacacggcgttcgacctgatgctcaagggggagagcctgcgctgcatcatgaggatggaggattag

SEQ ID NO: 14689 - protein, 379 aa, Zea mays
MATAGKVIKCRAAVAWEAGKPLSIEEVEVAPPQAMEVRIKILYTALCHTDVYFWEAKGQTPVFPRILGHEAGGIVESVGEGVTELAPGDHVLPVFTGECKECAHCKSEESNMCDLLRINVDRGVMIGDGKSRFTISGQPIFHFVGTSTFSEYTVIHVGCLAKINPEAPLDKVCILSCGISTGLGATLNVAKPAKGSTVAIFGLGAVGLAAMEGARLAGASRIIGVDINPAKYEQAKKFGCTEFVNPKDHDKPVQEVLIELTNGGVDRSVECTGNINAMISAFECVHDGWGVAVLVGVPHKDDQFKTHPMNFLSEKTLKGTFFGNYKPRTDLPNVVEMYMKKELELEKFITHSVPFSEINTAFDLMLKGESLRCIMRMED

SEQ ID NO: 14690 - DNA, 1146 bp, Zea mays
  CDS (1)..(1146)
atggcttcccccacccagggccaggtcatcacctgcaaagcggcggtggcgtacgagccgaacaagccactcgtgatcgaggacgtgcaggtggcgccgccgcaggccggcgaggtccgcgtcaagatcctattcaccgcgctctgccacaccgaccactacacctggagcggcaaggatcctgagggtcttttcccttgcattcttggccacgaagctgccggaattgtggaaagtgtcggtgaaggagtaactgatgtgcagcctggggatcatgtcattccttgctaccaagcagaatgcaaagaatgcaagttttgcaagagcggaaagaccaacctctgtggtaaggtccggagtgccacaggcgtaggtgtcatgatgaatgatatgaagagcaggttctctgtaaatggaaagcccatttaccatttcatggggacatcaacattcagccagtacactgtggtgcatgatgtcagtgttgcaaagatcaacccacaggcacccttagataaagtctgcctgctcggttgtggtgttcctactggtcttggagcggtgtggaatactgcaaaggttgaatctggctcagttgttgctgtttttggccttggaacagttggacttgcagttgctgagggagcaaaagctgctggtgcttctcgagttattggcattgacatcgacaataaaaagtttgatgttgcaaagaactttggagttacagaatttgttaacccaaaagagcatgacaaaccgatacagcaggtcctggtcgatcttacagatggcggcgtggattacagctttgagtgcattggaaatgtttcggttatgagggctgcactggaatgctgccacaagggctggggaacctccgtcatcgtcggcgtcgccgcctctggccaggagatcgccacacgaccattccagctcgtgactgggcgtgtctggaagggaaccgctttcggtggcttcaagagccggacccaggtcccatggcttgttgacaagtacatgaaaaaggaaattaaggtggacgagtacattacgcacaacatgaacctggctgacatcaacgacgccttccacctgctgcacgaaggtggctgtctgcgttgtgtgctggcaatgcagatttga

SEQ ID NO: 14691 - protein, 381 aa, Zea mays
MASPTQGQVITCKAAVAYEPNKPLVIEDVQVAPPQAGEVRVKILFTALCHTDHYTWSGKDPEGLFPCILGHEAAGIVESVGEGVTDVQPGDHVIPCYQAECKECKFCKSGKTNLCGKVRSATGVGVMMNDMKSRFSVNGKPIYHFMGTSTFSQYTVVHDVSVAKINPQAPLDKVCLLGCGVPTGLGAVWNTAKVESGSVVAVFGLGTVGLAVAEGAKAAGASRVIGIDIDNKKFDVAKNFGVTEFVNPKEHDKPIQQVLVDLTDGGVDYSFECIGNVSVMRAALECCHKGWGTSVIVGVAASGQEIATRPFQLVTGRVWKGTAFGGFKSRTQVPWLVDKYMKKEIKVDEYITHNMNLADINDAFHLLHEGGCLRCVLAMQI

SEQ ID NO: 14692 - DNA, 1212 bp, Zea mays
  CDS (1)..(1212)
atggcagcggcccactacggcaacggcagctcgacgagcggcggcggcggcggccgtggccgcgggaagcccatcacatgcaaagcggcggtggcgtggggtcccggagtgccgctgtcgctggaggaggtcgaggtggcgccgcctagccccatggaggtccgcgtcaaggtgcttttcacctccatctgccacaccgacctcagcgcctggaagggagagtgcgaggcgcagcgcaaataccctcgcatcttgggccatgaggcagccggagtggtagagagcgtgggcgaaggagtagaaggcctcgccccaggagaccacgtcgttccgatcttcaccggggagtgcgagaaatgcgtgtactgcaagtccgacaagacaaacctgtgtggaacctaccgtgtggatcctttgaagagcagcatggtctacgacgacggcacgaggttctccgtggtggaccaggcgtcaggccagcggcggccggtgtaccacttcctcaacacctccaccttcaccgagtacaccgtgcttgacgcggcatgtgccgtcaaaatcaaccctgaggccccgctgcagaggatgtgcctcctcagctgcggcatctccacaggagtgggagctgcgtggaacactgcaaacgtttctgctcggtccaccgttgcagtgtttggactcggcgctgttggtcttgctgtagctgaaggtgccaggctacgaggggcaactcggatcatcggcgtggacgtaaacccttcaaagttcaccaaaggtaaagagatggggataacagacttcatcgaccctaacgacatttgtgacaaaccggtccatgaggtgatcagggagatgactgacggaggtgtcgactacagcttcgagtgtaccgggataaatgatgtgctgagagaggccttcttgtccacgcatgatggttggggcctgacggtggtgctagggatccattcaacgcccaagatggtgccgctgcacccgatggagctctacggccgtaggatcaccggctgcgtctttggcgacttcaagggcaagtcccagctgcccgacctcgtcgataaatgcgtcaacggggaggtcaatataaacttcgatggcttcataacacacaagatgccattctcggacatcaacaaggctttccggttactcgaggaagacaagtcgctgaggggcctgctcagtttttga

SEQ ID NO: 14693 - protein, 403 aa, Zea mays
MAAAHYGNGSSTSGGGGGRGRGKPITCKAAVAWGPGVPLSLEEVEVAPPSPMEVRVKVLFTSICHTDLSAWKGECEAQRKYPRILGHEAAGVVESVGEGVEGLAPGDHVVPIFTGECEKCVYCKSDKTNLCGTYRVDPLKSSMVYDDGTRFSVVDQASGQRRPVYHFLNTSTFTEYTVLDAACAVKINPEAPLQRMCLLSCGISTGVGAAWNTANVSARSTVAVFGLGAVGLAVAEGARLRGATRIIGVDVNPSKFTKGKEMGITDFIDPNDICDKPVHEVIREMTDGGVDYSFECTGINDVLREAFLSTHDGWGLTVVLGIHSTPKMVPLHPMELYGRRITGCVFGDFKGKSQLPDLVDKCVNGEVNINFDGFITHKMPFSDINKAFRLLEEDKSLRGLLSF

SEQ ID NO: 14694 - DNA, 1149 bp, Zea mays
  CDS (1)..(1149)
atggagaaccagggacccaaacccatccgatgcaaagcggccgtgtgcagggccgccggcgagccgctggccatcgaggaggtcgtcgttgacacgcccaaggcgcacgaggtcaggatacggatcatctgcacgtcgctctgccacagcgacgtcacgttctggcgcatgaaggatctccctgacaatatccccagaatatttggccacgaagccttcggggtggtggagagcgtgggtgaacaggtggacgagttcgcggcgggcgacgcggtggtgccgacgttcctggggcagtgcagcgagtgcgtggactgcaggtcggcgcgaagcaacatgtgctccaagtaccggttcgcggtgcgcccggggatgccgcgcgacggcaccacccggttcaccgacggccaggggcgcccgctgcaccacttcttcggcgtgtccagcttcgccgagtacaccgtggtggacgtgaaccaggtcgtcaagctcaaccccgccgtgccgccggcactcgcctgcctgctcagctgcggcgcctccacgggggtcggagccgcatggaagcaggcgaaagttgagcctggatcttcggtcgctatcttcggcctcggcgctgtaggattggcggtggctgaaggagccaggatttgtggggcgtcgaagataatcggcgtggatataaaccctgagaaatgcgagcttggaaagaagttcggcgtgacacatttcatcaatcccaaagagctcggtgaggagaaacctgtccaccaggcgatcgccgagatgaccgacggtggcgcggactactgcttcgagtgcattggactggcggcgctgatgaacgacgcgttccggagctcccgagacgggtggggcaagacgatcattcttggggtggaaatgcacggtgcccccctctgcatctctcctcacgagatcctccacgggaagtctgtcatcgggtccatgttcggcggggtgaagcctaagcaggatatccccattctcgccgacaagtacatgaacaaggagctggagcttgacaagttcataacccatgaagttggcctcaaggacatcaaccaagcttttgacctcctgctgcaagggaagagtctcaggtgcaccatatggatggacaagtga

SEQ ID NO: 14695 - protein, 382 aa, Zea mays
MENQGPKPIRCKAAVCRAAGEPLAIEEVVVDTPKAHEVRIRIICTSLCHSDVTFWRMKDLPDNIPRIFGHEAFGVVESVGEQVDEFAAGDAVVPTFLGQCSECVDCRSARSNMCSKYRFAVRPGMPRDGTTRFTDGQGRPLHHFFGVSSFAEYTVVDVNQVVKLNPAVPPALACLLSCGASTGVGAAWKQAKVEPGSSVAIFGLGAVGLAVAEGARICGASKIIGVDINPEKCELGKKFGVTHFINPKELGEEKPVHQAIAEMTDGGADYCFECIGLAALMNDAFRSSRDGWGKTIILGVEMHGAPLCISPHEILHGKSVIGSMFGGVKPKQDIPILADKYMNKELELDKFITHEVGLKDINQAFDLLLQGKSLRCTIWMDK

SEQ ID NO: 14696 - DNA, 23 bp, Artificial sequence
  primer
atgtccgccgctactgttggtaa

SEQ ID NO: 14697 - DNA, 27 bp, Artificial sequence
  primer
ctattttatttcatcagacttcaagac

SEQ ID NO: 14698 - protein, 398 aa, Artificial sequence
  consensus sequence
  Variant (2)..(4): Xaa in position 2 to 4 is any amino acid
  Variant (9)..(13): Xaa in position 9 to 13 is any amino acid
  Variant (16)..(21): Xaa in position 16 to 21 is any amino acid
  Variant (23)..(23): Xaa in position 23 is any amino acid
  Variant (26)..(28): Xaa in position 26 to 28 is any amino acid
  Variant (31)..(36): Xaa in position 31 to 36 is any amino acid
  Variant (38)..(39): Xaa in position 38 to 39 is any amino acid
  Variant (44)..(53): Xaa in position 44 to 53 is any amino acid
  Variant (54)..(56): Xaa in position 54 to 56 is any or no amino acid
  Variant (59)..(61): Xaa in position 59 to 61 is any amino acid
  Variant (65)..(66): Xaa in position 65 to 66 is any amino acid
  Variant (68)..(68): Xaa in position 68 is any amino acid
  Variant (71)..(71): Xaa in position 71 is any amino acid
  Variant (78)..(81): Xaa in position 78 to 81 is any amino acid
  Variant (86)..(86): Xaa in position 86 is any amino acid
  Variant (88)..(91): Xaa in position 88 to 91 is any amino acid
  Variant (94)..(95): Xaa in position 94 to 95 is any amino acid
  Variant (97)..(98): Xaa in position 97 to 98 is any amino acid
  Variant (100)..(100): Xaa in position 100 is any amino acid
  Variant (102)..(104): Xaa in position 102 to 104 is any amino acid
  Variant (106)..(106): Xaa in position 106 is any amino acid
  Variant (107)..(107): Xaa in position 107 is any or no amino acid
  Variant (109)..(111): Xaa in position 109 to 111 is any amino acid
  Variant (113)..(116): Xaa in position 113 to 116 is any amino acid
  Variant (117)..(117): Xaa in position 117 is any or no amino acid
  Variant (119)..(119): Xaa in position 119 is any amino acid
  Variant (121)..(121): Xaa in position 121 is any amino acid
  Variant (122)..(122): Xaa in position 122 is any or no amino acid
  Variant (125)..(126): Xaa in position 125 to 126 is any amino acid
  Variant (129)..(136): Xaa in position 129 to 136 is any amino acid
  Variant (137)..(145): Xaa in position 137 to 145 is any or no amino acid
  Variant (147)..(148): Xaa in position 147 to 148 is any amino acid
  Variant (150)..(150): Xaa in position 150 is any amino acid
  Variant (155)..(155): Xaa in position 155 is any amino acid
  Variant (159)..(165): Xaa in position 159 to 165 is any amino acid
  Variant (167)..(170): Xaa in position 167 to 170 is any amino acid
  Variant (171)..(177): Xaa in position 171 to 177 is any or no amino acid
  Variant (180)..(183): Xaa in position 180 to 183 is any amino acid
  Variant (185)..(185): Xaa in position 185 is any amino acid
  Variant (187)..(187): Xaa in position 187 is any amino acid
  Variant (190)..(191): Xaa in position 190 to 191 is any amino acid
  Variant (194)..(194): Xaa in position 194 is any amino acid
  Variant (197)..(198): Xaa in position 197 to 198 is any amino acid
  Variant (200)..(200): Xaa in position 200 is any amino acid
  Variant (203)..(205): Xaa in position 203 to 205 is any amino acid
  Variant (207)..(208): Xaa in position 207 to 208 is any amino acid
  Variant (209)..(210): Xaa in position 209 to 210 is any or no amino acid
  Variant (213)..(213): Xaa in position 213 is any amino acid
  Variant (218)..(219): Xaa in position 218 to 219 is any amino acid
  Variant (222)..(225): Xaa in position 222 to 225 is any amino acid
  Variant (228)..(231): Xaa in position 228 to 231 is any amino acid
  Variant (233)..(233): Xaa in position 233 is any amino acid
  Variant (237)..(238): Xaa in position 237 to 238 is any amino acid
  Variant (240)..(240): Xaa in position 240 is any amino acid
  Variant (242)..(247): Xaa in position 242 to 247 is any amino acid
  Variant (249)..(251): Xaa in position 249 to 251 is any amino acid
  Variant (253)..(253): Xaa in position 253 is any amino acid
  Variant (255)..(257): Xaa in position 255 to 257 is any amino acid
  Variant (260)..(263): Xaa in position 260 to 263 is any amino acid
  Variant (264)..(267): Xaa in position 264 to 267 is any or no amino acid
  Variant (269)..(271): Xaa in position 269 to 271 is any amino acid
  Variant (273)..(276): Xaa in position 273 to 276 is any amino acid
  Variant (278)..(278): Xaa in position 278 is any amino acid
  Variant (279)..(284): Xaa in position 279 to 284 is any or no amino acid
  Variant (287)..(287): Xaa in position 287 is any amino acid
  Variant (289)..(291): Xaa in position 289 to 291 is any amino acid
  Variant (294)..(294): Xaa in position 294 is any amino acid
  Variant (296)..(299): Xaa in position 296 to 299 is any amino acid
  Variant (301)..(302): Xaa in position 301 to 302 is any amino acid
  Variant (304)..(304): Xaa in position 304 is any amino acid
  Variant (306)..(307): Xaa in position 306 to 307 is any amino acid
  Variant (309)..(309): Xaa in position 309 is any amino acid
  Variant (313)..(314): Xaa in position 313 to 314 is any amino acid
  Variant (315)..(317): Xaa in position 315 to 317 is any or no amino acid
  Variant (320)..(326): Xaa in position 320 to 326 is any amino acid
  Variant (327)..(327): Xaa in position 327 is any or no amino acid
  Variant (329)..(329): Xaa in position 329 is any amino acid
  Variant (331)..(335): Xaa in position 331 to 335 is any amino acid
  Variant (336)..(337): Xaa in position 336 to 337 is any or no amino acid
  Variant (339)..(341): Xaa in position 339 to 341 is any amino acid
  Variant (343)..(344): Xaa in position 343 to 344 is any amino acid
  Variant (347)..(348): Xaa in position 347 to 348 is any amino acid
  Variant (350)..(354): Xaa in position 350 to 354 is any amino acid
  Variant (356)..(357): Xaa in position 356 to 357 is any amino acid
  Variant (359)..(370): Xaa in position 359 to 370 is any amino acid
  Variant (371)..(372): Xaa in position 371 to 372 is any or no amino acid
  Variant (377)..(382): Xaa in position 377 to 382 is any amino acid
  Variant (385)..(385): Xaa in position 385 is any amino acid
  Variant (388)..(389): Xaa in position 388 to 389 is any amino acid
  Variant (390)..(390): Xaa in position 390 is any or no amino acid
  Variant (392)..(393): Xaa in position 392 to 393 is any amino acid
  Variant (395)..(395): Xaa in position 395 is any amino acid
  Variant (396)..(397): Xaa in position 396 to 397 is any or no amino acid
IXXXAAVAXXXXXPLXXXXXXVXPPXXXEVXXXXXXTXXCHTDXXXXXXXXXXXXXFPXXXGHEXXGXVEXVGEGVTXXXXGDHVXPXXXXECXXCXXCXSXXXNXXCXXXRXXXXXGXMXXDGXXRFXXXXXXXXXXXXXXXXXHXXGXSTFSXYTVXXXXXXXKXXXXXXXXXXXAPXXXXCXLXCGXXTGXGAXXNXAKXXXGXXXXVAXFGLGXXGLXXXXGAXXXXAXRIIXXDXNXXXXXXAXXXGXTXXXNPXXXXXXXXPXXXVXXXXTXXXXXXXGGXDXXXECXGXXXXMXXAXEXXHXGWGXXXXXGVXXXXXXXXTXPXXXXXXXRXXXGXXFGXXKXXXXXPXXVXXXXXXXXXXXXXXFITHXXXXXXINXAFXXXMXXGXXXR

SEQ ID NO: 14699 - protein, 49 aa, Artificial sequence
  protein pattern
  Variant (3)..(3): Xaa in position 3 is any amino acid
  Variant (4)..(4): Xaa in position 4 is Ile or Val
  Variant (5)..(5): Xaa in position 5 is any amino acid
  Variant (8)..(8): Xaa in position 8 is Glu or Lys
  Variant (9)..(9): Xaa in position 9 is Ala or Gly
  Variant (10)..(10): Xaa in position 10 is Ala, Gly or Ser
  Variant (11)..(11): Xaa in position 11 is Ala or Gly
  Variant (12)..(12): Xaa in position 12 is any amino acid
  Variant (13)..(13): Xaa in position 13 is Ile or Val
  Variant (14)..(15): Xaa in position 14 to 15 is any amino acid
  Variant (16)..(16): Xaa in position 16 is Ile, Leu or Val
  Variant (18)..(18): Xaa in position 18 is any amino acid
  Variant (19)..(19): Xaa in position 19 is Asp, Glu or Gly
  Variant (21)..(25): Xaa in position 21 to 25 is any amino acid
  Variant (30)..(30): Xaa in position 30 is Ile, Leu or Val
  Variant (31)..(32): Xaa in position 31 to 32 is any amino acid
  Variant (33)..(33): Xaa in position 33 is Phe or Tyr
  Variant (34)..(36): Xaa in position 34 to 36 is any amino acid
  Variant (38)..(39): Xaa in position 38 to 39 is any amino acid
  Variant (41)..(42): Xaa in position 41 to 42 is any amino acid
  Variant (44)..(46): Xaa in position 44 to 46 is any amino acid
  Variant (47)..(47): Xaa in position 47 is Glu, Lys or Arg
  Variant (48)..(48): Xaa in position 48 is Ser or Thr
FPXXXGHXXXXXXXXXGXXVXXXXXGDHVXXXXXXXCXXCXXCXXXXXN

SEQ ID NO: 14700 - protein, 20 aa, Artificial sequence
  protein pattern
  Variant (2)..(2): Xaa in position 2 is any amino acid
  Variant (3)..(3): Xaa in position 3 is any or no amino acid
  Variant (5)..(5): Xaa in position 5 is Cys or Thr
  Variant (10)..(10): Xaa in position 10 is Glu or Gln
  Variant (11)..(11): Xaa in position 11 is Phe or Tyr
  Variant (12)..(12): Xaa in position 12 is Ser or Thr
  Variant (14)..(18): Xaa in position 14 to 18 is any amino acid
  Variant (19)..(19): Xaa in position 19 is Ile, Leu or Val
  Variant (20)..(20): Xaa in position 20 is Ala, Cys, Thr or Val
HXXGXSTFSXXXVXXXXXXX

SEQ ID NO: 14701 - protein, 39 aa, Artificial sequence
  protein pattern
  Variant (2)..(3): Xaa in position 2 to 3 is any amino acid
  Variant (5)..(6): Xaa in position 5 to 6 is any amino acid
  Variant (8)..(10): Xaa in position 8 to 10 is any or no amino acid
  Variant (12)..(12): Xaa in position 12 is any amino acid
  Variant (13)..(13): Xaa in position 13 is Ile, Met or Val
  Variant (14)..(15): Xaa in position 14 to 15 is any amino acid
  Variant (16)..(16): Xaa in position 16 is Ile, Leu or Val
  Variant (17)..(20): Xaa in position 17 to 20 is any amino acid
  Variant (22)..(24): Xaa in position 22 to 24 is any amino acid
  Variant (26)..(26): Xaa in position 26 is Ala, Ile or Val
  Variant (27)..(32): Xaa in position 27 to 32 is any amino acid
  Variant (33)..(33): Xaa in position 33 is Ala, Asn, Ser or Thr
  Variant (34)..(34): Xaa in position 34 is Ala, Gly or Ser
  Variant (35)..(35): Xaa in position 35 is Ile, Leu, Met or Val
  Variant (37)..(37): Xaa in position 37 is His or Arg
  Variant (38)..(38): Xaa in position 38 is Ser or Thr
AXXAXXPXXXLXXXXXXXXXPXXXEXXXXXXXXXXCXXD

SEQ ID NO: 14702 - protein, 30 aa, Artificial sequence
  protein pattern
  Variant (2)..(2): Xaa in position 2 is Asp, Glu, Gly or Asn
  Variant (3)..(3): Xaa in position 3 is any amino acid
  Variant (5)..(5): Xaa in position 5 is any amino acid
  Variant (6)..(6): Xaa in position 6 is Asp or Glu
  Variant (7)..(7): Xaa in position 7 is any amino acid
  Variant (8)..(8): Xaa in position 8 is Ala, Ser or Thr
  Variant (9)..(9): Xaa in position 9 is Phe, Ile, Leu or Val
  Variant (10)..(10): Xaa in position 10 is Asp or Glu
  Variant (11)..(11): Xaa in position 11 is Ala or Cys
  Variant (12)..(12): Xaa in position 12 is any amino acid
  Variant (14)..(20): Xaa in position 14 to 20 is any amino acid
  Variant (21)..(21): Xaa in position 21 is Ala, Cys or Thr
  Variant (22)..(22): Xaa in position 22 is Phe, Ile or Leu
  Variant (24)..(24): Xaa in position 24 is any amino acid
  Variant (25)..(25): Xaa in position 25 is Ala, Cys, Ser, Thr or Val
  Variant (27)..(27): Xaa in position 27 is any amino acid
TXXGXXXXXXXXGXXXXXXXXXEXXHXGWG

SEQ ID NO: 14703 - protein, 29 aa, Artificial sequence
  protein pattern
  Variant (2)..(4): Xaa in position 2 to 4 is any amino acid
  Variant (6)..(6): Xaa in position 6 is Cys, Ser or Thr
  Variant (7)..(7): Xaa in position 7 is any amino acid
  Variant (10)..(10): Xaa in position 10 is Gly or Asn
  Variant (11)..(11): Xaa in position 11 is any amino acid
  Variant (12)..(12): Xaa in position 12 is Lys or Arg
  Variant (13)..(13): Xaa in position 13 is Gly, Pro, Ser or Thr
  Variant (14)..(14): Xaa in position 14 is any amino acid
  Variant (15)..(15): Xaa in position 15 is Asp, Glu, Asn, Ser or Thr
  Variant (16)..(17): Xaa in position 16 to 17 is any amino acid
  Variant (18)..(18): Xaa in position 18 is Ala, Gly, Asn or Pro
  Variant (19)..(20): Xaa in position 19 to 20 is any amino acid
  Variant (21)..(21): Xaa in position 21 is Ala, Ile or Val
  Variant (22)..(28): Xaa in position 22 to 28 is any amino acid
  Variant (29)..(29): Xaa in position 29 is Phe, Ile, Leu, Met or Val
RXXXGXXFGXXXXXXXXXXXXXXXXXXXX

SEQ ID NO: 14704 - protein, 19 aa, Artificial sequence
  protein pattern
  Variant (3)..(5): Xaa in position 3 to 5 is any amino acid
  Variant (6)..(6): Xaa in position 6 is Phe or Leu
  Variant (7)..(8): Xaa in position 7 to 8 is any amino acid
  Variant (11)..(11): Xaa in position 11 is any amino acid
  Variant (14)..(15): Xaa in position 14 to 15 is any amino acid
  Variant (16)..(16): Xaa in position 16 is Leu or Met
  Variant (17)..(18): Xaa in position 17 to 18 is any amino acid
THXXXXXXINXAFXXXXXG

SEQ ID NO: 14705 - protein, 20 aa, Artificial sequence
  protein pattern
  Variant (2)..(2): Xaa in position 2 is Ile, Leu or Val
  Variant (4)..(4): Xaa in position 4 is Gly or Ser
  Variant (7)..(8): Xaa in position 7 to 8 is any amino acid
  Variant (11)..(11): Xaa in position 11 is any amino acid
  Variant (14)..(14): Xaa in position 14 is Ala, Ser, Thr or Val
  Variant (15)..(16): Xaa in position 15 to 16 is any amino acid
  Variant (17)..(17): Xaa in position 17 is Ser, Thr or Val
  Variant (19)..(19): Xaa in position 19 is any amino acid
  Variant (20)..(20): Xaa in position 20 is Ile, Pro or Val
CXLXCGXXTGXGAXXXXAXX

SEQ ID NO: 14706 - DNA, 1671 bp, Saccharomyces cerevisiae
  CDS (1)..(1671)
atgtttgataagttaccttatgagatttttaaacaaattgcctggagaattccgcaggaagataaaatttcgttaacatatgtatgcaaaagatcctatgaatcaattatacctttcatctaccagaatttatttcttaatgaaacctatcacatcaatggtgactatgataactcatttggaacctgttattggtctgtcctaaactttcactacatagatgaagatgattccaatactaaaaacgacatgtcgaatagaagactagctaaagtgaaatttagttatttcgaaagaacattagcagagtcaccgaaaagattatgtcccttaattaatcgaatacgttgtacatggcatttaaatgaagatgtgatgacaaatgtacttaaattgctatccgagtatggatccaatttgaaatttgtcgatcaatttgttcgctcatcagttaacaaggggctagaacctttatcaaagcaattaaaaactctaacattaacgccaccaacgttaatgcccacccataacagtgtaagcggttcttatttgaataaaattgatcggttgctcttgaagtgcgatctatctcgattagaaaaactttccattcatataaacgcattgaagtacttcaaaaataccgggtctcctatgaagatcaaagcattggtattaaatttgcgacccgacacacttaaccttgcggagtacgacgcttccgatgacttcttaaaagagctagaatacatcgacatatttgatgcttccaccttaaggcagctagagattttgtcttggtacagtcgcgacgattttccctctggcgaagaaggtggttttgacaggttatatgtcaaatgggggctagaaggattttggaaatttccgaacattgagaaactatcattagcgtcattggtttacagcgaattttttctaatgaattgtttggctgtgtttcacaatttaaagatactgaaacttgattacatgggtaaatttgacttcgatgtgtcgttgattaacttcttatctaaacaagtgtgtggcaaaaaattacagcgttttgacatacactgccaactaaatcacaggcttttttttcccatgacagataacccactaactcgcttgaatttcgatggtttctgcccttgttcaacttgcaaaaatacaattcacgaggtcattctaaaaaaaatctttcctgaaacccggtcaaaacttttaaagaacccaaataagttccaagcccataatttcttttaccaaatgtttttcgagaacaagatcatgccctatacaaacattattgacaacgaatcacctgcgatgggatgggattctgtacctattgaaacgtttgtacgaaagttcaatgaaaatctgcaaagcaccatagaaaatactgagaatattacagtgaataaaattactagagaagatgccattagtttgtaccacttataccttcattatctaaaagacgtatttaaagtttttgagcaaagtttgccgaacttagaatatctaaccatcaacggtatacctacaaaaataatacaagtggacgagttacaacgatgcgcggttcccctcttctataataatggctataaaagcaactctgtttatgaattggtggacgcagaagctctatttagttga

SEQ ID NO: 14707 - protein, 556 aa, Saccharomyces cerevisiae
MFDKLPYEIFKQIAWRIPQEDKISLTYVCKRSYESIIPFIYQNLFLNETYHINGDYDNSFGTCYWSVLNFHYIDEDDSNTKNDMSNRRLAKVKFSYFERTLAESPKRLCPLINRIRCTWHLNEDVMTNVLKLLSEYGSNLKFVDQFVRSSVNKGLEPLSKQLKTLTLTPPTLMPTHNSVSGSYLNKIDRLLLKCDLSRLEKLSIHINALKYFKNTGSPMKIKALVLNLRPDTLNLAEYDASDDFLKELEYIDIFDASTLRQLEILSWYSRDDFPSGEEGGFDRLYVKWGLEGFWKFPNIEKLSLASLVYSEFFLMNCLAVFHNLKILKLDYMGKFDFDVSLINFLSKQVCGKKLQRFDIHCQLNHRLFFPMTDNPLTRLNFDGFCPCSTCKNTIHEVILKKIFPETRSKLLKNPNKFQAHNFFYQMFFENKIMPYTNIIDNESPAMGWDSVPIETFVRKFNENLQSTIENTENITVNKITREDAISLYHLYLHYLKDVFKVFEQSLPNLEYLTINGIPTKIIQVDELQRCAVPLFYNNGYKSNSVYELVDAEALFS

SEQ ID NO: 14708 - DNA, 1644 bp, Candida glabrata CBS 138
  CDS (1)..(1644)
atgccttttgagaaattaccccaggaagtggttcagaagatactatcgaatgtatcgcaagatgacaaagttgcattgacctatgtatccaggaatgcatactttcatggtataaggtcgctttacaggaacatatacttggctaacacgtcctatataccgagtgactacgacggctcgcttggcacacattattggtctacattatgctgcaactataggaacatatcaacagatttcgagtctctagacctggcagaactgggcaatctcttcaaaggaagtgaaagggcaatgtacaagtttaattgtcttataaggtcaatagaggagaggcctggtaaactatgccctctaattgaaagtgtgcattgcacctggcatttagatcctaaattactcgagagattcatttatctgctaacaagacatggtcataatcttaaaagttttgataacttcatcggtggagagataaacgaccaattaaccagtatttatggacaactacaaacccttacgatgactgcatcaagtagaacacctgctgatcctcctactattcaattcgttgatagcctcgacaaattttgcaaacagtacagctgggaaaatttgaatacactaaatatacatatggatctgcgcaactatttccataacctagacaaaccattaaaaattagaaatttgactttgaatttaagaaaagatatgcttttaggagaagattataaccgaggtaggctgccatatcacaaaatcttagataagaatgaacttagagaactagaagtactatcttggatcgaacccaaagatatgaatttcgacatgtatcaactgtggggattatacgaattcctggagtttcataacatcgaagagttatcactgctttctttaacagacaatcatttttttattactgaagcagtgagccattggcatcacttaagaagattaaagcttgactacatgttcgaactaaccatggaaaatgaattcctagacctccttgcatcttccccatgtgccaagactcttgaatacattgattttagaattaatcaattcgaaggggtacctatatcagttgcagttggattacaacccaaattcgaattgacattgatgtgcaaatgtgatttttgcaaaggagtatacgaagacataataataaagaagtacttccccactgttgcatctttaagaaaaccctcatacaaagaacttgagctaaacaaaatattttatcaaatgattaaagtataccccataataccgcatgcccattattgtgatgtatatccagctatgggattcagatattattctttacatgaccatgcaaatattcagaatagaatgagacaggatgatgaaaatatgaaacgtttgcctttactgtcgggtgatgatatcaagaaattgtatcattactatttacactcaatgaaaagaacctacgattattttatattacgtttccaaaacttgagatacttgacgattaacgacttacccacaactatagtccagatggatgaacatcaaagatgcaatatacctatctttcacgccacaggatacgaaagcaatcagctctatgaattagtagatgctgagtccttatttagttaa

SEQ ID NO: 14709 - protein, 547 aa, Candida glabrata CBS 138
MPFEKLPQEVVQKILSNVSQDDKVALTYVSRNAYFHGIRSLYRNIYLANTSYIPSDYDGSLGTHYWSTLCCNYRNISTDFESLDLAELGNLFKGSERAMYKFNCLIRSIEERPGKLCPLIESVHCTWHLDPKLLERFIYLLTRHGHNLKSFDNFIGGEINDQLTSIYGQLQTLTMTASSRTPADPPTIQFVDSLDKFCKQYSWENLNTLNIHMDLRNYFHNLDKPLKIRNLTLNLRKDMLLGEDYNRGRLPYHKILDKNELRELEVLSWIEPKDMNFDMYQLWGLYEFLEFHNIEELSLLSLTDNHFFITEAVSHWHHLRRLKLDYMFELTMENEFLDLLASSPCAKTLEYIDFRINQFEGVPISVAVGLQPKFELTLMCKCDFCKGVYEDIIIKKYFPTVASLRKPSYKELELNKIFYQMIKVYPIIPHAHYCDVYPAMGFRYYSLHDHANIQNRMRQDDENMKRLPLLSGDDIKKLYHYYLHSMKRTYDYFILRFQNLRYLTINDLPTTIVQMDEHQRCNIPIFHATGYESNQLYELVDAESLFS

SEQ ID NO: 14710 - DNA, 1581 bp, Kluyveromyces lactis NRRL Y-1140
  CDS (1)..(1581)
atgctcgaacagcttccgaacgaaatatggcttgagatactgggatatttatctcaaatcgaaaaatcatccttgatgatggtatctcaccaactttacgataaaacagtggcgtcactctaccaaaacctatatttgaacgaaagaccaattatacacatcccagaatatccttattttggcaacaactggtctacgcttgtgttttctgaagcagggcgatcatcagttaagtttcaagcgctattcaatactctaagcaagaacgttgaactttgcaagctaataaataagatacactgtacttggcatttaaatcggaatttattgacaaggtttaccgggctcatatgtgaacatgcgacaaatattacttattttgagaactttctatatatcgaaacattcgaaacgatctccaagtctcagcttgcatcgcagttaaaatccttagacatagtcccgcatgcaaaacttccggggcctgcatatgcttcgtacttgactagcataacatctatggcaaacaaatttaattgggccaatatcaagagccttacaatatactttgatgcactcatgtggttcccaaactttgtcccactatcggaaaagttacagttaactgaactatgtttaaatcttcgaaatgattcttttccaggattcgagagtgcaccaagaacatcaaaatttagtgatttatttgatgtgaatactttggaaaagctttccattttgtcgtggtacgagacggaaacgttggatgtatacgaagagtatggtttgttcgatctttctaactttaaaaacctcaaagagatttcgttgttgtctatattttacaacgaaaacttcctattatccttgttttctaacctcactagattggaacaactgaagttagactttatgtttgatcacgtcttatctaaagacatccttaccattttatctggcatcaagacgttgaaatacatagattgtaaatttgacgacttggatgaacctattcttgacgtaattgaactagacgactttgcaatatttgaactcaatcaaatgtgcctatgcgatagttgcaagcatgtttacagtgacattattctcaaaaaatatttccctaccaaacaggctttcatgattcaaaactcgagtgatattcattctaaacatttcatcaaccatatctttaaactctacccaataatcccttatttccatttactaacaacgtccccctgcattgcatacagatcaaagtcaattgaagaactcgctaagaagagtaacgagcttctaaatgacctgttttacgaatatgaatctgacactactgatactaaaataactccggaagatatcgtttctttgtatcattgtatatgtcattcaatgaggagaactttcgacttctttctaaaactcttccccaggttacatatactggttatcaacgatatgccaactatcgttgatgaacaggatgaacaaaaatttacgaagccaatattttattcatctggttacgaaagtaatcaagtataccaagtcattaacgatgaaacactatttgattaa

SEQ ID NO: 14711 - protein, 526 aa, Kluyveromyces lactis NRRL Y-1140
MLEQLPNEIWLEILGYLSQIEKSSLMMVSHQLYDKTVASLYQNLYLNERPIIHIPEYPYFGNNWSTLVFSEAGRSSVKFQALFNTLSKNVELCKLINKIHCTWHLNRNLLTRFTGLICEHATNITYFENFLYIETFETISKSQLASQLKSLDIVPHAKLPGPAYASYLTSITSMANKFNWANIKSLTIYFDALMWFPNFVPLSEKLQLTELCLNLRNDSFPGFESAPRTSKFSDLFDVNTLEKLSILSWYETETLDVYEEYGLFDLSNFKNLKEISLLSIFYNENFLLSLFSNLTRLEQLKLDFMFDHVLSKDILTILSGIKTLKYIDCKFDDLDEPILDVIELDDFAIFELNQMCLCDSCKHVYSDIILKKYFPTKQAFMIQNSSDIHSKHFINHIFKLYPIIPYFHLLTTSPCIAYRSKSIEELAKKSNELLNDLFYEYESDTTDTKITPEDIVSLYHCICHSMRRTFDFFLKLFPRLHILVINDMPTIVDEQDEQKFTKPIFYSSGYESNQVYQVINDETLFD

SEQ ID NO: 14712 - DNA, 27 bp, Artificial sequence
  primer
atgtttgataagttaccttatgagatt

SEQ ID NO: 14713 - DNA, 24 bp, Artificial sequence
  primer
tcaactaaatagagcttctgcgtc

SEQ ID NO: 14714 - protein, 565 aa, Artificial sequence
  consensus sequence
  Variant (3)..(3): Xaa in position 3 is any amino acid
  Variant (5)..(8): Xaa in position 5 to 8 is any amino acid
  Variant (10)..(14): Xaa in position 10 to 14 is any amino acid
  Variant (16)..(17): Xaa in position 16 to 17 is any amino acid
  Variant (19)..(20): Xaa in position 19 to 20 is any amino acid
  Variant (22)..(23): Xaa in position 22 to 23 is any amino acid
  Variant (25)..(28): Xaa in position 25 to 28 is any amino acid
  Variant (30)..(36): Xaa in position 30 to 36 is any amino acid
  Variant (38)..(38): Xaa in position 38 is any amino acid
  Variant (40)..(41): Xaa in position 40 to 41 is any amino acid
  Variant (43)..(47): Xaa in position 43 to 47 is any amino acid
  Variant (49)..(56): Xaa in position 49 to 56 is any amino acid
  Variant (58)..(59): Xaa in position 58 to 59 is any amino acid
  Variant (60)..(60): Xaa in position 60 is any or no amino acid
  Variant (63)..(63): Xaa in position 63 is any amino acid
  Variant (65)..(74): Xaa in position 65 to 74 is any amino acid
  Variant (75)..(95): Xaa in position 75 to 95 is any or no amino acid
  Variant (98)..(109): Xaa in position 98 to 109 is any amino acid
  Variant (110)..(110): Xaa in position 110 is any or no amino acid
  Variant (113)..(113): Xaa in position 113 is any amino acid
  Variant (116)..(119): Xaa in position 116 to 119 is any amino acid
  Variant (125)..(134): Xaa in position 125 to 134 is any amino acid
  Variant (136)..(141): Xaa in position 136 to 141 is any amino acid
  Variant (143)..(148): Xaa in position 143 to 148 is any amino acid
  Variant (150)..(163): Xaa in position 150 to 163 is any amino acid
  Variant (164)..(165): Xaa in position 164 to 165 is any or no amino acid
  Variant (168)..(169): Xaa in position 168 to 169 is any amino acid
  Variant (171)..(178): Xaa in position 171 to 178 is any amino acid
  Variant (180)..(204): Xaa in position 180 to 204 is any amino acid
  Variant (205)..(206): Xaa in position 205 to 206 is any or no amino acid
  Variant (208)..(208): Xaa in position 208 is any amino acid
  Variant (210)..(216): Xaa in position 210 to 216 is any amino acid
  Variant (218)..(218): Xaa in position 218 is any amino acid
  Variant (220)..(228): Xaa in position 220 to 228 is any amino acid
  Variant (229)..(231): Xaa in position 229 to 231 is any or no amino acid
  Variant (233)..(233): Xaa in position 233 is any amino acid
  Variant (238)..(238): Xaa in position 238 is any amino acid
  Variant (240)..(257): Xaa in position 240 to 257 is any amino acid
  Variant (258)..(262): Xaa in position 258 to 262 is any or no amino acid
  Variant (264)..(266): Xaa in position 264 to 266 is any amino acid
  Variant (268)..(269): Xaa in position 268 to 269 is any amino acid
  Variant (271)..(272): Xaa in position 271 to 272 is any amino acid
  Variant (276)..(283): Xaa in position 276 to 283 is any amino acid
  Variant (284)..(292): Xaa in position 284 to 292 is any or no amino acid
  Variant (294)..(296): Xaa in position 294 to 296 is any amino acid
  Variant (299)..(303): Xaa in position 299 to 303 is any amino acid
  Variant (305)..(305): Xaa in position 305 is any amino acid
  Variant (307)..(310): Xaa in position 307 to 310 is any amino acid
  Variant (313)..(313): Xaa in position 313 is any amino acid
  Variant (315)..(320): Xaa in position 315 to 320 is any amino acid
  Variant (322)..(331): Xaa in position 322 to 331 is any amino acid
  Variant (333)..(334): Xaa in position 333 to 334 is any amino acid
  Variant (339)..(339): Xaa in position 339 is any amino acid
  Variant (341)..(352): Xaa in position 341 to 352 is any amino acid
  Variant (354)..(356): Xaa in position 354 to 356 is any amino acid
  Variant (357)..(359): Xaa in position 357 to 359 is any or no amino acid
  Variant (361)..(361): Xaa in position 361 is any amino acid
  Variant (363)..(365): Xaa in position 363 to 365 is any amino acid
  Variant (367)..(392): Xaa in position 367 to 392 is any amino acid
  Variant (393)..(393): Xaa in position 393 is any or no amino acid
  Variant (395)..(395): Xaa in position 395 is any amino acid
  Variant (397)..(398): Xaa in position 397 to 398 is any amino acid
  Variant (401)..(406): Xaa in position 401 to 406 is any amino acid
  Variant (408)..(408): Xaa in position 408 is any amino acid
  Variant (411)..(411): Xaa in position 411 is any amino acid
  Variant (414)..(440): Xaa in position 414 to 440 is any amino acid
  Variant (442)..(442): Xaa in position 442 is any amino acid
  Variant (444)..(451): Xaa in position 444 to 451 is any amino acid
  Variant (452)..(452): Xaa in position 452 is any or no amino acid
  Variant (454)..(469): Xaa in position 454 to 469 is any amino acid
  Variant (471)..(488): Xaa in position 471 to 488 is any amino acid
  Variant (489)..(492): Xaa in position 489 to 492 is any or no amino acid
  Variant (494)..(496): Xaa in position 494 to 496 is any amino acid
  Variant (500)..(502): Xaa in position 500 to 502 is any amino acid
  Variant (504)..(511): Xaa in position 504 to 511 is any amino acid
  Variant (513)..(518): Xaa in position 513 to 518 is any amino acid
  Variant (520)..(521): Xaa in position 520 to 521 is any amino acid
  Variant (523)..(523): Xaa in position 523 is any amino acid
  Variant (526)..(527): Xaa in position 526 to 527 is any amino acid
  Variant (529)..(529): Xaa in position 529 is any amino acid
  Variant (530)..(530): Xaa in position 530 is any or no amino acid
  Variant (532)..(537): Xaa in position 532 to 537 is any amino acid
  Variant (539)..(542): Xaa in position 539 to 542 is any amino acid
  Variant (544)..(544): Xaa in position 544 is any amino acid
  Variant (546)..(548): Xaa in position 546 to 548 is any amino acid
  Variant (551)..(551): Xaa in position 551 is any amino acid
  Variant (554)..(555): Xaa in position 554 to 555 is any amino acid
  Variant (557)..(561): Xaa in position 557 to 561 is any amino acid
  Variant (563)..(563): Xaa in position 563 is any amino acid
LPXEXXXXIXXXXXQXXKXXLXXVXXXXYXXXXXXXYXNXXLXXXXXIXXXXXXXXGXXXWSXLXXXXXXXXXXXXXXXXXXXXXXXXXXXXXXXKFXXXXXXXXXXXXXLCXLIXXXXCTWHLXXXXXXXXXXLXXXXXXNXXXXXXFXXXXXXXXXXXXXXXXQLXXLXXXXXXXXPXXXXXXXXXXXXXXXXXXXXXXXXXXXLXIXXXXXXXFXNXXXXXXXXXXXXLXLNLRXDXXXXXXXXXXXXXXXXXXXXXXXDXXXLXXLXXLSWXXXXXXXXXXXXXXXXXYXXXGLXXXXXFXNXXXXSLXSXXXXXXFXXXXXXXXXXLXXLKLDXMXXXXXXXXXXXXLXXXXXXKXLXXXDXXXXXXXXXXXXXXXXXXXXXXXXXXXCXCXXCKXXXXXXIXKKXFPXXXXXXXXXXXXXXXXXXXXXXXXXXXIXPXXXXXXXXXPXXXXXXXXXXXXXXXXNXXXXXXXXXXXXXXXXXXXXXXDXXXLYHXXXHXXXXXXXXFXXXXXXLXXLXINXXPXXIXXXXXXQXXXXPXFXXXGYXSNXXYXXXXXEXLF

SEQ ID NO: 14715 - DNA, 924 bp, Saccharomyces cerevisiae
  CDS (1)..(924)
atgaccggcatggaatcaggagagaatttggaaaacatggaagatattttggcgagacatcgcaaggaaaataaagatttacagaataagataacgggtatgaaaaagcaggctactaaatccaaaaggaaagaagttaattcgaaatgcctagatcttcaagataaactaaagactaagcaagaaaatgaaataagggattggaaaattgcaaataatgaagtgtttgacgcagaacaagaagatgaagtgactcctgaaaaacttttagaacaactatccatatctcgagatgagaaagaacaacagaatgttcccgttcaacaacagcaacaaggccagacaaagaagcgtcgcaatagacaaaaggaaagattggccaaaagagatgcagcaattgctaaaatgaaagaagaggctgctttagaagcatccaaacaaccggacttgaaaaaaatggagcaggagtctatagatcagttatgcgagttgaagaaactgaaacaattcgatatacaacccgatggccactgtctctttgcatctatattagatcagttaaaattacgccatgatccaaaaaaactggatcaagacatggatgtcatgaagctgagatggttgagttgtaattacgtacaggagcacagggatgatttcattccatatttgtttgatgaagaaactatgaagatgaaagacattgatgagtatacgaaagagatggagcatacagctcaatggggtggtgaaattgagattttggctctctctcacgttttcgactgccccattagcattctgatgagtggaagacctattcaagtgtacaatgaatgtgggaaaaatcctgaattgaagctagtttactataaacacagctatgcattaggtgagcattataattcattgcatgattcttga

SEQ ID NO: 14716 - protein, 307 aa, Saccharomyces cerevisiae
MTGMESGENLENMEDILARHRKENKDLQNKITGMKKQATKSKRKEVNSKCLDLQDKLKTKQENEIRDWKIANNEVFDAEQEDEVTPEKLLEQLSISRDEKEQQNVPVQQQQQGQTKKRRNRQKERLAKRDAAIAKMKEEAALEASKQPDLKKMEQESIDQLCELKKLKQFDIQPDGHCLFASILDQLKLRHDPKKLDQDMDVMKLRWLSCNYVQEHRDDFIPYLFDEETMKMKDIDEYTKEMEHTAQWGGEIEILALSHVFDCPISILMSGRPIQVYNECGKNPELKLVYYKHSYALGEHYNSLHDS

SEQ ID NO: 14717 - DNA, 972 bp, Oryza sativa (japonica cultivar-group)
  CDS (1)..(972)
atggacgaaaccctagccgacgaatccgccgccggcggcggcgaggcagccgcggcggagccagcgcaggaatcgcagcaagagacgctcgaggaggtgctctcgaggcataggaaagagaaatccaaactccaggataaggaaacaagcctcaagaaagcagccgctaaaggcagcaaagctgagcagaaggccaagaagaagcaggtagaggaggagatttcacgcctctcagctgagttagaggcgaaacatgccgcagagctcgctacttttgggtacaaatcctcaggcagctcagaaaaggggaacatggacaccttagtaaaggctatagctggtgtttctgtgaccagcaacgcggattccgcgaagcctagcaagggtgcacggcgtcgagagaagaaggcaaaggaagaggccgctagagagcagcggattcaagaagagcaaaacaatcttgtcagtgaccgcatgatagaaaatgaaaagcttgagaagaagcttgagcccatgggactgaccattcaggagataaagccagatggccactgcctgtaccgtgctgttgagaaccagctgtcactctattccagagaaaccacacaatacaattaccaggagctgcggcaaatgactgccaattatatgaaagagcatgcggcagattttctcccatttttcctatcagagggcaaggtcgagtctggaccagatcccttggagagcttcaagaggtactgtgaggaggttgagtcaactgctgcttggggtgggcaacttgagcttggtgctctaacccactgcctgaagaagcgcattgttgtatactcgggctcatttccagatgtggaaatgggcaaagaatacaaattggattcaggtggtaaagatggccctagcattaggttgtcctatcacagacatgcctatggtcttggtgagcactacaactcggtggttcctgcttag

SEQ ID NO: 14718 - protein, 323 aa, Oryza sativa (japonica cultivar-group)
MDETLADESAAGGGEAAAAEPAQESQQETLEEVLSRHRKEKSKLQDKETSLKKAAAKGSKAEQKAKKKQVEEEISRLSAELEAKHAAELATFGYKSSGSSEKGNMDTLVKAIAGVSVTSNADSAKPSKGARRREKKAKEEAAREQRIQEEQNNLVSDRMIENEKLEKKLEPMGLTIQEIKPDGHCLYRAVENQLSLYSRETTQYNYQELRQMTANYMKEHAADFLPFFLSEGKVESGPDPLESFKRYCEEVESTAAWGGQLELGALTHCLKKRIVVYSGSFPDVEMGKEYKLDSGGKDGPSIRLSYHRHAYGLGEHYNSVVPA

SEQ ID NO: 14719 - DNA, 999 bp, Arabidopsis thaliana
  CDS (1)..(999)
atggcagacaataaaacatctgaaggtattgtatccgaagaaactcccatggatgcttctcaggagcaacaacatgaaacagttgaggagatgcttgctcgccacaggcaagagattaaacaacttcaaaacaaagagacagagatgaagaaggcagctgccaaaggtagcaaagctgaacaaaaagctaagaagaagcaagtcgaagatgacatttccaaactctccactaagctcaaggacaaacagttgaaagaactcgcctctcaaggtttcagcagcagcagcagcaacaacattgccaaggacgaaacgactgagaaaaaaggagacatcgacactctagttagagctatagctggagtctcagtcactgctcagcaagagcactcaaagcctagcaagagcgtgaagaggcgcgagaaacgggctaaggaagaagcagacagagagcagagaattaaagaggagcaaagccacgtgaaaagtgatcgtatggttgagaacgccaagcttgagaagaagcttaaaccattgggattaacagtcagtgagattaaaccagacggacattgcctttaccgtgctgttgagaatcagcttgccaaccgctcgggcggtgcatctccttacacataccagaatctaagagaaatggctgcttcgtacatgagagagcacaaaaccgactttctcccgtttttcttgtcagagactgagggtgactccaacagtggatctgcagaagagcggtttgagaaatactgcagagaagtcgagtcaaccgctgcttggggcagtcaattggagcttggagcattaacacattgcttgaggaaacacataaaggtgtattcgggatcgtttccggatgttgagatgggcaaagagtatagatccggcgatgactcgagcctcatgttatcgtatcacaggcatgcttttgggctcggggagcattataactcagtggtgctcgtcaacaacatcaccggatga

SEQ ID NO: 14720 - protein, 332 aa, Arabidopsis thaliana
MADNKTSEGIVSEETPMDASQEQQHETVEEMLARHRQEIKQLQNKETEMKKAAAKGSKAEQKAKKKQVEDDISKLSTKLKDKQLKELASQGFSSSSSNNIAKDETTEKKGDIDTLVRAIAGVSVTAQQEHSKPSKSVKRREKRAKEEADREQRIKEEQSHVKSDRMVENAKLEKKLKPLGLTVSEIKPDGHCLYRAVENQLANRSGGASPYTYQNLREMAASYMREHKTDFLPFFLSETEGDSNSGSAEERFEKYCREVESTAAWGSQLELGALTHCLRKHIKVYSGSFPDVEMGKEYRSGDDSSLMLSYHRHAFGLGEHYNSVVLVNNITG

SEQ ID NO: 14721 - DNA, 975 bp, Schizosaccharomyces pombe 972h-
  CDS (1)..(975)
atgagatgtccattagcatattattacactcaaactaccataccaactcaacaaaaacgaaagtctaaaaaaatggaggaattgttaagtaagcaacgggaagaatgtaaagaacttcaaagcaaaattacaaaccttcgtaaacaactaaaggaaggaaataaaaaacaaaaaagggctttgcagcaaaaaatctcacaaatggaagccgatttatcacaaaaacatgctacagaacgacaaaaattggataaaggcgatgaagagacaaatgaaacgcagcaagaagatctcctcaatacgcttttacaacagatggaagatacgaaaattacgacggcagaaaaatcatcagttcagtcctcattgaatactaaagaaaatacaccgcaacagcctaaaaagtctaggaatagacaaaaagagcgacttgaacgacgtaaagcagagatgaaaaaaatgtctgagcaggcagagctagagtcagaaaaaatggctgatctcaaaaatgaagagaaaaaaaagttttcaaaaatccttgaggaagctggacttgttgcagtcgatataccagcggatggaaattgtttatttgcttccatttcacatcagttaaattatcatcataatgttaaactaaatagccaagctcttcgtaataaatccgctgattatgtattaaagcactgcgaacagtttgaaggctttttgctagacgaagaatctggagaagttttgccagtatccgattattgtaacgaaattcgaaacaatagcaaatggggaagtgatattgaaatacaggcattagcaaactctcttgaggttcctgttcatgtctacaacacagaaggtccagttttaaagtttaacccctcaacggtcaagttcgaaaaaccgttgtgtatagcatattaccagcatttgtttgggcttggcgctcactataatagtttattatatcgggacaattaa

SEQ ID NO: 14722 - protein, 324 aa, Schizosaccharomyces pombe 972h-
MRCPLAYYYTQTTIPTQQKRKSKKMEELLSKQREECKELQSKITNLRKQLKEGNKKQKRALQQKISQMEADLSQKHATERQKLDKGDEETNETQQEDLLNTLLQQMEDTKITTAEKSSVQSSLNTKENTPQQPKKSRNRQKERLERRKAEMKKMSEQAELESEKMADLKNEEKKKFSKILEEAGLVAVDIPADGNCLFASISHQLNYHHNVKLNSQALRNKSADYVLKHCEQFEGFLLDEESGEVLPVSDYCNEIRNNSKWGSDIEIQALANSLEVPVHVYNTEGPVLKFNPSTVKFEKPLCIAYYQHLFGLGAHYNSLLYRDN

SEQ ID NO: 14723 - DNA, 939 bp, Drosophila melanogaster
  CDS (1)..(939)
atgtgtgacggcgatgtggcaattgcggagctggaatcccgtctggatgaggtcagtctggaggacataggtgccagacatcgtcgcgagcgcaaggatttgcaggccaagctgcaggccatgaagaagaatgcgccgaaaaataataaaaacaagcggaaggagttcctggaggagatggctcgcctggagggagagctggagcagcgccacaaggcggaactgaaggcagcggaagccatggaggcaccggtgttggtggaaccggtcgtcaaagagccagcggaaaagccagaaactgaagtgacagacgatgatggaatcgaggaaaaagaggaacagctggcgcccaatcagcgtgtttccaaggcacagaaacgccgggacaagaaggcaaaggaggcacgtgcacgagaggcagagatcaagacggagctgcaaaatgctgccaatcagccaacgcccaagttaatcgaactgcagcagattacagcaaagctatcccaacgccaattatcccttcacaatataccctccgatggcgactgcttatatcagtccatcagacaccaacttatcgtaaatgctcttccaggtcacagtgttcaggagttgcgggaggaaactgccaattatgtgcgtgctcacaaggactcgcttatctcatacatgatccacccggaaacaggagacattctgaacgaccaacaattcgaacaatactgccacgacatagcaaaaactcacgcttggggtggccacatagaactgaaggccatctcatcgctactccgggtgcccattgaagttatccaagcggaaggagcaccgacgctcctggggcaagaggaattcggtggatcaccgctgatcatctgctaccaccgccacatataccaattgggtgcccactacaattccacggtgccagcagcctaa

SEQ ID NO: 14724 - protein, 312 aa, Drosophila melanogaster
MCDGDVAIAELESRLDEVSLEDIGARHRRERKDLQAKLQAMKKNAPKNNKNKRKEFLEEMARLEGELEQRHKAELKAAEAMEAPVLVEPVVKEPAEKPETEVTDDDGIEEKEEQLAPNQRVSKAQKRRDKKAKEARAREAEIKTELQNAANQPTPKLIELQQITAKLSQRQLSLHNIPSDGDCLYQSIRHQLIVNALPGHSVQELREETANYVRAHKDSLISYMIHPETGDILNDQQFEQYCHDIAKTHAWGGHIELKAISSLLRVPIEVIQAEGAPTLLGQEEFGGSPLIICYHRHIYQLGAHYNSTVPAA

SEQ ID NO: 14725 - DNA, 951 bp, Arabidopsis thaliana
  CDS (1)..(951)
atggatgcttctcaggagcaacaacatgaaacagttgaggagatgcttgctcgccacaggcaagagattaaacaacttcaaaacaaagagacagagatgaagaaggcagctgccaaaggtagcaaagctgaacaaaaagctaagaagaagcaagtcgaagatgacatttccaaactctccactaagctcaaggacaaacagttgaaagaactcgcctctcaaggtttcagcagcagcagcagcaacaacattgccaaggacgaaacgactgagaaaaaaggagacatcgacactctagttagagctatagctggagtctcagtcactgctcagcaagagcactcaaagcctagcaagagcgtgaagaggcgcgagaaacgggctaaggaagaagcagacagagagcagagaattaaagaggagcaaagccacgtgaaaagtgatcgtatggttgagaacgccaagcttgagaagaagcttaaaccattgggattaacagtcagtgagattaaaccagacggacattgcctttaccgtgctgttgagaatcagcttgccaaccgctcgggcggtgcatctccttacacataccagaatctaagagaaatggctgcttcgtacatgagagagcacaaaaccgactttctcccgtttttcttgtcagagactgagggtgactccaacagtggatctgcagaagagcggtttgagaaatactgcagagaagtcgagtcaaccgctgcttggggcagtcaattggagcttggagcattaacacattgcttgaggaaacacataaaggtgtattcgggatcgtttccggatgttgagatgggcaaagagtatagatccggcgatgactcgagcctcatgttatcgtatcacaggcatgcttttgggctcggggagcattataactcagtggtgctcgtcaacaacatcaccggatga

SEQ ID NO: 14726 - protein, 316 aa, Arabidopsis thaliana
MDASQEQQHETVEEMLARHRQEIKQLQNKETEMKKAAAKGSKAEQKAKKKQVEDDISKLSTKLKDKQLKELASQGFSSSSSNNIAKDETTEKKGDIDTLVRAIAGVSVTAQQEHSKPSKSVKRREKRAKEEADREQRIKEEQSHVKSDRMVENAKLEKKLKPLGLTVSEIKPDGHCLYRAVENQLANRSGGASPYTYQNLREMAASYMREHKTDFLPFFLSETEGDSNSGSAEERFEKYCREVESTAAWGSQLELGALTHCLRKHIKVYSGSFPDVEMGKEYRSGDDSSLMLSYHRHAFGLGEHYNSVVLVNNITG

SEQ ID NO: 14727 - DNA, 876 bp, Strongylocentrotus purpuratus
  CDS (1)..(876)
atggatcgagacgaactggaacaaaaacacaggaatgaacggaaagaattgcaagctaagattcaaggaataaagaaagctgcaccgaaaggagacaagaagaggaagaaagaagcaaccgaagagattgctagactagaagcagaacttgatcagaggcatcaggctgagcttgaggctaacgaggcagctgtacctctggatgcagctcagaatgaggtagcaacggaagaaatgcttggaggactagacatcaatgaagaatcaggagataaacctcagaagctttcaaaagcacagaaaagaagaaataagaaagctcaagaagaaaaggagaaagtagaaaggatagccatcgcagagaaggataatgtaaacagtgcaagaaacattgagaataaacagtttgcagatatcacatcaaagagaaatctacaaataaaacagataccatcagatggtcattgtctgtacaatgcagtggttcatcaactatccttacagggtattgaggaaaaaatggagatggttagacagaaggtgtcggatcatatgaaatccaatatcgatgagttcttgtgcttcctgacaaagcctgatacaggagatatgttgacaccagatgaatatgagaagtattgtgatgatgttgctaacacagctgattggggtggtcatcatgagatgaaagccataacagaggtatacaagaaacccattgaagtactgcaggcagcaggtccactgctgaagatgggagaagagttcaaaggtcatcctattatgctatcgtaccaccatcatgcatacggccttggagagcattacaactcagtgatggagagagagaagaagctagctgaagatgaaacataa

SEQ ID NO: 14728 - protein, 291 aa, Strongylocentrotus purpuratus
MDRDELEQKHRNERKELQAKIQGIKKAAPKGDKKRKKEATEEIARLEAELDQRHQAELEANEAAVPLDAAQNEVATEEMLGGLDINEESGDKPQKLSKAQKRRNKKAQEEKEKVERIAIAEKDNVNSARNIENKQFADITSKRNLQIKQIPSDGHCLYNAVVHQLSLQGIEEKMEMVRQKVSDHMKSNIDEFLCFLTKPDTGDMLTPDEYEKYCDDVANTADWGGHHEMKAITEVYKKPIEVLQAAGPLLKMGEEFKGHPIMLSYHHHAYGLGEHYNSVMEREKKLAEDET

SEQ ID NO: 14729 - DNA, 921 bp, Nasonia vitripennis
  CDS (1)..(921)
atggctgatgacggagaaactataatatcctcggaggaagacttgattatcgttcacaagaaagaacgaaaagaactgcaagcgagaattcaggtactcaagaaatctatatgtaaaggagacaagaagaagaaaaaagaaatcactgaggaaatagtaaaattggagtatgatctgaataagaagcaagatgaagagatggcaagattcaaattatcgcatatgagcattgacaaaactgatgctgaaatagaaggttcaccggttgatgaaaatagtacacctgttaatgaacaaaataatcaggaggaacctaagagtgcaggtagagtttctaaagcccaaaagagaagagagaagaaagagactgcagagagggagaggaaccaaagaataattgaacaagaggctttgaacgtacacggaaaaagaaatcttgagatacaagcaataaaaaacattttagtaaagagggatttgatgatacatgaaatacctagtgacggacactgcctctataatgctgttgctcatcagttgaaagtaataggaaatacaccaactttagatctcaatgatcttagaagacagactgccatatacttaagagaaaatacagataactttttacccttcattgataatccagactcagatgagctgttgtcaattgaacagtacgaaaaatattgtgataatgtagctgagactagtacttggggtggagccattgagctgcaagtactgtcatgtgttctcaaatgtcctatagaagtaattcaggccagcggtgttccctacttagtaggtgctgaatttgagccaactaggaaacttattctaacataccatcgacatatgtatcagttaggagcgcattataattcagttaccaagtatttagaaaaatcagatagttga

SEQ ID NO: 14730 - protein, 306 aa, Nasonia vitripennis
MADDGETIISSEEDLIIVHKKERKELQARIQVLKKSICKGDKKKKKEITEEIVKLEYDLNKKQDEEMARFKLSHMSIDKTDAEIEGSPVDENSTPVNEQNNQEEPKSAGRVSKAQKRREKKETAERERNQRIIEQEALNVHGKRNLEIQAIKNILVKRDLMIHEIPSDGHCLYNAVAHQLKVIGNTPTLDLNDLRRQTAIYLRENTDNFLPFIDNPDSDELLSIEQYEKYCDNVAETSTWGGAIELQVLSCVLKCPIEVIQASGVPYLVGAEFEPTRKLILTYHRHMYQLGAHYNSVTKYLEKSDS

SEQ ID NO: 14731 - DNA, 918 bp, Gibberella zeae PH-1
  CDS (1)..(918)
atggacaaccccgcacccacagaaacccttgagcagatccagacgcggcaccgccgtgagctaaaggatctgcagggtcgcataacgggaaagaagaagaacgccaccaagaagactcgaaaaggcgtcaacgatgagtgtgcagagatggagcgtcagctacgagacaagcaagccgccgagatcgccgccctgaacccaagcgagagcaagaacgacgatgacaacgaagatgacaacgaagatgatgccgcccccgaggtggagggcaagtcagaggataagctggccgaagaggcccagaaacttagcctttcggaaccagcagaacagcaacaacagcctgggaagaagcgcaatcgtcagaaggagagaatggctcgacgcgctgctgagcaggaagccgaagcacaacgcgcagaggaggaggcatccaacatgacaaactatcgagcaaaggagagcgagtatatgaagacgacatttgagaagcacggcctagtagagcaggatattgcacccgatggacactgcttgttttcggcggttgctgatcaattggaacaaaacgatatccctcttagcgatgggaccacacaagagccggcttataagacagtacgacgggtagcttcgaattacatgttggagcacggagatgattttgctcctttccttgaagaagatcttgaaggctacgctcgcaagatgaaggataccgctgaatggggagggcagctcgagctcatggcattggcacgacagtacaaggcagaaatccgagtggtgcaagatggacgcatggagcgtattggcgaggaagaaggagccgagtcgggaaagacactatggctggcatattacaggcacggctacggtttaggagagcattacaactctcttcgaaaagcatcatga

SEQ ID NO: 14732 - protein, 305 aa, Gibberella zeae PH-1
MDNPAPTETLEQIQTRHRRELKDLQGRITGKKKNATKKTRKGVNDECAEMERQLRDKQAAEIAALNPSESKNDDDNEDDNEDDAAPEVEGKSEDKLAEEAQKLSLSEPAEQQQQPGKKRNRQKERMARRAAEQEAEAQRAEEEASNMTNYRAKESEYMKTTFEKHGLVEQDIAPDGHCLFSAVADQLEQNDIPLSDGTTQEPAYKTVRRVASNYMLEHGDDFAPFLEEDLEGYARKMKDTAEWGGQLELMALARQYKAEIRVVQDGRMERIGEEEGAESGKTLWLAYYRHGYGLGEHYNSLRKAS

SEQ ID NO: 14733 - DNA, 903 bp, Candida glabrata CBS 138
  CDS (1)..(903)
atggatgctagagaggagttgctggcgaagcacaggaaggagaagcgggacctggtgaacaggatcacggggatgaagaagcaagcgacgaaggcgaagaggaaagaggtgaatagcaagtgtgagcaattggagcaggagctgagggagaagcacgagcaggagctgaaggagctggatggcgagggcggtgacgtggaggaagtgacccccgagcaactgctggcacaattgcaagttgaggatgacggtgccaaggaagccaacgaggccaacgaggccaaggcagacaaggaagccaaggtggggcccagccagcagccaaagaagaagaggaatagacagaaggagaagcttgctaggagagaagctgagatagcgcggatgaaggaagaggcgaagaaagaggctgccgagcagccggacctgaagaagatcgagcaggacgccatatggcaactctgtcagatgaaaggtcttgtgccatacgacatccagcctgatggccattgtctgtttgcctccatcttggaccaagtcaagacacgtcacggagacccccaaacagagatggacgtgcataccttgcggtgcttggcgtgcgactatatcttggagcacagagatgagtttattccgtatctgtttgacgaggctacaatgtctctgaaagatatcgatgagtacactgaagagatgaaaagtactgccaagtggggtggtgaagtggagattctggcattgtcaaaggcactggactgcccaatatcggtgctgatgtctggtcaagcaacacacaccgtcaacgagacgggctcgaagcctgaactgaaactggtctactacaaacacacatatgctctgggtgagcattacaactccctaagagacagcaagatataa

SEQ ID NO: 14734 - protein, 300 aa, Candida glabrata CBS 138
MDAREELLAKHRKEKRDLVNRITGMKKQATKAKRKEVNSKCEQLEQELREKHEQELKELDGEGGDVEEVTPEQLLAQLQVEDDGAKEANEANEAKADKEAKVGPSQQPKKKRNRQKEKLARREAEIARMKEEAKKEAAEQPDLKKIEQDAIWQLCQMKGLVPYDIQPDGHCLFASILDQVKTRHGDPQTEMDVHTLRCLACDYILEHRDEFIPYLFDEATMSLKDIDEYTEEMKSTAKWGGEVEILALSKALDCPISVLMSGQATHTVNETGSKPELKLVYYKHTYALGEHYNSLRDSKI

SEQ ID NO: 14735 - DNA, 954 bp, Kluyveromyces lactis NRRL Y-1140
  CDS (1)..(954)
atgtctactgaaactgcacaagaggagctgcttgcgcgtcatcgcaaggaacgtaaagatttgaccaatcagattacttctttgaagaagcaagcatcaaagaagacgaggaagcaagtaaatgccaaatgtacagacttagaacaggaacttgatactcgacataaatcagagctcgcaaagttgaacggtgttgcttttgagcattctgattcggaagaaatcacaccagctcaattattagctcaattgtccttagatcaagatcctgtgcaatctgtttgtaaaaccgatgagttgcaacagcgagaaccagagttacagggaaagaaacgtaggaatagacaaaaggagcgattggcaaaaagggatgcagaggttgcaagaattaaacaacaggcaatggaagaggcagccgagcagccgaacttgaaagatattgagcaaaactctttggataaagtttgtgtagtgctaaatttgaaacaattcgatatccagccggatggacactgtttgtttaatagtattctagatcaactgaggctccgccatcagactaataatgacattgagtatgattataactttccagaggaatatacaggtaccaagtacgtgtctgaaatggacgtctattcgttgagatcgctttcatcatcattcattagggagaaccgtgacgatttcatcccatatcttttcgatgaaaatacaatgaccgtaaaggatcttgatgagtatacaaaaactatggaaactacagcccaatggggtggagaagtagaaattttggcactatcaaaagtttttaacagtaccattagcattttgatgtcaggaagatccacttacaggataaatgaagacgcgaagaatcccgaactcaagatcgtatactacaaacattcgtatacgctcggagagcattataactcgttgcatgatctgtag

SEQ ID NO: 14736 - protein, 317 aa, Kluyveromyces lactis NRRL Y-1140
MSTETAQEELLARHRKERKDLTNQITSLKKQASKKTRKQVNAKCTDLEQELDTRHKSELAKLNGVAFEHSDSEEITPAQLLAQLSLDQDPVQSVCKTDELQQREPELQGKKRRNRQKERLAKRDAEVARIKQQAMEEAAEQPNLKDIEQNSLDKVCVVLNLKQFDIQPDGHCLFNSILDQLRLRHQTNNDIEYDYNFPEEYTGTKYVSEMDVYSLRSLSSSFIRENRDDFIPYLFDENTMTVKDLDEYTKTMETTAQWGGEVEILALSKVFNSTISILMSGRSTYRINEDAKNPELKIVYYKHSYTLGEHYNSLHDL

SEQ ID NO: 14737 - DNA, 864 bp, Debaryomyces hansenii CBS767
  CDS (1)..(864)
atgatacaaagacataaggcggaacagaaaaatttggtggccaccattacgggaatgaagaaacaggcgactaagaaaactaggaaggccgtgatgagcaagtgcaacgagctccaggagagtttgaatcaaaagcacaagacagagttgaacgagcttgacgggagcgcaacagatggtgcggaggacgaaataaggcccgaagacttgctcgcgcaaatggaatccaccacgattcacgatgctaacaatgctgaggagaagaaaccgccggctcaaccatccactaaggatgcactccaaactaaaagaaacagacagaaggaacggttagccaaacgaaacgctaaaattgagcagatgagggatgaagcccgaaaggagtcggagaacgatgtcgactaccgaaaaatcgaacaggagtcgatgcaacatataattgaacggggtaatttaacggtttacgaaattaagcccgatgggcattgcttgttcgcttcgatccaagaccagttgacccgcagacactccaacgaagtgtcaatccagcaattgcgtgagactgctgctcgctacatagagactcaccccgatgatttcatcccatttttatttgacgaagccaccaactccttacgagatcttacggactacacgaaagaactaaccaccacggccatgtggggttcggacatggagataatggcattagctaacgaattcgactgtcccatcacagttttgatggccggcggtgctcctataaccatcaacccagagggtgcaaatacggagttaaaattagggttttataagcactcttttggattgggcgaacactacaattccttaagagacatttaa

SEQ ID NO: 14738 - protein, 287 aa, Debaryomyces hansenii CBS767
MIQRHKAEQKNLVATITGMKKQATKKTRKAVMSKCNELQESLNQKHKTELNELDGSATDGAEDEIRPEDLLAQMESTTIHDANNAEEKKPPAQPSTKDALQTKRNRQKERLAKRNAKIEQMRDEARKESENDVDYRKIEQESMQHIIERGNLTVYEIKPDGHCLFASIQDQLTRRHSNEVSIQQLRETAARYIETHPDDFIPFLFDEATNSLRDLTDYTKELTTTAMWGSDMEIMALANEFDCPITVLMAGGAPITINPEGANTELKLGFYKHSFGLGEHYNSLRDI

SEQ ID NO: 14739 - DNA, 918 bp, Yarrowia lipolytica CLIB122
  CDS (1)..(918)
atggaagagctgcttgcacgacatcgaaaggagaagaaagaccttgccggcgagctgacaacgctcaaaaaacaggtttctggcgacaaaaagaagaagaaggaggtcacaagacagtgtgaggacaaggagcgggagctcaaggaacgacatcagcaggagatcgccgagctggaaagcggtggggcagtggatcagatcaaggaggaggttgtagaggacgaaggagaagacgaattctcgcccgaaaaactgctggctcaattggagctcgccaaggagcaggaagaagccaccactaaaaagaagaagggtcctgctgctgaacccgtcggaagccaagccccctcgggccacaagcccaagaaaaaccgacagaaggagcgggcggctcgaaaggctgcggagcaggaggctatcagacaacaggctcttgatgaggcagccctacagcctgatctgcgaaagattgagatggaaaacattgagtcgttgaccaagctcaatggaactacggtccatgatattgtgcccgacggtcactgtctgtactcatccattgccgaccagctggctgttcgacatgaggttgatgttgacgttcagacccttcgaaccaaatgcgctgcggaaatcagacgagatcgaaatagttacatcccgttcctgttcgatgaagcgaccatgtctatcaaggacgtggattcgtacaccaaggagctggaggagactgctatttggggaggagatctggagatcctggccctggctagagtgtatgactgccccatctctgtgctcatgagtggccgccctgttcaccgcgtcaatgaggagggaaataaggaggagctgaaattggtgtattacaagcacagttatggtctcggagagcattacaattcgttgagaggatag

SEQ ID NO: 14740 - protein, 305 aa, Yarrowia lipolytica CLIB122
MEELLARHRKEKKDLAGELTTLKKQVSGDKKKKKEVTRQCEDKERELKERHQQEIAELESGGAVDQIKEEVVEDEGEDEFSPEKLLAQLELAKEQEEATTKKKKGPAAEPVGSQAPSGHKPKKNRQKERAARKAAEQEAIRQQALDEAALQPDLRKIEMENIESLTKLNGTTVHDIVPDGHCLYSSIADQLAVRHEVDVDVQTLRTKCAAEIRRDRNSYIPFLFDEATMSIKDVDSYTKELEETAIWGGDLEILALARVYDCPISVLMSGRPVHRVNEEGNKEELKLVYYKHSYGLGEHYNSLRG

SEQ ID NO: 14741 - DNA, 894 bp, Apis mellifera
  CDS (1)..(894)
atggcagaattagaattaacggaaaaagaattaacacaaagacataaaaaagaacggaaagaactacaagcacaaatacaaatattaaaaaagtcaatttgtaagggtgataagaaaaagaaaaaagaggtaactgaagaaatcaatcgcttagaagaagctttagataaaaaacaagaagaagaattaactatatggaaagttacacatcttaatatcaataatgtggaaaataaaaatatagaaaatagtaatagtaacgaaagcacaaaagataataaacaatatgaacaaccaacacagagagtttcaaaagctcaaaaaaggagagataagaaagcaaatgctgaaagagaacgtaatcagagaatcatagaacaagaagcattaaatgtttttggaaaaagaaatgtagaattgcaaactattaaaaaaattctttgtgaacgtggtctaatgatttatgagattccaagtgatggccattgtttgtataatgctgttgcgcatcaattaaaaattataggagaaacaccattaaattttcatgaactcagatcaaaaactgctatatatttaagagaaaatatgaatgaatttttaccatttatttctaatccagattctgatgattttctctcaccagaacagtatgaaaaatattgtgatgatgtggcagatacaagcgcatggggtggagctattgaattacaagtcctttcacatgtattaaaatgtccaatagaagttattcaggcatcaggtgtaccatatgttattggtgataattataataatgaaaagaaaataatattgacttatcatcgacatatgtatgaattaggtgctcattataattctgttacaaaatatgttaaagaagaagaaagctga

SEQ ID NO: 14742 - protein, 297 aa, Apis mellifera
MAELELTEKELTQRHKKERKELQAQIQILKKSICKGDKKKKKEVTEEINRLEEALDKKQEEELTIWKVTHLNINNVENKNIENSNSNESTKDNKQYEQPTQRVSKAQKRRDKKANAERERNQRIIEQEALNVFGKRNVELQTIKKILCERGLMIYEIPSDGHCLYNAVAHQLKIIGETPLNFHELRSKTAIYLRENMNEFLPFISNPDSDDFLSPEQYEKYCDDVADTSAWGGAIELQVLSHVLKCPIEVIQASGVPYVIGDNYNNEKKIILTYHRHMYELGAHYNSVTKYVKEEES

SEQ ID NO: 14743 - DNA, 1023 bp, Aspergillus nidulans FGSC A4
  CDS (1)..(1023)
atggaagacctcctctcgcgccaccgcaaagaacaaaaagatttacaagcccgcattacccagaagaaaaagtccgcaaccaagaaaacccgccgaggagttaacgatgaatgcgagcggctccaacgagaactctccgagcgccatcaggcagagattgcggaattgaccggcgagacaatacaacatcaaagcgaacctcccgttgacgacttggagaatttaagtttaaatggcgacagtgcgacgaatggagataccaaggacttggggagcacacctaatggcactgcgggagagtcaacgacaccaaattctgcttcagcatcagcatcaatttcatcagggtcatcgtcgccgagcgcaacgagcacaaccactcgtaccaaaaagcccaaccgacaaaaagcgcgcttggccagacgcgccgcagaacaagctgcggccgcagccgcagcctcagaggaagcctctcagctaacgaaccatcgcgggaacgaacaagaggcgatggacgcggccttcaagaaactcaacctgaaagaaatcgaaataaacccagatggccactgcctcttttccgcagtcgcaactcaactagacgaactgggcctaggactgcgccctgatccctcacgcattgtcataggacccacaactcagacgcggatcgatacagtcgcaagtcccaaacacgacgggtatagggccgtgcgcgcggtgacggcggattttattgctgaacacaaagatgaattcgaaccgttcatggaggagcccctggagtcttacacgcggaagattaagctcacagcggaatggggcgggcagttggagctgcaagctattgcgcgggcttatggggtggatatcaatgtcgtgcagggcgatgggaggattgagaaaattgaggctggggatgttgaagaggaggagcgggcgaaacgggttatctggttggcttattataggcatacgtatggacttggggagcattataatgctttgacggcgaaggcttaa

SEQ ID NO: 14744 - protein, 340 aa, Aspergillus nidulans FGSC A4
MEDLLSRHRKEQKDLQARITQKKKSATKKTRRGVNDECERLQRELSERHQAEIAELTGETIQHQSEPPVDDLENLSLNGDSATNGDTKDLGSTPNGTAGESTTPNSASASASISSGSSSPSATSTTTRTKKPNRQKARLARRAAEQAAAAAAASEEASQLTNHRGNEQEAMDAAFKKLNLKEIEINPDGHCLFSAVATQLDELGLGLRPDPSRIVIGPTTQTRIDTVASPKHDGYRAVRAVTADFIAEHKDEFEPFMEEPLESYTRKIKLTAEWGGQLELQAIARAYGVDINVVQGDGRIEKIEAGDVEEEERAKRVIWLAYYRHTYGLGEHYNALTAKA

SEQ ID NO: 14745 - DNA, 972 bp, Candida albicans SC5314
  CDS (1)..(972): transl_table=12
atgtcagaaaacgaacaacaaccaacagtgacgacaagagaagagctacttcaacgtcataaaaaggaatccaaggatttaatagcaacaataactggattgaaaaagcaagctaccaagaaaacccgaaaaagcgttcttaacaaatgtcaagaactacaagataacttggaccagaaacataaacaagaattgaaagagttcgacaacccaaatggtggtcaagacgaagaagaagaagtaacgcctgaacaattgcttgcacaattgtctcttgaaaaggaatcaccagccgcagagataagtaatactgagagtctagaagagggaataaatagtggtagtggtggtaatgctggcgacagcataaaaccacgaaagaaaagaaatagacaacgagaaagattgaatagacgacaggcagaaattgacaaaatcaaacaagaagccgctatagaagcatctaacactgttgattatcgacagattgaaattgaatcaatggacaaattattatccttgaataacttacaatcatttgaaataaaacccgatggtcattgtttatttgcttcgattcaagatcaattgaaagttcgtcatcaagatgttgaacacctagaccacaatggtcctgaagatgttcctctgatcgatcaattgagaaaattagctggtgattatatcaaatctaatcaagaagattttatcccatttttaattgatgaaaatactggtgaattgagggatctcgatgactatatcaatgaattaacaactacagcaatgtgggggtccgatatggaaatcttggctctaagtaaagttttcaattgtccgataagtatctatatggctggagcatcgactttaaccatcaatgagcatggtcaattgccagaattgaaattagggtattataaacattcatttggtttaggtgaacattacaattccttaagagatctatag

SEQ ID NO: 14746 - protein, 323 aa, Candida albicans SC5314
MSENEQQPTVTTREELLQRHKKESKDLIATITGLKKQATKKTRKSVLNKCQELQDNLDQKHKQELKEFDNPNGGQDEEEEVTPEQLLAQLSLEKESPAAEISNTESLEEGINSGSGGNAGDSIKPRKKRNRQRERLNRRQAEIDKIKQEAAIEASNTVDYRQIEIESMDKLLSLNNLQSFEIKPDGHCLFASIQDQLKVRHQDVEHLDHNGPEDVPSIDQLRKLAGDYIKSNQEDFIPFLIDENTGELRDLDDYINELTTTAMWGSDMEILALSKVFNCPISIYMAGASTLTINEHGQLPELKLGYYKHSFGLGEHYNSLRDL

SEQ ID NO: 14747 - DNA, 864 bp, Tribolium castaneum
  CDS (1)..(864)
atggaggtggaaatgagcgaagaagagctcctcaagaaacacaagcaggaacgcaaagacctccaggcgaaaatccagtcgttgaaaaaaagtgtgacaaaaggcgataaaaagaagaaaaaagaagtgactgaagaaatcgcccgccttgagcaggaacttgaaactaaacactcctccgaacttggatcattaaaaccagtcactgaggaacaaatccctgaagattcggagactgctgatgatcccgaagcacccaatgaagacaatcaaccggttcgagtgtcgcgagccggtcgccgacgcaataaaaaggctcaagaggaacgtgaacgtgagaaacgcattcaggagcaagccgagaagaataaagaggggcccagaatgacggaaatgaacgcgattaaagaagttttggccaaaatggggctacagttgtttaatattcctgccgatgggaattgtctatattgtgcggtcaatcatcagttggtctcgacggggagggaagcttacaccgtgccgaaattacgcaaattaacagcagagtttatgaaagagaataaagaagagtttttgccttttatgtataatgagtcggatgaaacagttagtgaagagtattttgaatcgtattgcaaggaagtggccacgaccaagctatgggggggccaactggaactcagggcgttatctaatgttttaaagtgccccatcaaggttatacaagcaaatgggcccccaacgttacagggggagaatttcgaggggccggagttaattttagcctaccacagacatttataccggttaggtgaacactacaattccactattgtgctgaaagatgaagaagaaaaataa

SEQ ID NO: 14748 - protein, 287 aa, Tribolium castaneum
MEVEMSEEELLKKHKQERKDLQAKIQSLKKSVTKGDKKKKKEVTEEIARLEQELETKHSSELGSLKPVTEEQIPEDSETADDPEAPNEDNQPVRVSRAGRRRNKKAQEEREREKRIQEQAEKNKEGPRMTEMNAIKEVLAKMGLQLFNIPADGNCLYCAVNHQLVSTGREAYTVPKLRKLTAEFMKENKEEFLPFMYNESDETVSEEYFESYCKEVATTKLWGGQLELRALSNVLKCPIKVIQANGPPTLQGENFEGPELILAYHRHLYRLGEHYNSTIVLKDEEEK

SEQ ID NO: 14749 - DNA, 1005 bp, Aspergillus niger
  CDS (1)..(1005)
atggaggagctacaagctaaacaccgcaaggaacagaaagatctacaggctcgaatcactcagaagaagaagtctgccacgaagaagactcgcaaaggaatcaacgatgattgcgagaggctccagagagagctctctgagcggcaacaagccgagatcgcgcaattaaatggcgaatcggaccagcctgtggatggcatcgaagacctcagtttgaacgaatccagtgaaggggaccgaaacgttgatgaggctggtgactcaccggatcagcaaaatgcagatagcccatctgagacaacaccatcgtcgccccagagctctacccccgcaaccccgcaaccctccggcccccgtcctaagaagcccaatcgccagaaggcacgtttagcacgtcgtgcagcggaacaagcagcgcagtcagcaattgctgcggaggaggccgcaaaccaaaccgatcatcgtgggaatgagaaagaggtcatggagggcgtgttcaagcgcttacagttgaaggaggttgacataaacccggatggtcactgtctgttctctgccatcgcatgccagttggacgagcaaggcattggtctgaaacctgacccgaagagaatgatcctccagcctcccactcaatcccgcattgataccgtggcttcgcccaaacatgacgggtatcgggcggttagagctgtggcggcggacttcattagcgaccacaaggacgactttgcaccattcatggaggagcctttggaccaatataccaggaaggtcaagctgacagccgaatggggcggacaacttgaattgcaagcgatcgccagggcatatggcgttgagatcaatgtcatccaaggcgatgggagaatcgaaaagattgaaccgggcgaggtcgatgaaccaggcgacgaagagggaagcaagcgggtcatctggttggcttactacagacacacatacgggcttggggagcattacaacgcactctccaaacatacatag

SEQ ID NO: 14750 - protein, 334 aa, Aspergillus niger
MEELQAKHRKEQKDLQARITQKKKSATKKTRKGINDDCERLQRELSERQQAEIAQLNGESDQPVDGIEDLSLNESSEGDRNVDEAGDSPDQQNADSPSETTPSSPQSSTPATPQPSGPRPKKPNRQKARLARRAAEQAAQSAIAAEEAANQTDHRGNEKEVMEGVFKRLQLKEVDINPDGHCLFSAIACQLDEQGIGLKPDPKRMILQPPTQSRIDTVASPKHDGYRAVRAVAADFISDHKDDFAPFMEEPLDQYTRKVKLTAEWGGQLELQAIARAYGVEINVIQGDGRIEKIEPGEVDEPGDEEGSKRVIWLAYYRHTYGLGEHYNALSKHT

SEQ ID NO: 14751 - DNA, 984 bp, Beta vulgaris
  CDS (1)..(984)
atggagcatagctctgagatagaagttttggtagctcaggaaaattttagtgatgcatccgtgaagaaacaagaaacacgtgatgaaatgctttcaaggcacaggaaagaaattggccagctacagaacaaagagattgagatgaaaaaagctgcagctaaaggtagcaaagcagaacagaaagcaaagaagaagcaagttgaggaagaaatagccaaattgtccgcaaagctcaaagaaaagcatgcacaggaactttcatcactgggctacattagtagtagtaaggttgatggaaatgacaggggaaaccttgacactcttgttaaagcgatcgctggagtatctgttgcttctgcagctaataataatcacaagcccagtaaaagcgtaaagaggcgtgagaaaagagcacaggaagaagctgcaagggagcagagaataaaagaggaacagagcagtatcgttagtgatagaacagttgagaatgagttactagagaagaaactaggcccacttggattgaccatttatgaggttaaaccagatggccattgcctttaccgagctgttgaggatcagttagttcacttgtccagaggttcttcaccttacaatttccagcagcttcgagagatggtggcttcttatatgcgtgatcatgcttttgactttctcccatttttcacatcagagaatgcggttgaaggagagtcagacgattctctatcgcagagatttgaaagctactgcaaagaggtggaatcaacagcagcttggggtgggcaattggagcttggcgctttgacacattgcttgaagaaacatatcatgatattttcagggtccttccctgatgttgaaatgggaaaggagtataagattgatgatgatgcttcattgagttcttgtataaagctatcatatcacagacatgcctttggtcttggtgagcattataattctgtggttccgaatttgtaa

SEQ ID NO: 14752 - protein, 327 aa, Beta vulgaris
MEHSSEIEVLVAQENFSDASVKKQETRDEMLSRHRKEIGQLQNKEIEMKKAAAKGSKAEQKAKKKQVEEEIAKLSAKLKEKHAQELSSLGYISSSKVDGNDRGNLDTLVKAIAGVSVASAANNNHKPSKSVKRREKRAQEEAAREQRIKEEQSSIVSDRTVENELLEKKLGPLGLTIYEVKPDGHCLYRAVEDQLVHLSRGSSPYNFQQLREMVASYMRDHAFDFLPFFTSENAVEGESDDSLSQRFESYCKEVESTAAWGGQLELGALTHCLKKHIMIFSGSFPDVEMGKEYKIDDDASLSSCIKLSYHRHAFGLGEHYNSVVPNL

SEQ ID NO: 14753 - DNA, 939 bp, Drosophila melanogaster
  CDS (1)..(939)
atgtgtgacggcgatgtggcaattgcggagctggaatcccgtctggatgaggtcagtctggaggacataggtgccagacatcgtcgcgagcgcaaggatttgcaggccaagctgcaggccatgaagaagaatgcgccgaaaaataataaaaacaagcggaaggagttcctggaggagatggctcgcctggagggagagctggagcagcgccacaaggcggaactgaaggcagcggaagccatggaggcaccggtgttggtggaaccggtcgtcaaagagccagtggaaaagccagaaactgaagtgacagacgatgatggaatcgaggaaaaagaggaacagctggcgcccaatcagcgtgtttccaaggcacagaaacgccgggacaagaaggcaaaggaggcacgtgcacgagaggcagagatcaagacggagctgcaaaatgctgccaatcagccaacgcccaagttaatcgaactgcagcagattacagcaaagctatcccaacgccaattatcccttcacaatataccctccgatggcgactgcttatatcagtccatcagacaccaacttatcgtaaatgctcttccaggtcacagtgttcaggagttgcgggaggaaactgccaattatgtgcgtgctcacaaggactcgcttatctcatacatgatccacccggaaacaggagacattctgaacgaccaacaattcgaacaatactgccacgacatagcaaaaactcacgcttggggtggccacatagaactgaaggccatctcatcgctactccgggtgcccattgaagttatccaagcggaaggagcaccgacgctcctggggcaagaggaattcggtggatcaccgctgatcatctgctaccaccgccacatataccaattgggtgcccactacaattccacggtgccagcagcctaa

SEQ ID NO: 14754 - protein, 312 aa, Drosophila melanogaster
MCDGDVAIAELESRLDEVSLEDIGARHRRERKDLQAKLQAMKKNAPKNNKNKRKEFLEEMARLEGELEQRHKAELKAAEAMEAPVLVEPVVKEPVEKPETEVTDDDGIEEKEEQLAPNQRVSKAQKRRDKKAKEARAREAEIKTELQNAANQPTPKLIELQQITAKLSQRQLSLHNIPSDGDCLYQSIRHQLIVNALPGHSVQELREETANYVRAHKDSLISYMIHPETGDILNDQQFEQYCHDIAKTHAWGGHIELKAISSLLRVPIEVIQAEGAPTLLGQEEFGGSPLIICYHRHIYQLGAHYNSTVPAA

SEQ ID NO: 14755 - DNA, 1035 bp, Oryza sativa
  CDS (46)..(1029)
tttttctttttccttcgcctgaactgagttttgcatcgtttgccaatggacgaaaccctagccgacgaatccgccggcggcggcggcggcggcggcggcgaggcagccgcggcggagccagcgcaggaatcgcagcaagagacgctcgaggaggtgctctcgaggcataggaaagagaaatccaaactccaggataaggaaacaagcctcaagaaagcagccgctaaaggcagcaaagctgagcagaaggccaagaagaagcaggtagaggaggagatttcacgcctctcagctgagttagaggcgaaacatgccgcagagctcgctacttttgggtacaaatcctcaggcagctcagaaaaggggaacatggacaccttagtaaaggctatagctggtgtttctgtgaccagcaacgcggattccgcgaagcctagcaagggtgcacggcgtcgagagaagaaggcaaaggaagaggccgctagagagcagcggattcaagaagagcaaaacaatcttgtcagtgaccgcatgatagaaaatgaaaagcttgagaagaagcttgagcccatgggactgaccattcaggagataaagccagatggccactgcctctaccgtgctgttgagaaccagctgtcactctattccagagaaaccacacaatacaattaccaggagctgcggcaaatgactgccaattatatgaaagagcatgctgcagattttctcccatttttcctatcagagggcaaggtcgagtctggaccagatcccttggagagcttcaagaggtactgtgaggaggttgagtcaactgctgcttggggtgggcaacttgagcttggtgctctaacccactgcctgaagaagcacattgttgtatactcgggctcatttccagatgtggaaatgggcaaagaatacaaattggattcaggtggtaaagatggccctagcattaggttgtcctatcacagacatgcctatggtcttggtgagcactacaactcggtggttcctgcttagttatct

SEQ ID NO: 14756 - protein, 327 aa, Oryza sativa
MDETLADESAGGGGGGGGEAAAAEPAQESQQETLEEVLSRHRKEKSKLQDKETSLKKAAAKGSKAEQKAKKKQVEEEISRLSAELEAKHAAELATFGYKSSGSSEKGNMDTLVKAIAGVSVTSNADSAKPSKGARRREKKAKEEAAREQRIQEEQNNLVSDRMIENEKLEKKLEPMGLTIQEIKPDGHCLYRAVENQLSLYSRETTQYNYQELRQMTANYMKEHAADFLPFFLSEGKVESGPDPLESFKRYCEEVESTAAWGGQLELGALTHCLKKHIVVYSGSFPDVEMGKEYKLDSGGKDGPSIRLSYHRHAYGLGEHYNSVVPA

SEQ ID NO: 14757 - DNA, 960 bp, Brassica napus
  CDS (1)..(960)
atgtatcccgaggatgaaaccaccatggagcaacatgaaacggtcgatgagatgcttgctaggcacaggcaagagataaaacaactacagaacaaggagacggagttgaaaaaggctgctgccaaaggaagcaaagccgagcagaaagctaagaagaagcaagtcgaagaagacatttcaaaactctccaccaagctcaaggagaaacagctgaaagagctcgcctcccaaggtttcagcagcactagtagcagcagcggcaacatctccaaggacgagacgaatgagaagaaaggagatatcgacactttggtgagagccatcgccggagtctcaatcactgctcagcaagaacactcaaagccgagcaagagcgtgaagagacgcgagaaacgagccaaagaagaggcggatagagagcagagaatcaaagaagagcagagcaacgtgacgagtgatcgtatggtcgagaaccaaaagctagagaagaagcttaaacccctggggctaaccgtcagcgagatcaaaccagacgggcactgcctttacagagcagtagaaaaccagctcgccaatctctcgggcggtgcgtctccttacacgtaccagaagctaagagaaatggctgctgcgtacatgagagagcacaaaacagacttcatcccgttcttcttatcagaaaccgagtctgagtccgagtctgcggaggagcggtttgagaaatactgcagagaagtcgagtcaacagcagcttggggaggtcagctggagctaggagcgttgacgcattgcttgaggaaacacataatggtgttctcaggatcgtttccggatgttgaaatgggcaaagagtataaatcaggcaatggctcaagcctcaagctatcgtatcacaggcatgcttttgggctcggtgaacattataactccgtcgtgctcgtcaacaacatcaccgcatga

SEQ ID NO: 14758 - protein, 319 aa, Brassica napus
MYPEDETTMEQHETVDEMLARHRQEIKQLQNKETELKKAAAKGSKAEQKAKKKQVEEDISKLSTKLKEKQLKELASQGFSSTSSSSGNISKDETNEKKGDIDTLVRAIAGVSITAQQEHSKPSKSVKRREKRAKEEADREQRIKEEQSNVTSDRMVENQKLEKKLKPLGLTVSEIKPDGHCLYRAVENQLANLSGGASPYTYQKLREMAAAYMREHKTDFIPFFLSETESESESAEERFEKYCREVESTAAWGGQLELGALTHCLRKHIMVFSGSFPDVEMGKEYKSGNGSSLKLSYHRHAFGLGEHYNSVVLVNNITA

SEQ ID NO: 14759 - DNA, 972 bp, Brassica napus
  CDS (1)..(972)
atggcagagactaatgtatccgaggatgaaaccaccatggagcaacatgaaacggtcgatgaggtgcttgctaggcacaggcaagagataaaacaactacagaacaaggagacggagttgaaaaaggctgctgccaaaggaagcaaagccgagcagaaagctaagaagaagcaagtcgaagaagacatttcaaaactctccgccaagctcaaggagaaacagctgaaagagctcgcctcccaaggtttcagcagcactagtagcagcagcggcaacatctccaaggacgagacgaatgagaagaaaggagatatcgacactttggtgagagccatcgccggagtctcaatcactgctcagcaagaacactcaaagccgagcaagagcgtgaagagacgcgagaaacgagccaaagaagaggcggatagagagcagagaatcaaagaagagcagagcaacgtgacgagtgatcgtatggtcgagaaccaaaagctagagaagaagcttaaacccctggggctaaccgtcagcgagatcaaaccggacgggcactgcctttaccgagctgtagaaagtcagctcgccaatctctcgggctgtgcgtctccttacacgtaccagaagctaagagaaatggctgctgcgtacatgagagatcacaaaacagacttcatcccgttcttcttatcagaaaccgagtctgagtccgagtctgcggaggagcggtttgagaaatactgcagagaagtcgagtcaacggcagcttggggcggtcagctggagctaggggcgttgacgcattgcttgaggaaacacataatggtgttctcaggatcgtttcctgatgttgaaatgggcaaagagtataaatcaggggatggctcgagcctcatgttgtcgtatcacaggcatgcttttgggctcggtgaacattataactccgttgtggtcgtcaacaacatcaccgcatga

SEQ ID NO: 14760 - protein, 323 aa, Brassica napus
MAETNVSEDETTMEQHETVDEVLARHRQEIKQLQNKETELKKAAAKGSKAEQKAKKKQVEEDISKLSAKLKEKQLKELASQGFSSTSSSSGNISKDETNEKKGDIDTLVRAIAGVSITAQQEHSKPSKSVKRREKRAKEEADREQRIKEEQSNVTSDRMVENQKLEKKLKPLGLTVSEIKPDGHCLYRAVESQLANLSGCASPYTYQKLREMAAAYMRDHKTDFIPFFLSETESESESAEERFEKYCREVESTAAWGGQLELGALTHCLRKHIMVFSGSFPDVEMGKEYKSGDGSSLMLSYHRHAFGLGEHYNSVVVVNNITA

SEQ ID NO: 14761 - DNA, 978 bp, Zea mays
  CDS (1)..(978)
atggaggaaaccctagccgtcgaatccgccgccggcgagacggcggccgcgcaggcgcccgagctgaacgaagagacgctcgaggaggtgctctcgaggcataggaaagagaaatcgaaactccaggataaggaaacgagtctcaagaaagccgctgcaaaaggaagcaaagctgagcagaaggcgaagaaaaaacaggtagaggaagagatcacacgcctctcatctgagttagaggcgaaccatgctgcagagcttgcttcctttgggtacaaaccctctggcagctcagagaagggaaacctcgacaacttagtgaaggccatagccggtgtttcagtttccagcaattcggattcagcaaagctcagcaagggagcacgccggcgagagaagaaggcgaaggaggaagctgcccgagagcagcggatccaagaggaacaaagcaatctcgtgagcgaccgcatgctagaaaacgagaagctcgaaaggaagctcgagcccttggggctgaccgtccaagagataaagccggacgggcactgcctgtaccgagcagttgaaaaccagctgtcgctccactccaatggcgctgcacggtacagttaccaggacctacggcagatgacggccaagtacatgagggagcacgccgccaatttccttcccttctacttagcggaaggcaaggccgatgttggaccagatcccatggcgagcttcgagaggtactgcgaggagatggagtccaccgcagcttggggcgggcagctcgaactcggcgcgctgacccactgcctgaagaaacatatcgtcgtctactcaggctccttcccggacgtggagatgggtaaggagtacaaatctggacctggaggtagtggcgccggcggtgcgagcatcaggctgtcgttccacaggcacgcctatggtctcggcgagcactacaactcggtggttccagccggatcatcctag

SEQ ID NO: 14762 - protein, 325 aa, Zea mays
MEETLAVESAAGETAAAQAPELNEETLEEVLSRHRKEKSKLQDKETSLKKAAAKGSKAEQKAKKKQVEEEITRLSSELEANHAAELASFGYKPSGSSEKGNLDNLVKAIAGVSVSSNSDSAKLSKGARRREKKAKEEAAREQRIQEEQSNLVSDRMLENEKLERKLEPLGLTVQEIKPDGHCLYRAVENQLSLHSNGAARYSYQDLRQMTAKYMREHAANFLPFYLAEGKADVGPDPMASFERYCEEMESTAAWGGQLELGALTHCLKKHIVVYSGSFPDVEMGKEYKSGPGGSGAGGASIRLSFHRHAYGLGEHYNSVVPAGSS

SEQ ID NO: 14763 - DNA, 23 bp, Artificial sequence
  primer
atgaccggcatggaatcaggaga

SEQ ID NO: 14764 - DNA, 27 bp, Artificial sequence
  primer
tcaagaatcatgcaatgaattataatg

SEQ ID NO: 14765 - protein, 352 aa, Artificial sequence
  consensus sequence
  Variant (2)..(3): Xaa in position 2 to 3 is any amino acid
  Variant (5)..(7): Xaa in position 5 to 7 is any amino acid
  Variant (9)..(15): Xaa in position 9 to 15 is any amino acid
  Variant (18)..(20): Xaa in position 18 to 20 is any amino acid
  Variant (21)..(27): Xaa in position 21 to 27 is any or no amino acid
  Variant (29)..(31): Xaa in position 29 to 31 is any amino acid
  Variant (33)..(40): Xaa in position 33 to 40 is any amino acid
  Variant (42)..(44): Xaa in position 42 to 44 is any amino acid
  Variant (46)..(51): Xaa in position 46 to 51 is any amino acid
  Variant (53)..(96): Xaa in position 53 to 96 is any amino acid
  Variant (97)..(139): Xaa in position 97 to 139 is any or no amino acid
  Variant (141)..(163): Xaa in position 141 to 163 is any amino acid
  Variant (164)..(166): Xaa in position 164 to 166 is any or no amino acid
  Variant (168)..(179): Xaa in position 168 to 179 is any amino acid
  Variant (181)..(184): Xaa in position 181 to 184 is any amino acid
  Variant (186)..(187): Xaa in position 186 to 187 is any amino acid
  Variant (193)..(198): Xaa in position 193 to 198 is any amino acid
  Variant (201)..(211): Xaa in position 201 to 211 is any amino acid
  Variant (212)..(237): Xaa in position 212 to 237 is any or no amino acid
  Variant (240)..(252): Xaa in position 240 to 252 is any amino acid
  Variant (254)..(254): Xaa in position 254 is any amino acid
  Variant (256)..(263): Xaa in position 256 to 263 is any amino acid
  Variant (264)..(277): Xaa in position 264 to 277 is any or no amino acid
  Variant (279)..(284): Xaa in position 279 to 284 is any amino acid
  Variant (286)..(287): Xaa in position 286 to 287 is any amino acid
  Variant (290)..(292): Xaa in position 290 to 292 is any amino acid
  Variant (294)..(295): Xaa in position 294 to 295 is any amino acid
  Variant (297)..(304): Xaa in position 297 to 304 is any amino acid
  Variant (306)..(306): Xaa in position 306 is any amino acid
  Variant (308)..(327): Xaa in position 308 to 327 is any amino acid
  Variant (328)..(336): Xaa in position 328 to 336 is any or no amino acid
  Variant (338)..(338): Xaa in position 338 is any amino acid
  Variant (340)..(341): Xaa in position 340 to 341 is any amino acid
  Variant (343)..(345): Xaa in position 343 to 345 is any amino acid
  Variant (348)..(348): Xaa in position 348 is any amino acid
HXXEXXXLXXXXXXXKKXXXXXXXXXXKXXXKXXXXXXXXLXXXLXXXXXXEXXXXXXXXXXXXXXXXXXXXXXXXXXXXXXXXXXXXXXXXXXXXXXXXXXXXXXXXXXXXXXXXXXXXXXXXXXXXXXXXXXXXXXXAXXXXXXXXXXXXXXXXXXXXXXXXXXEXXXXXXXXXXXXLXXXXIXXDGHCLXXXXXXQLXXXXXXXXXXXXXXXXXXXXXXXXXXXXXXXXXXXXXLRXXXXXXXXXXXXXFXPXXXXXXXXXXXXXXXXXXXXXXYXXXXXXTXXWGXXXEXXAXXXXXXXXIXVXXXXXXXXXXXXXXXXXXXXXXXXXXXXXLXYXXHXXXLGXHYNS

SEQ ID NO: 14766 - protein, 42 aa, Artificial sequence
  protein pattern
  Variant (2)..(4): Xaa in position 2 to 4 is any amino acid
  Variant (5)..(5): Xaa in position 5 is Ile, Leu, Met or Val
  Variant (6)..(7): Xaa in position 6 to 7 is any amino acid
  Variant (9)..(9): Xaa in position 9 is any or no amino acid
  Variant (11)..(11): Xaa in position 11 is any or no amino acid
  Variant (14)..(14): Xaa in position 14 is Gly or Ser
  Variant (15)..(16): Xaa in position 15 to 16 is any amino acid
  Variant (18)..(18): Xaa in position 18 is Ile, Leu or Met
  Variant (19)..(19): Xaa in position 19 is any amino acid
  Variant (21)..(21): Xaa in position 21 is Ile or Leu
  Variant (22)..(22): Xaa in position 22 is Ala, Ser or Thr
  Variant (23)..(28): Xaa in position 23 to 28 is any amino acid
  Variant (30)..(30): Xaa in position 30 is any amino acid
  Variant (31)..(31): Xaa in position 31 is Ile or Val
  Variant (32)..(33): Xaa in position 32 to 33 is any amino acid
  Variant (34)..(34): Xaa in position 34 is Ala, Asp, Gly or Ser
  Variant (35)..(35): Xaa in position 35 is Ala, Asp, Glu, Gly or Ser
  Variant (36)..(41): Xaa in position 36 to 41 is any amino acid
  Variant (42)..(42): Xaa in position 42 is Glu, Gly or Asn
YXXXXXXTXAXWGXXXEXXAXXXXXXXXIXXXXXXXXXXXXX

SEQ ID NO: 14767 - protein, 16 aa, Artificial sequence
  protein pattern
  Variant (2)..(2): Xaa in position 2 is Ala, Gly, Ser, Thr or Val
  Variant (3)..(3): Xaa in position 3 is Phe or Tyr
  Variant (4)..(4): Xaa in position 4 is His or Tyr
  Variant (5)..(5): Xaa in position 5 is His, Lys or Arg
  Variant (7)..(7): Xaa in position 7 is any amino acid
  Variant (8)..(8): Xaa in position 8 is Phe or Tyr
  Variant (9)..(9): Xaa in position 9 is any amino acid
  Variant (12)..(12): Xaa in position 12 is Ala or Glu
  Variant (16)..(16): Xaa in position 16 is Ala or Ser
LXXXXHXXXLGXHYNX

SEQ ID NO: 14768 - protein, 25 aa, Artificial sequence
  protein pattern
  Variant (2)..(2): Xaa in position 2 is Lys or Arg
  Variant (3)..(3): Xaa in position 3 is any amino acid
  Variant (5)..(5): Xaa in position 5 is any amino acid
  Variant (6)..(6): Xaa in position 6 is any or no amino acid
  Variant (8)..(8): Xaa in position 8 is any or no amino acid
  Variant (10)..(10): Xaa in position 10 is any amino acid
  Variant (11)..(11): Xaa in position 11 is Ala, Asp, Gly or Asn
  Variant (12)..(13): Xaa in position 12 to 13 is any amino acid
  Variant (14)..(14): Xaa in position 14 is Gln or Thr
  Variant (15)..(16): Xaa in position 15 to 16 is any amino acid
  Variant (19)..(19): Xaa in position 19 is Ala, Asn, Gln or Ser
  Variant (20)..(20): Xaa in position 20 is Ala, Ile or Val
  Variant (21)..(21): Xaa in position 21 is any amino acid
  Variant (23)..(24): Xaa in position 23 to 24 is any amino acid
  Variant (25)..(25): Xaa in position 25 is Lys or Arg
HXXEXXKXLXXXXXXXKKXXXKXXX

SEQ ID NO: 14769 - DNA, 816 bp, Saccharomyces cerevisiae
  CDS (1)..(816)
atgaaacgtttcaatgttttaaaatatatcagaacaacaaaagcaaatatacaaaccatcgcaatgcctttgaccacaaaacctttatctttgaaaatcaacgccgctctattcgatgttgacggtaccatcatcatctctcaaccagccattgctgctttctggagagatttcggtaaagacaagccttacttcgatgccgaacacgttattcacatctctcacggttggagaacttacgatgccattgccaagttcgctccagactttgctgatgaagaatacgttaacaagctagaaggtgaaatcccagaaaagtacggtgaacactccatcgaagttccaggtgctgtcaagttgtgtaatgctttgaacgccttgccaaaggaaaaatgggctgtcgccacctctggtacccgtgacatggccaagaaatggttcgacattttgaagatcaagagaccagaatacttcatcaccgccaatgatgtcaagcaaggtaagcctcacccagaaccatacttaaagggtagaaacggtttgggtttcccaattaatgaacaagacccatccaaatctaaggttgttgtctttgaagacgcaccagctggtattgctgctggtaaggctgctggctgtaaaatcgttggtattgctaccactttcgatttggacttcttgaaggaaaagggttgtgacatcattgtcaagaaccacgaatctatcagagtcggtgaatacaacgctgaaaccgatgaagtcgaattgatctttgatgactacttatacgctaaggatgacttgttgaaatggtaa

SEQ ID NO: 14770 - protein, 271 aa, Saccharomyces cerevisiae
MKRFNVLKYIRTTKANIQTIAMPLTTKPLSLKINAALFDVDGTIIISQPAIAAFWRDFGKDKPYFDAEHVIHISHGWRTYDAIAKFAPDFADEEYVNKLEGEIPEKYGEHSIEVPGAVKLCNALNALPKEKWAVATSGTRDMAKKWFDILKIKRPEYFITANDVKQGKPHPEPYLKGRNGLGFPINEQDPSKSKVVVFEDAPAGIAAGKAAGCKIVGIATTFDLDFLKEKGCDIIVKNHESIRVGEYNAETDEVELIFDDYLYAKDDLLKW

SEQ ID NO: 14771 - DNA, 705 bp, Glycine max
  CDS (1)..(705)
atgagttctctcaccagtcttgctccactcgaagcagtgctctttgatgttgatggaactctctgtgattctgatccactccactattatgctttgcgtgaaatgctccaagagcttggttttaatggaggtgctcctataacagaggaattctttgttgagacattttctggcaagcacagtgatgatactgccttggttgtctttcctggtgatctggaacgaggtttaaagtttgtagaagataaggaagccatgttccggagattggcttcagagcaactgaatcccttgaaaggccttgataaagtgaggaaatgggttgaaaaccatggtctgaagagagctgcagtcaccaatgctccaaggaaaaatgcagaactcattatctcaaaacttggtctaacagatttctttgatgctgttattattggtgatgaatgtgaacatgccaaacctcatccagaaccctacttgaaagcacttgaagttctgaaggcatcaaaggatcatgcatttgtatttgaggattctgcttcagggataaaagctggagtggcagctgggatgcctgttataggtttagctacaagaaacccggagaatttactgatggaagcaaagcctgcctttctgattaaggattatgaggattcaaaattgtgggcagctttggaagaacttgacaaggctggtgcacgttaa

SEQ ID NO: 14772 - protein, 234 aa, Glycine max
MSSLTSLAPLEAVLFDVDGTLCDSDPLHYYALREMLQELGFNGGAPITEEFFVETFSGKHSDDTALVVFPGDLERGLKFVEDKEAMFRRLASEQLNPLKGLDKVRKWVENHGLKRAAVTNAPRKNAELIISKLGLTDFFDAVIIGDECEHAKPHPEPYLKALEVLKASKDHAFVFEDSASGIKAGVAAGMPVIGLATRNPENLLMEAKPAFLIKDYEDSKLWAALEELDKAGAR

SEQ ID NO: 14773 - DNA, 651 bp, Streptomyces coelicolor A3(2)
  CDS (1)..(651): transl_table=11
atgaagctccacgcacaagccctcctgttcgacaacgacggcaccctcgtctcctccctggaatccgtccgccgctgctggacgcgctgggccgtcgagtacgggatcaccgccgagcagttcgggcaggtggaactgcacggacggccggccgccgagatagccgccgacctgctgcccaccgcgagggtcgccgaggcggtcgcgcggatcgaacagctggaggtcgaggacgtgccgggcgggggcgtgcgcctgctgcccggcacccgcgacttcctcgacgcgctcccggccgaccgctgggccgtcgtcacctccgccacccgccgcctggccgaggcccgcctcgacgccgtcggcatcctgcccaagaccctcgtggccgccgatgacatcacccgcggcaagcccgaccccgagccctatctgctcggcgcccgcgccctgggcgtcgacccggccgactgcgtcgtcttcgaggacgcccccgccgggctccaggccggccgggccgccgggatgcggaccgtggcgttggccacaacacaccgagccgacgaactcaacgccgacctcgtcgtcaccgacctctcggccttgtcggcactggccaccgagggcggagtcgagatcaccgtccggggctga

SEQ ID NO: 14774 - protein, 216 aa, Streptomyces coelicolor A3(2)
MKLHAQALLFDNDGTLVSSLESVRRCWTRWAVEYGITAEQFGQVELHGRPAAEIAADLLPTARVAEAVARIEQLEVEDVPGGGVRLLPGTRDFLDALPADRWAVVTSATRRLAEARLDAVGILPKTLVAADDITRGKPDPEPYLLGARALGVDPADCVVFEDAPAGLQAGRAAGMRTVALATTHRADELNADLVVTDLSALSALATEGGVEITVRG

SEQ ID NO: 14775 - DNA, 735 bp, Magnaporthe grisea 70-15
  CDS (1)..(735)
atgggaagcatacaagtacccgagggcacctttaccgccccgccgcagcaggtttccctcgacggctttctcttcgacatggacggcaccatcatagactcgactagggccattgagatgcactgggcatcggttggcaaagagatcggagtggacccggagctcatcttgaagacctcacacgggcgtcgtagcatcgacacgctcaagatatattgcccagaaaaggcaaccattgagtacgcctcggagatggagggccgcctacccaagctctacagcaaagaggcagaggagatccccggcgcccgctcgctcctcgactccataatcgccgccaaggccgccccctgggccatcgtgacgtcgggaacaaagccgctggtcaacggctggctcgaggctctgaacctgccgcggcccgcgcacatgatcacggccgagtcggtcgagaacggcaagcccgatcccacctgctacctcatgggcctcgacgggctcggcctccgcgatcgcgccgctgacgtcctcgtgctcgaggacagccccgccgggatcctggccggcaaggcggccgggtgcaaagtgctcgggctggtcaccagccacaccgtcgagcaggtggtgggcgccggcccggactgggtggtcagggatttgtcgtctgtgaggctcgtcggcgctgagggtggaagggttactttggagattgtggatgcattggagtccaagtag

SEQ ID NO: 14776 - protein, 244 aa, Magnaporthe grisea 70-15
MGSIQVPEGTFTAPPQQVSLDGFLFDMDGTIIDSTRAIEMHWASVGKEIGVDPELILKTSHGRRSIDTLKIYCPEKATIEYASEMEGRLPKLYSKEAEEIPGARSLLDSIIAAKAAPWAIVTSGTKPLVNGWLEALNLPRPAHMITAESVENGKPDPTCYLMGLDGLGLRDRAADVLVLEDSPAGILAGKAAGCKVLGLVTSHTVEQVVGAGPDWVVRDLSSVRLVGAEGGRVTLEIVDALESK

SEQ ID NO: 14777 - DNA, 756 bp, Candida glabrata CBS 138
  CDS (1)..(756)
atgacagtcaagaaggacaaccagttcagtgtagatgtgtgtctgtttgatctagacggcactatcgtaagtaccacagtggcagctgagtctgcatggaggatgctatgtgcgaaagaaggagttgatcccgaggagctattcaaattctctcatggtgtcagaacatctgaggtgcttgctaagtttttcccaaacatcgacaacacagacaataagatgactagagagctggagttgtctatggcaaacaatttcttggatacggtgagcttgattcccggtgccaaagaccttctgttgacccttgacaaggatacagcacgccaaggagccaagttcaacgaaaggaagtgggcaattgtcacttcgggttccccagatttggccttttcttggttcaagaccatcttgaaagaggttggtaagccagacgtgtttattactgcttttgatgtgacaaaaggtaagcccgacccagaagggtacgccaaggccaagaagcttctgtgtgaaagactgcaatacgagagcgctagtgcgacatcagtggtctttgaagatgcaccagctggtataaaagcaggtaaggcaatgggcgcaataactgtagggattacgtctacttacgatctgcaaacgttgattgatgctggtgctgactatgtggttaaggacttgactcaagttgaagttttgaagaatacagaaggtgatcaaattacattagagattgaaaatcctctaaatcaatga

SEQ ID NO: 14778 - protein, 251 aa, Candida glabrata CBS 138
MTVKKDNQFSVDVCLFDLDGTIVSTTVAAESAWRMLCAKEGVDPEELFKFSHGVRTSEVLAKFFPNIDNTDNKMTRELELSMANNFLDTVSLIPGAKDLLLTLDKDTARQGAKFNERKWAIVTSGSPDLAFSWFKTILKEVGKPDVFITAFDVTKGKPDPEGYAKAKKLLCERLQYESASATSVVFEDAPAGIKAGKAMGAITVGITSTYDLQTLIDAGADYVVKDLTQVEVLKNTEGDQITLEIENPLNQ

SEQ ID NO: 14779 - DNA, 744 bp, Candida glabrata CBS 138
  CDS (1)..(744)
atgccagaaccaattactttgagagttaacgctgctcttttcgatgtcgatggtaccatcatcatttcccagccagctctagctgcattctggagagattttggtaaggataagccatacttcgatgctgagcatgtgatccatgtttcccatggttggagaacttacgatgctattgctaagtttgctccagacttcgccgatgaggaaaccgtcacaaagctggaaggtgaaatccctgataagtacggtaaggaagccatcgaggtcgctggtgccgtgaagctatgtaacagctttaacgagttgccaaaggaaaagtgggccgtggctacttccggtacaagagagatggcttccaagtggttcgctgttctaggcatcaagaagccaacatacttcatcactgctaacgatgtgaagaagggtaagcctaaccctgaaccatacctaaagggtagagaaggtctaggctacccaatcaacacacattaccctgagaagtctaaggttgtcgtctttgaagatgctccagctggtattgccgccggtaaagctgctggttgtaagatcatcggtatcgctaccactttctctgcctcttcgctgagagagaagggctgtgatatagtcattaaggatcacagatccgtcagggttgctggttacgacaaagagaccgacgaagtcatcctcgtattcgacgactatctatacgttagagatgatatccaaaagtggtag

SEQ ID NO: 14780 - protein, 247 aa, Candida glabrata CBS 138
MPEPITLRVNAALFDVDGTIIISQPALAAFWRDFGKDKPYFDAEHVIHVSHGWRTYDAIAKFAPDFADEETVTKLEGEIPDKYGKEAIEVAGAVKLCNSFNELPKEKWAVATSGTREMASKWFAVLGIKKPTYFITANDVKKGKPNPEPYLKGREGLGYPINTHYPEKSKVVVFEDAPAGIAAGKAAGCKIIGIATTFSASSLREKGCDIVIKDHRSVRVAGYDKETDEVILVFDDYLYVRDDIQKW

SEQ ID NO: 14781 - DNA, 747 bp, Candida glabrata CBS 138
  CDS (1)..(747)
atgtccacttctccagtttctttgaaagttaacgccgctctgttcgatgttgatggtactatcatcatctctcaaccagccattgctgctttctggagagatttcggtaaggataagccatacttcgatgctgaacatgttatccacatttctcatggttggagaacttacgatgccatcgccaagtttgctccagactatgctgatgaagaatacgttaacaagctagaaggtgaaattccagagaagtacggtgaacattccatcgaggttccaggtgccgtcaagctttgtacagatttgaacaagttgccaaaggaaaaatgggctgttgccacatctggtactagagatatggctcaaaaatggttcaagatcttgaacattgaaagaccagaatacttcattactgctaatgatgttaagcaaggtaagccattcccagaaccatacctaaagggtagagaaggtctaggtttcccaatcaacaaagaagatccatcaaagtccaaggtagttgtcttcgaagatgctcctgctggtatcgccgctggtaaggccgctggctgtaagatcatcggtattgccaccacttttgatgttgacttcttgaaggagaagggttgtgatatcattgttaagaaccacgaatctatcagagttggtggttacaacccagaaaccgatgaagtcgaattcattttcgatgactacctatacgccaaggatgacttattggaatggtaa

SEQ ID NO: 14782 - protein, 248 aa, Candida glabrata CBS 138
MSTSPVSLKVNAALFDVDGTIIISQPAIAAFWRDFGKDKPYFDAEHVIHISHGWRTYDAIAKFAPDYADEEYVNKLEGEIPEKYGEHSIEVPGAVKLCTDLNKLPKEKWAVATSGTRDMAQKWFKILNIERPEYFITANDVKQGKPFPEPYLKGREGLGFPINKEDPSKSKVVVFEDAPAGIAAGKAAGCKIIGIATTFDVDFLKEKGCDIIVKNHESIRVGGYNPETDEVEFIFDDYLYAKDDLLEW

SEQ ID NO: 14783 - DNA, 750 bp, Candida glabrata CBS 138
  CDS (1)..(750)
atgtctctagctaagccagtttctttgaaggttaacgccgctctattcgatgtcgatggtactatcatcatctctcaaccagctatcgctgctttctggagagatttcggtaaggacaagccatacttcgacgccgaacacgttatccacatctctcacggttggagaacttacgatgccatcgctaagttcgctccagactacgccgatgaagaatacgtcaacaagctagaaggtgaaatcccagaaaagtacggtgaacactccatcgaggtcccaggtgccgtcaagctatgtactgacctaaacaagttgccaaaggagaagtgggctgttgccacctccggtaccagagacatggcccaaaagtggttcaagttcttgaacatcgacagaccagaatacttcatcaccgctaacgatgtcaagcaaggtaagccattcccagaaccatacatcaagggtagagaaggtctaggttacccaatcaacaaggaagacccatctaagtccaaggttgttgtcttcgaagacgccccagctggtatcgctgctggtcaagctgccggttgtaagatcatcggtatcgccactaccttcgacgtcgacttcctaaaggaaaagggttgtgacatcatcgtcaagaaccacgaatccatcagagttggcggttacaacccagaaaccgatgaagtcgaattcatcttcgatgactacttgtacgccaaggatgacttgttgaagtggtaa

SEQ ID NO: 14784 - protein, 249 aa, Candida glabrata CBS 138
MSLAKPVSLKVNAALFDVDGTIIISQPAIAAFWRDFGKDKPYFDAEHVIHISHGWRTYDAIAKFAPDYADEEYVNKLEGEIPEKYGEHSIEVPGAVKLCTDLNKLPKEKWAVATSGTRDMAQKWFKFLNIDRPEYFITANDVKQGKPFPEPYIKGREGLGYPINKEDPSKSKVVVFEDAPAGIAAGQAAGCKIIGIATTFDVDFLKEKGCDIIVKNHESIRVGGYNPETDEVEFIFDDYLYAKDDLLKW

SEQ ID NO: 14785 - DNA, 741 bp, Candida glabrata CBS 138
  CDS (1)..(741)
atgtcaaaccagtttactgtagacctctgcctctttgacctcgatggaaccattgtcagcaccaccagagctgtcgagatgacctggaagaagctttgcgcagagcatgacgttgatccagaagagctattccgtttctcccacggtactagaactggtgaagtatttgctaaattcttcccagacattgacaacactggtaacagggcagctgtggcattcgagttgtcaatagccgatgatctaagtcttatctcgttgattccaggtgcccaagaactactgttgaaattagacaagaacacgacagatggctctgcagttggtgagcgcaaatgggcaatagtcacatcaggatcaccagaattgacactgtcgtggtttgataatgtcttaaaggaagtcggaagaccacccgtgttcatttctggtgccgatgtagcaaagggcaagcccgatccagaaggatactacactggacggaatctactatgtcagaaactaggtcttgacgcttctcatgcgaggacagtggtatttgaggatgctcccgtaggtatcatggctggtaaagctattggtgccattacagtgggaatcgcaggtacatatgacaaggacttattgtattcagcaggtgctgactatgtagtttcagaccttaaccaggtgaaagtaattgaaaacacaaaaggtggccccatcaaactggaaattgtagaaccactaggtaagatatag

SEQ ID NO: 14786 - protein, 246 aa, Candida glabrata CBS 138
MSNQFTVDLCLFDLDGTIVSTTRAVEMTWKKLCAEHDVDPEELFRFSHGTRTGEVFAKFFPDIDNTGNRAAVAFELSIADDLSLISLIPGAQELLLKLDKNTTDGSAVGERKWAIVTSGSPELTLSWFDNVLKEVGRPPVFISGADVAKGKPDPEGYYTGRNLLCQKLGLDASHARTVVFEDAPVGIMAGKAIGAITVGIAGTYDKDLLYSAGADYVVSDLNQVKVIENTKGGPIKLEIVEPLGKI

SEQ ID NO: 14787 - DNA, 771 bp, Kluyveromyces lactis NRRL Y-1140
  CDS (1)..(771)
atgtctgctgctaccgcctctaacactgctcaacaacctatctctctaagagtcaacgctgctttgttcgacgttgatggtactttgatcatctctcaaccagctattgctgaattctggagagatttcggtaaggacaagccttacttcgactcccaacatgtcatcgatatctctcacggatggagaacatacgatgttatcaagcagttcgctccagattacgccaacgaagaatatgtcaccaagttggaaggtgaaatcccagaaaaattcggtcaacacgctatcgaagttccaggtgccagtaaattgtgtggtgaattgaacaagcttccaaaggaaaaatgggctgtcgccacctccggtacttacgaaatggctcacaaatggtttgacatcttgggaatcaagagaccttctaactttatcaccgctaacgatgtcaagaacggtaagcctcatccagaaccttatttaaagggcagaaacggtttgtcttacccaatcaacaaagaaaacccagccgcttcaaaggttattgtctttgaagatgctccagcaggtatcttggccggtaaagctgctggctgtaagatcgttggtattgccactactttcgacaaggaattcttgatcgaaaagggttgcgatatcgtcatcaaggaccacaccaagttgagagttgctgcctaccaccctgaaaccgatgaagttgaattcatctttgacgaatacttatatgccaaggatgatctacttgaatggtaa

SEQ ID NO: 14788 - protein, 256 aa, Kluyveromyces lactis NRRL Y-1140
MSAATASNTAQQPISLRVNAALFDVDGTLIISQPAIAEFWRDFGKDKPYFDSQHVIDISHGWRTYDVIKQFAPDYANEEYVTKLEGEIPEKFGQHAIEVPGASKLCGELNKLPKEKWAVATSGTYEMAHKWFDILGIKRPSNFITANDVKNGKPHPEPYLKGRNGLSYPINKENPAASKVIVFEDAPAGILAGKAAGCKIVGIATTFDKEFLIEKGCDIVIKDHTKLRVAAYHPETDEVEFIFDEYLYAKDDLLEW

SEQ ID NO: 14789 - DNA, 807 bp, Kluyveromyces lactis NRRL Y-1140
  CDS (1)..(807)
atgccttctattgctgttgactacgttcttttcgacttagatggcacattggtgagttccaccgatgcggctgaagaggcttggaataagctctgtgacaagtatggtgttgattattcaacactttctaaggtctcacatggttccagaactgcggagatcttagcgaagttctttcctaacgttgacaacactaataatcaggcagtcaaggaatttgaactttctattgccaatgattacatggatatcgtttgtttgattccaggttctatagatttactgatctcgttggatagaccaactggggcacaccctggtgaagttttccatcatagaaagtgggctgtagttaccagtggatcgccttgggttgctcatgcatggtttgacaacttgttaaaatccattaagaaaccagaggtattcattactgcttttgatgtttcaaagggtaaacctgacccagccggtttcgctctggccactaaacgtttgaaggaaatatggcaagatgacagaaaggaggtaagaacggtggttttcgaggatgcgcctgttggagttcaagctggtaaggccaatggctcaattgtagttgccttaaccagtacttatgataaggagttattatttgcagcgggcgcggattatgtggttgaagatttatcacaagtttgcttgcagtccaataataaagatgagactgttctaaccatcactgatccaatacctagaggtgaagaagcagaatatggtgatgacgatgatgacgatgatgacgatgatgataatgataacgaataa

SEQ ID NO: 14790 - protein, 268 aa, Kluyveromyces lactis NRRL Y-1140
MPSIAVDYVLFDLDGTLVSSTDAAEEAWNKLCDKYGVDYSTLSKVSHGSRTAEILAKFFPNVDNTNNQAVKEFELSIANDYMDIVCLIPGSIDLLISLDRPTGAHPGEVFHHRKWAVVTSGSPWVAHAWFDNLLKSIKKPEVFITAFDVSKGKPDPAGFALATKRLKEIWQDDRKEVRTVVFEDAPVGVQAGKANGSIVVALTSTYDKELLFAAGADYVVEDLSQVCLQSNNKDETVLTITDPIPRGEEAEYGDDDDDDDDDDDNDNE

SEQ ID NO: 14791 - DNA, 762 bp, Debaryomyces hansenii CBS767
  CDS (1)..(762)
atgacaattcaaaaacaaccagctgtcttctacgttaacgctgctttattcgactgtgacggaacgttagtcaattctaccggagctatttcagaattctggagagatttcggaaagactagacctcacgtcaacccagatgaaatcatcagcacctcgcacggatgtcgtacattcgatgtgattgcaaaatggtcaccagaagatgctattgaagaacaagtcaccgaatgggaaggatctattccagattcttttggtcaattcgctaagccaattcctggtgcagttgaattagtcaagtcttttgacaagttctccaagagcgaaactgaaaatggtaaacaaagatgggctattgtgacatctggtactttaccattggccaccaagtggttgaagttgttgaccatcgaaaaaccagactgtttcatcaccgctgaaaaggtcaccaagggtaagccacatccacaaggataccaatctgctagagagaccttaggttacaagggtgctcacaacaaggttgttgtcttcgaagatgctcctgctggtatcactgctggtaagggtgctggtgctttcattgttggtatctgttccacctacgacccagaaaaggttagaaaggctggtgctgacattgttgttgacgacttgacctcgttcagaatcgactcctacaacaaggaaaccgatgaattcaaggttattgtggatgactaccattacgccaacgacgaattcttgcaatccgtctaa

SEQ ID NO: 14792 - protein, 253 aa, Debaryomyces hansenii CBS767
MTIQKQPAVFYVNAALFDCDGTLVNSTGAISEFWRDFGKTRPHVNPDEIISTSHGCRTFDVIAKWSPEDAIEEQVTEWEGSIPDSFGQFAKPIPGAVELVKSFDKFSKSETENGKQRWAIVTSGTLPLATKWLKLLTIEKPDCFITAEKVTKGKPHPQGYQSARETLGYKGAHNKVVVFEDAPAGITAGKGAGAFIVGICSTYDPEKVRKAGADIVVDDLTSFRIDSYNKETDEFKVIVDDYHYANDEFLQSV

SEQ ID NO: 14793 - DNA, 726 bp, Debaryomyces hansenii CBS767
  CDS (1)..(726)
atgtctcataaaagtattatagctgatttcctattgttcgacttagatggtactcttgtaaattcaacacttgctgtagaaaagacatggattgaacaatgcaataatcataattcaacaaatgaagtacctatcgatgctgagattttattaaattcagcacatggaacaagaacggctgaaacaatcaaaagatggtttccttatttacaaaacgacaaagagtctattaatctttttgaaaaagccattgttacaaattatgggcatttagcggaagaggtcaagggtgcaacacatttgatcgatagtataaataagtttggaagtaatcagtgggctataataacttctggtactaaagatttagcatatgggtggtttgaaaaattatttgtaaattctggcaagccaaaggttttcattactgcaaatgatgtttcgcaaggtaagccgaatcccgaaggctacttggaggcatttagtcaattaaaagagacaaacaaactagttggtcatgaattttctgctgttgttttcgaagacgccccggtgggtattcaagcgggtattgctgcagggtttcatgttattgggattgcaactacttttgataaggatactttaataaacgcaggatcatcatttgtagtcgaagatttgtcaaaaatacacattacgaaaactacttcaacatcattccaattagatttggatatattataa

SEQ ID NO: 14794 - protein, 241 aa, Debaryomyces hansenii CBS767
MSHKSIIADFLLFDLDGTLVNSTLAVEKTWIEQCNNHNSTNEVPIDAEILLNSAHGTRTAETIKRWFPYLQNDKESINLFEKAIVTNYGHLAEEVKGATHLIDSINKFGSNQWAIITSGTKDLAYGWFEKLFVNSGKPKVFITANDVSQGKPNPEGYLEAFSQLKETNKLVGHEFSAVVFEDAPVGIQAGIAAGFHVIGIATTFDKDTLINAGSSFVVEDLSKIHITKTTSTSFQLDLDIL

SEQ ID NO: 14795 - DNA, 795 bp, Debaryomyces hansenii CBS767
  CDS (1)..(795)
atgtctttgaaaccagctaataaaattccagcagtattttatgttaatgcagcattatttgactgcgatggtacattagtcaactctacaggagcaatttctgagttttggagggggtttgcagaaaccagaccgcatgttgatgctgatgagatcataaaaacatcacatggttgtagaaccttcgatgtcattgctaagtggtcaccagacgatgcagtagaaaaacaagttacggaatgggaagcgtcgattcctgaatcattcggtcaatatgcaaagccgattccaggggctgttgagctagttaaaagattcgatgagatatcacgaacccaaactgataataagcatcaaagatgggcgattattacctctggtactttgccattggcttctaaatggttgaaattattaacaattgagaagcctgattgttttatcacagctgaaaaagtggcgcaaggaaaacctcatccacaagggtaccaatcggcgagagaaaatctaggatatgatgcaccccataagaaggttgtcgtttttgaagatgcccctgcaggtatcaaggctggtaaaggtgcaggagctatgattgttggtatatgttcaacctatgaccctgaaaaggtttgggaatcgggtgcagatatagtggtgaaagatttatcgtcatttgaaatagatcattataatcctgagactgacgaatttagagtggttgttaacgaatattattatgccaacgagcaatatactattcgtcgtaagtcacttgttggcttagaggtttag

SEQ ID NO: 14796 - protein, 264 aa, Debaryomyces hansenii CBS767
MSLKPANKIPAVFYVNAALFDCDGTLVNSTGAISEFWRGFAETRPHVDADEIIKTSHGCRTFDVIAKWSPDDAVEKQVTEWEASIPESFGQYAKPIPGAVELVKRFDEISRTQTDNKHQRWAIITSGTLPLASKWLKLLTIEKPDCFITAEKVAQGKPHPQGYQSARENLGYDAPHKKVVVFEDAPAGIKAGKGAGAMIVGICSTYDPEKVWESGADIVVKDLSSFEIDHYNPETDEFRVVVNEYYYANEQYTIRRKSLVGLEV

SEQ ID NO: 14797 - DNA, 711 bp, Aspergillus nidulans FGSC A4
  CDS (1)..(711)
atggctgccacgggctcattctctgcccctccacaagtactcacatttgatggtcttctatccgactttgatggcaccatcgttgattcgacggatgctatcgtaaagcactggcataaaatcggtgctgaactcggtgtcgacccgaagacaattttggctacatctcacggccgccgaagtattgatactctacagctgtatgaccccgcaaaagccaactgggaatacgtcagctacatcgagggactcatccccaaagagtacggttctgacgctattgaaatccccggcgcgcggtccatccttgctgccctcgaagagaccggcgcaacctggggcgttgtgacgtcggggacgcgcgcgctcattgacggctggctgggtgttctcaagctcacacatccagatgtcctcgttgttgcggaggatgtagaactcgggaagccagatccgcgatgctacctgcttggacgaaagaaaatgggtctagaacattcctcctcgatagtggtgctggaggatgcgccgtcaggcataaaggctggcaaggcagccggtttcactgtcattgctttgaccaccactcacactttggagcagcttcaagcggctggggcggacgtgatagtggaggatttgaggagtattagcgtaaagggtgttgttgacgggcgtgttcagttggaggttcggaatgccttccaatag

SEQ ID NO: 14798 - protein, 236 aa, Aspergillus nidulans FGSC A4
MAATGSFSAPPQVLTFDGLLSDFDGTIVDSTDAIVKHWHKIGAELGVDPKTILATSHGRRSIDTLQLYDPAKANWEYVSYIEGLIPKEYGSDAIEIPGARSILAALEETGATWGVVTSGTRALIDGWLGVLKLTHPDVLVVAEDVELGKPDPRCYLLGRKKMGLEHSSSIVVLEDAPSGIKAGKAAGFTVIALTTTHTLEQLQAAGADVIVEDLRSISVKGVVDGRVQLEVRNAFQ

SEQ ID NO: 14799 - DNA, 765 bp, Candida albicans SC5314
  CDS (1)..(765): transl_table=12
atgacaaagactcaacaaccagctgttttttacgttcacgccgctttatttgactgtgatggtactttggttaactccactggtgctatttctgaattctggagagatttcggaaaaactagacctcatgttgatccagaagaaattatcagaacttcccatggttgccgtacatttgatgtcattgccaaatggtcaccagaagatgcaattgaagaacaagtcactgcatgggaaggtgctattcctgacacttttggccaccacgccaagccaattccaggttccgttgaattggtaaaatcattcgataaactttctaaagaagctactgaaaatggtaaacaaagatgggctgttgtcacttctggtactttgccattagccaccaaatggttgaaattattgtctattgaaaggccagactgttttataaccgctgaaaaagtgactaaaggtaaaccacatccacaaggttaccaagctgctagagatactttgggataccatgacgcccactacaaagttgttgtgtttgaagacgctccagctggtataaccgcaggtaaaggtgctggcgccatggttgtcggtatttgctcaacttacgatcctgaaaaagttagaaaatcaggtgctaacattgttgtcaaagatttatccagctttagaatcgactcatacaacaaggaaactgacgaattcaaggttgttgttgatgattatttctacgctgatgagcaatttttacaagaatctgcttaa

SEQ ID NO: 14800 - protein, 254 aa, Candida albicans SC5314
MTKTQQPAVFYVHAALFDCDGTLVNSTGAISEFWRDFGKTRPHVDPEEIIRTSHGCRTFDVIAKWSPEDAIEEQVTAWEGAIPDTFGHHAKPIPGSVELVKSFDKLSKEATENGKQRWAVVTSGTLPLATKWLKLLSIERPDCFITAEKVTKGKPHPQGYQAARDTLGYHDAHYKVVVFEDAPAGITAGKGAGAMVVGICSTYDPEKVRKSGANIVVKDLSSFRIDSYNKETDEFKVVVDDYFYADEQFLQESA

SEQ ID NO: 14801 - DNA, 675 bp, Acidobacteria bacterium Ellin345
  CDS (1)..(675): transl_table=11
gtgatggagaaaattcgctgcgctgcagttctgtttgatttagatggcgttctggttgactccacacccgcggtcacgcgggtgtgggcacgttgggccgccgtacacggcttcgatgccgacgaggtagtgcataacgcgcatgggcgccccagcatcgagaccttgcgcgagtacctgcccaacgccgatcacgaaaaagaaaatcgcgaactcgaacgccaggagatcgaagacgttgagggcgtgatcctccttcccggcgcccagcaacttctggctactttgccgcccgagcgctggacgattgcgacttccgccacccgagccttggccaaggtacgaattgaagtggcgggtctgccggttccgccgcgaatgattacggcttcagagatcacacgtggcaagccgaaccccgagccgtatttgaaagcagcagctctgctgggatttccggcaagcgaatgtgtggtatttgaagatgtacctgccggcatccgcgctggcaaagccgcgggcgcgacggtgatcgccctacgcaccacggttccggataaggaattgcgcgcggcgggagcagatttcgtgctcaacagttgcgccgatgtcacggtagagtcgttttcaagcgaaggcattgtgctcgcgttaaacgacggagagaaaaaatga

SEQ ID NO: 14802 - protein, 224 aa, Acidobacteria bacterium Ellin345
MMEKIRCAAVLFDLDGVLVDSTPAVTRVWARWAAVHGFDADEVVHNAHGRPSIETLREYLPNADHEKENRELERQEIEDVEGVILLPGAQQLLATLPPERWTIATSATRALAKVRIEVAGLPVPPRMITASEITRGKPNPEPYLKAAALLGFPASECVVFEDVPAGIRAGKAAGATVIALRTTVPDKELRAAGADFVLNSCADVTVESFSSEGIVLALNDGEKK

SEQ ID NO: 14803 - DNA, 714 bp, Aspergillus niger
  CDS (1)..(714)
atgtctagaccatccggctccttttctgcccctccgcaagtccacacttttgacggactcctctccgactttgacggcaccatcgtcgactcaaccgatgcgattgtgaaacactggcacaaaatcggtgcggagttgggcgtcgaccccaagaccattttggccacttcccacggccgccgaagcatcgacacgatccagttgtacgacccgaagaaggccaattgggagtatgtcagctacatcgaaggtcgcatcccgaaggaatacggatcggacgcggtcgagattcccggggcgcggtatttcatgtcagcgttggacgacgccggcgctcgctggggcgtggtaacctctggaacgcgtgcgctggtggacggctggctgggcgtgctgaacctcgcccaccccaaggtcctggtggtggcggaagatgtcgagctgggcaagcctgacccccggtgctatctgcttggtcggacgcgcctgggtctggagcattcctcgtctctggtagttctggaggatgcgccgtcgggcatcagggctggtaaggcggccgggttcaaagtcattgcgctcacgacgacccactcgcttgcgcagctccaggaagccggtgctgactggatcgtcgaggatctgagaagcatcagcatcaagggcgtggtcgatggccagatgcagttggaaatccggaacgctttccaataa

SEQ ID NO: 14804 - protein, 237 aa, Aspergillus niger
MSRPSGSFSAPPQVHTFDGLLSDFDGTIVDSTDAIVKHWHKIGAELGVDPKTILATSHGRRSIDTIQLYDPKKANWEYVSYIEGRIPKEYGSDAVEIPGARYFMSALDDAGARWGVVTSGTRALVDGWLGVLNLAHPKVLVVAEDVELGKPDPRCYLLGRTRLGLEHSSSLVVLEDAPSGIRAGKAAGFKVIALTTTHSLAQLQEAGADWIVEDLRSISIKGVVDGQMQLEIRNAFQ

SEQ ID NO: 14805 - DNA, 642 bp, Streptomyces hygroscopicus subsp
  CDS (1)..(642): transl_table=11
atgtacaaggttgcacttttcgacctggacggcacattaatcaactcggaacacaagaatcgagaagcttgggcgcgcctctttcgccggcatggcgttccgtacgacgactctgtactgcgcagcttcaccggccgcccagcgaaggaggccatggcggaccacgtcgcatcttttgccgggcatagcgtagacgaattatgtgccgaggtggcggcatacgccgcgctccctgatatgccagccgccgtcacggttgacggcgcaatggaactgctgcaccagttgcagcaaatgagggtgcctctcggagtggttacttcgggcccacgcgactacgccgagagtgcgcttacgaccctcggggcgctgcaactcctggatgtgctgattacggctgacgacgtctcccgagggaaaccggacccggaaggctacagtaccgcctgttcggcattgaacgtcgagccgagtcaggcaatagtgttcgaggacgcgccagccggcatcctcgcggctaaacgtgcgggaattttctgtgtcggcctgacgacaacacatgacgccgaggccctcgcggaagcggatgtactcctcaaggatttgactgaggtgcgctggccgcatattggtccttcctga

SEQ ID NO: 14806 - protein, 213 aa, Streptomyces hygroscopicus subsp
MYKVALFDLDGTLINSEHKNREAWARLFRRHGVPYDDSVLRSFTGRPAKEAMADHVASFAGHSVDELCAEVAAYAALPDMPAAVTVDGAMELLHQLQQMRVPLGVVTSGPRDYAESALTTLGALQLLDVLITADDVSRGKPDPEGYSTACSALNVEPSQAIVFEDAPAGILAAKRAGIFCVGLTTTHDAEALAEADVLLKDLTEVRWPHIGPS

SEQ ID NO: 14807 - DNA, 741 bp, Saccharomyces cerevisiae
  CDS (1)..(741)
atggcagaattttcagctgatctatgtctttttgacctagatggtaccatagtgagtacaacagtggccgcagagaaagcatggaccaagttgtgttacgaatacggtgttgatccttccgagttatttaagcattctcatggtgcaagaacacaagaggttttgagaaggtttttccctaaattggatgatacagacaataaaggtgttcttgctctagaaaaagatattgcccatagttacttggacacagtaagccttattcctggtgcagagaacttactgttatcgttagatgtagatactgagactcaaaaaaagttacctgaaaggaaatgggctatcgttacctctggttctccatatttggcattttcatggttcgagacaatattgaaaaatgttggaaagcccaaagttttcattactgggtttgacgtgaagaacggtaagcctgatcccgagggttattcaagagctcgtgatttattgcgtcaagatttgcaattaactggtaaacaggatctgaagtatgttgtcttcgaagatgcacccgtgggcataaaggccggcaaagcaatgggcgccattactgtgggtataacatcctcgtatgacaagagcgttttatttgacgcaggagcagattatgtagtctgtgatttgacacaggtttccgtggttaagaacaatgaaaacggtattgtcatccaggtaaacaaccctttgacaagggcctga

SEQ ID NO: 14808 - protein, 246 aa, Saccharomyces cerevisiae
MAEFSADLCLFDLDGTIVSTTVAAEKAWTKLCYEYGVDPSELFKHSHGARTQEVLRRFFPKLDDTDNKGVLALEKDIAHSYLDTVSLIPGAENLLLSLDVDTETQKKLPERKWAIVTSGSPYLAFSWFETILKNVGKPKVFITGFDVKNGKPDPEGYSRARDLLRQDLQLTGKQDLKYVVFEDAPVGIKAGKAMGAITVGITSSYDKSVLFDAGADYVVCDLTQVSVVKNNENGIVIQVNNPLTRA

SEQ ID NO: 14809 - DNA, 816 bp, Saccharomyces cerevisiae; identical to SEQ ID NO: 14769
  CDS (64)..(816)

SEQ ID NO: 14810 - protein, 250 aa, Saccharomyces cerevisiae
MPLTTKPLSLKINAALFDVDGTIIISQPAIAAFWRDFGKDKPYFDAEHVIHISHGWRTYDAIAKFAPDFADEEYVNKLEGEIPEKYGEHSIEVPGAVKLCNALNALPKEKWAVATSGTRDMAKKWFDILKIKRPEYFITANDVKQGKPHPEPYLKGRNGLGFPINEQDPSKSKVVVFEDAPAGIAAGKAAGCKIVGIATTFDLDFLKEKGCDIIVKNHESIRVGEYNAETDEVELIFDDYLYAKDDLLKW

SEQ ID NO: 14811 - DNA, 753 bp, Saccharomyces cerevisiae
  CDS (1)..(753)
atgggattgactactaaacctctatctttgaaagttaacgccgctttgttcgacgtcgacggtaccattatcatctctcaaccagccattgctgcattctggagggatttcggtaaggacaaaccttatttcgatgctgaacacgttatccaagtctcgcatggttggagaacgtttgatgccattgctaagttcgctccagactttgccaatgaagagtatgttaacaaattagaagctgaaattccggtcaagtacggtgaaaaatccattgaagtcccaggtgcagttaagctgtgcaacgctttgaacgctctaccaaaagagaaatgggctgtggcaacttccggtacccgtgatatggcacaaaaatggttcgagcatctgggaatcaggagaccaaagtacttcattaccgctaatgatgtcaaacagggtaagcctcatccagaaccatatctgaagggcaggaatggcttaggatatccgatcaatgagcaagacccttccaaatctaaggtagtagtatttgaagacgctccagcaggtattgccgccggaaaagccgccggttgtaagatcattggtattgccactactttcgacttggacttcctaaaggaaaaaggctgtgacatcattgtcaaaaaccacgaatccatcagagttggcggctacaatgccgaaacagacgaagttgaattcatttttgacgactacttatatgctaaggacgatctgttgaaatggtaa

SEQ ID NO: 14812 - protein, 250 aa, Saccharomyces cerevisiae
MGLTTKPLSLKVNAALFDVDGTIIISQPAIAAFWRDFGKDKPYFDAEHVIQVSHGWRTFDAIAKFAPDFANEEYVNKLEAEIPVKYGEKSIEVPGAVKLCNALNALPKEKWAVATSGTRDMAQKWFEHLGIRRPKYFITANDVKQGKPHPEPYLKGRNGLGYPINEQDPSKSKVVVFEDAPAGIAAGKAAGCKIIGIATTFDLDFLKEKGCDIIVKNHESIRVGGYNAETDEVEFIFDDYLYAKDDLLKW

SEQ ID NO: 14813 - DNA, 753 bp, Zea mays
  CDS (1)..(753)
atggaaagcagtgggatcggcagagtggcccccctggaggccgtcctcttcgacatcgacggcaccatggccatctccgacccgttccaccaccgggccacctcggagatgctcctcaaggtgggctacaacaacggcgtgcccatcacgcccgagttcggcatggcgaacatggccggccggagcaacgagcagatcggccgcttcctgttcccggactgggaccagcgccgcctcgacgccttcttcgccgagaaggaggcgctcttcgccaggtacgccgccgaggggctccgggagatcgccggcctcacgccgctctgccgctgggccgccggccgcgggctcaggcgcgccgccgtcaccaacgcacccagggccaacgccgagctcatgatctccatcctcggcctctccgactttttttccctcgtcgtcaccgccgaggagtgcggccgatccaagccctaccctgacccgtacctcagggcgctcgacctgctcggcgtctcgccggaccacgcgctcgtgttcgaggactccaccactggcgtgcaggccggcattgcggcagggatgccggtggttgccatcgccgaggaaagcagagaggacaagcttctcgccgtcggcgcaacgctcgtcatcagggactacgaagaccccaagctatgggcggctttggacaaactggacaccaccaggcctcaagctgctgctgctgagaccaatggaaaactcacacaactgtag

SEQ ID NO: 14814 - protein, 250 aa, Zea mays
MESSGIGRVAPLEAVLFDIDGTMAISDPFHHRATSEMLLKVGYNNGVPITPEFGMANMAGRSNEQIGRFLFPDWDQRRLDAFFAEKEALFARYAAEGLREIAGLTPLCRWAAGRGLRRAAVTNAPRANAELMISILGLSDFFSLVVTAEECGRSKPYPDPYLRALDLLGVSPDHALVFEDSTTGVQAGIAAGMPVVAIAEESREDKLLAVGATLVIRDYEDPKLWAALDKLDTTRPQAAAAETNGKLTQL

SEQ ID NO: 14815 - DNA, 29 bp, Artificial sequence
  primer
atgaaacgtttcaatgttttaaaatatat

SEQ ID NO: 14816 - DNA, 26 bp, Artificial sequence
  primer
ttaccatttcaacaagtcatccttag

SEQ ID NO: 14817 - protein, 216 aa, Artificial sequence
  consensus sequence
  Variant (4)..(4): Xaa in position 4 is any amino acid
  Variant (8)..(10): Xaa in position 8 to 10 is any amino acid
  Variant (12)..(13): Xaa in position 12 to 13 is any amino acid
  Variant (15)..(18): Xaa in position 15 to 18 is any amino acid
  Variant (20)..(37): Xaa in position 20 to 37 is any amino acid
  Variant (38)..(43): Xaa in position 38 to 43 is any or no amino acid
  Variant (46)..(56): Xaa in position 46 to 56 is any amino acid
  Variant (58)..(68): Xaa in position 58 to 68 is any amino acid
  Variant (69)..(71): Xaa in position 69 to 71 is any or no amino acid
  Variant (73)..(85): Xaa in position 73 to 85 is any amino acid
  Variant (86)..(87): Xaa in position 86 to 87 is any or no amino acid
  Variant (89)..(91): Xaa in position 89 to 91 is any amino acid
  Variant (93)..(100): Xaa in position 93 to 100 is any amino acid
  Variant (101)..(112): Xaa in position 101 to 112 is any or no amino acid
  Variant (115)..(116): Xaa in position 115 to 116 is any amino acid
  Variant (120)..(123): Xaa in position 120 to 123 is any amino acid
  Variant (125)..(134): Xaa in position 125 to 134 is any amino acid
  Variant (135)..(137): Xaa in position 135 to 137 is any or no amino acid
  Variant (139)..(141): Xaa in position 139 to 141 is any amino acid
  Variant (143)..(143): Xaa in position 143 is any amino acid
  Variant (145)..(146): Xaa in position 145 to 146 is any amino acid
  Variant (148)..(149): Xaa in position 148 to 149 is any amino acid
  Variant (153)..(153): Xaa in position 153 is any amino acid
  Variant (155)..(156): Xaa in position 155 to 156 is any amino acid
  Variant (158)..(163): Xaa in position 158 to 163 is any amino acid
  Variant (165)..(172): Xaa in position 165 to 172 is any amino acid
  Variant (173)..(179): Xaa in position 173 to 179 is any or no amino acid
  Variant (186)..(186): Xaa in position 186 is any amino acid
  Variant (189)..(189): Xaa in position 189 is any amino acid
  Variant (192)..(192): Xaa in position 192 is any amino acid
  Variant (196)..(203): Xaa in position 196 to 203 is any amino acid
  Variant (205)..(209): Xaa in position 205 to 209 is any amino acid
  Variant (211)..(211): Xaa in position 211 is any amino acid
  Variant (212)..(213): Xaa in position 212 to 213 is any or no amino acid
  Variant (215)..(215): Xaa in position 215 is any amino acid
LFDXDGTXXXSXXAXXXXWXXXXXXXXXXXXXXXXXXXXXXXXHGXXXXXXXXXXXPXXXXXXXXXXXXXXEXXXXXXXXXXXXXXXGXXXLXXXXXXXXXXXXXXXXXXXXWAXXTSGXXXXAXXXXXXXXXXXXXPXXXIXAXXVXXGKPXPXXYXXXXXXLXXXXXXXXXXXXXXXVFEDAPXGIXAGXAAGXXXXXXXXTXXXXXLXXXGXD

SEQ ID NO: 14818 - protein, 34 aa, Artificial sequence
  protein pattern
  Variant (2)..(2): Xaa in position 2 is any or no amino acid
  Variant (4)..(4): Xaa in position 4 is any amino acid
  Variant (5)..(5): Xaa in position 5 is any or no amino acid
  Variant (8)..(8): Xaa in position 8 is Ala or Val
  Variant (10)..(10): Xaa in position 10 is Ala, Ser or Val
  Variant (12)..(12): Xaa in position 12 is any amino acid
  Variant (13)..(13): Xaa in position 13 is any or no amino acid
  Variant (16)..(16): Xaa in position 16 is any amino acid
  Variant (17)..(17): Xaa in position 17 is Ala or Gly
  Variant (18)..(18): Xaa in position 18 is any amino acid
  Variant (20)..(22): Xaa in position 20 to 22 is any amino acid
  Variant (23)..(23): Xaa in position 23 is Ile or Val
  Variant (24)..(24): Xaa in position 24 is Ala or Gly
  Variant (25)..(25): Xaa in position 25 is Ile or Leu
  Variant (26)..(26): Xaa in position 26 is any amino acid
  Variant (27)..(27): Xaa in position 27 is Gly, Ser or Thr
  Variant (28)..(28): Xaa in position 28 is Ser or Thr
  Variant (29)..(33): Xaa in position 29 to 33 is any amino acid
  Variant (34)..(34): Xaa in position 34 is Leu or Val
VXVXXEDXPXGXXAGXXXGXXXXXXXXXXXXXXX

SEQ ID NO: 14819 - protein, 20 aa, Artificial sequence
  protein pattern
  Variant (2)..(3): Xaa in position 2 to 3 is any amino acid
  Variant (4)..(4): Xaa in position 4 is Phe, Leu or Met
  Variant (5)..(5): Xaa in position 5 is Ile or Val
  Variant (6)..(6): Xaa in position 6 is Ala, Ser, Thr or Val
  Variant (7)..(7): Xaa in position 7 is Ala or Gly
  Variant (8)..(9): Xaa in position 8 to 9 is any amino acid
  Variant (10)..(10): Xaa in position 10 is Ile or Val
  Variant (11)..(12): Xaa in position 11 to 12 is any amino acid
  Variant (16)..(16): Xaa in position 16 is any amino acid
  Variant (18)..(18): Xaa in position 18 is any amino acid
  Variant (19)..(19): Xaa in position 19 is Cys, Gly or Pro
PXXXXXXXXXXXGKPXPXXY

SEQ ID NO: 14820 - protein, 12 aa, Artificial sequence
  protein pattern
  Variant (4)..(4): Xaa in position 4 is any amino acid
  Variant (8)..(9): Xaa in position 8 to 9 is any amino acid
  Variant (10)..(10): Xaa in position 10 is any or no amino acid
  Variant (12)..(12): Xaa in position 12 is Asp, Gln, Ser or Thr
LFDXDGTXXXSX

SEQ ID NO: 14821 - DNA, 1143 bp, Saccharomyces cerevisiae
  CDS (1)..(1143)
atggccaagaaagttgccatctgtacattgctgtattcacgggactatttacctggcgcattgactttagcgtaccaattacaaaaactcttgaaacacgctgtagtggaagatgagataaccttatgcctgctaattgaaaaaaaattgtttggagatgagtttaaacctcaggaaatagctttaattagaagtctttttaaagagattatcattattgaaccgctaaaggatcaagagaagagcatagagaagaataaggcaaatcttgaactgttgaaaaggcctgagctatctcatactttactcaaggctagactgtgggaactggtgcagttcgatcaggttttatttttagatgctgatactttaccattaaataaagaattttttgaaatcctacgattataccctgaacaaacaagattccagattgctgcggttccagacatcggatggcctgacatgttcaacaccggtgtactactactaattcctgatttagatatggcaacaagtttacaagattttttgattaaaactgtatcgattgatggtgctgatcaaggaatcttcaatcaattttttaatcctatttgcaactacagcaaagaggttttgcataaggtgtctccactcatggaatggatacgcctccccttcacctacaacgtaaccatgcccaactacggataccagtcttcaccagccatgaattttttccaacaacacatcagacttattcacttcattggaacgtttaagccatggtcccgtaatacaactgactatgacgaccactattaccagctgtggagaagtacacagcgtgaactttatagtgaatgccacttaagtaactacttcacacacttgcaattgggcaatattgaaacagagacaaatttttaccacgaacctccttgtcttcaagacctgttgaatcatggtaaaagagaaaatcaaaagcacgttgacctggatataacctcagtagatcgaaatgcttcgcagaagagtactgcagagaaacatgatattgagaaaccgacatctaagccgcaatctgcttttaaatttgattgggagtctacggattatttagaccgcgtccaaagagcattcccaaagcctgatacctga

SEQ ID NO: 14822 - protein, 380 aa, Saccharomyces cerevisiae
MAKKVAICTLLYSRDYLPGALTLAYQLQKLLKHAVVEDEITLCLLIEKKLFGDEFKPQEIALIRSLFKEIIIIEPLKDQEKSIEKNKANLELLKRPELSHTLLKARLWELVQFDQVLFLDADTLPLNKEFFEILRLYPEQTRFQIAAVPDIGWPDMFNTGVLLLIPDLDMATSLQDFLIKTVSIDGADQGIFNQFFNPICNYSKEVLHKVSPLMEWIRLPFTYNVTMPNYGYQSSPAMNFFQQHIRLIHFIGTFKPWSRNTTDYDDHYYQLWRSTQRELYSECHLSNYFTHLQLGNIETETNFYHEPPCLQDLLNHGKRENQKHVDLDITSVDRNASQKSTAEKHDIEKPTSKPQSAFKFDWESTDYLDRVQRAFPKPDT

SEQ ID NO: 14823 - DNA, 1851 bp, Saccharomyces cerevisiae
  CDS (1)..(1851)
atgtataagaagctggctattgccacattgctctattccgcagattatttaccaggtgtgtttgcccttggtcaccaagtgaataaattgttagaggaagcaggcaaaaaaggcgacattgaaacatgccttattgtgacgacctctctatttaatggcactttaagcgagctagccaagaatattttacaatcaatatacaccaaaattgtgttggtagagcctttaaattgccaagaagaaagcatacagaagaatagtgagaatttagctcttttggaaagacctgaattatcctttgccttaatcaaagcaagactatgggaattaactcagttcgaacaagttctttacttggattccgacactttacctctgaataaagaatttttaaagttgtttgacattatgtctaaacaaaccacgtcacaagtgggtgctattgctgatatcggctggcctgatatgttcaatagcggtgtcatgatgctaataccggatgctgatactgcatccgttttacaaaattatatttttgaaaacacttcaattgatggttctgaccagggcattttaaaccagttcttcaatcaaaattgttgcactgatgagctagttaaagacagtttctctcgagaatgggtacagttatcatttacgtataacgtaactattcctaatttaggctaccaatcttcacctgctatgaattactttaaacctagcattaagttgattcatttcattgggaaacacaagccatggtcattgtggtcccaaaagaatttcattaaaaacgagtatcatgatcaatggaatgaggtatacgaggaatttaaggaagaacatcaattaaataacgaagtttcgaagccaaagattagtgattccgataaaactgagactcctgaaacgataaccccagtggatgcccctccatcgaacgaacccactacgaatcaagagatcgacacaattagtacagtggaagaaaacgtggacaaccagaacgccgagcctgttcctaactcggatcatagccctgctcctaaccctgtcccattggattttaccaagtggttaacaacctttattaacaaagatcacttgactaatcagccagtaaatgaaagcagagaatattcgaaagagaatgataacaatataatcaatagcagttcaaaccgcgaccaagaaagtcctccaaatagtactcaggaactaaacagctcttatagcgttgtgagtactcaagctgatagcgatgagcaccaaaatgcagaagaggaggatagtacgacagataacgcttcaaattctggagaagaaagccacctcgatgatataagcacggccgcttcttccaataacaatgtaagtaatcaaccagatggcaaaaattttagcaattctaaagaaaataatatcagtgtcgaatctagcccttcaaatccagaacagaaaaggtcaactgacaatatacaaaaaccaagtgtttctactaatgacttaccagacgacgtagaaccacatacctctgttgatgacaatatacagtacttagaaaaagacaaggaaggttatgaagaatttcttccggacgtgtacgagtcaaatgcaatcgataacgaagaagaattttttgatgacgatgcaagagatgctaccgaaggagaaacgaagacgagtgcagttgcagataaacaggaggatatgaaacttacagcagaggaaaccaaccaaccgcaacaagaaatgcccaacttcaaatttgactgggaggactctgattatctatccaaagtagagaggtgtttccctgatgatatttttgagtatgcagtagagtaa

SEQ ID NO: 14824 - protein, 616 aa, Saccharomyces cerevisiae
MYKKLAIATLLYSADYLPGVFALGHQVNKLLEEAGKKGDIETCLIVTTSLFNGTLSELAKNILQSIYTKIVLVEPLNCQEESIQKNSENLALLERPELSFALIKARLWELTQFEQVLYLDSDTLPLNKEFLKLFDIMSKQTTSQVGAIADIGWPDMFNSGVMMLIPDADTASVLQNYIFENTSIDGSDQGILNQFFNQNCCTDELVKDSFSREWVQLSFTYNVTIPNLGYQSSPAMNYFKPSIKLIHFIGKHKPWSLWSQKNFIKNEYHDQWNEVYEEFKEEHQLNNEVSKPKISDSDKTETPETITPVDAPPSNEPTTNQEIDTISTVEENVDNQNAEPVPNSDHSPAPNPVPLDFTKWLTTFINKDHLTNQPVNESREYSKENDNNIINSSSNRDQESPPNSTQELNSSYSVVSTQADSDEHQNAEEEDSTTDNASNSGEESHLDDISTAASSNNNVSNQPDGKNFSNSKENNISVESSPSNPEQKRSTDNIQKPSVSTNDLPDDVEPHTSVDDNIQYLEKDKEGYEEFLPDVYESNAIDNEEEFFDDDARDATEGETKTSAVADKQEDMKLTAEETNQPQQEMPNFKFDWEDSDYLSKVERCFPDDIFEYAVE

SEQ ID NO: 14825 - DNA, 1650 bp, Candida glabrata CBS 138
  CDS (1)..(1650)
atgggtaaggagaatgttgctgtagcgactctgttatattcggcggattatctgcctggtgtgtttacgttggggtttcaattgcggaaacttatcgatgctggcggttgtggatgtgttaagacgtgtattgtggtgaccaagttgctgtacaatgacatactgagcgatatcagtaagaacttgctgaattgtttgtacgatgatattgtgctcgtggatcctttggattaccagcatattacccaggacatgaacaaggagaacttgaaaatgctggagagacctgaactgtcctttgctctgattaaagcgaggatctttgagctaacccagtatgagcaagtactttacttggacgctgacaccttgcctctgaactctggcatatttgacttatttgaccagttggccgaccagactagcgaacaagtcgccgctgtcccagatatcggctggccagacattttcaacagtggtgttatgatgattgtccctaacagggacgttgtcgccgaactaaacaactacattttaaatgtggtgtccattgatggttctgaccaaggtatcctaaatcaatttttcaatcagaacatgagattgaatgattttgggagaatagccaattactccactaaggaatggattaggttgccatacctttacaacgttactacgccaaattacggctacgagtgccctccagctatgaaattctttggcccacatattcgtttagtgcatttcattggtaaacataaaccatggagcaaatggtctcaagagcaattccaaaagagctcatatgccgctcaatggagagcagcgtacttggatttccaaatacagtatgatctggttgatctattagcccatactaccatcaaggacgaggatgagcacattgaacctcaacaggatgagtgtgaagaacacatagaagagaaccaacctgatgaataccaccatgagcaaacgcaatacaatgagcgtctggagaagattgacgaaatcaacgaggacgagtgcgatattattgaggaggaacaacaaccaatagaaaaacccccaactccaatccaacttcctctagatttcaaagaatggttaacaacatttatatcgaaggaagatgaagagcaacaacataacgaagagccttccgttgaggaatcccaaggaaatgagccagaagaaacacattttagaggtgttcattatgaggagcatatgattcaacatcatgaagaggaaaccataaatagacaggtatcgcatccaaaagaagacgccgcaaacgaggcagcaagagaaattgaacaaccaaaagatagatatgatagaaaggttgagattatagaggaagaagacataaaggatcatgaactggatgatttaattgatgatgaatcgtcaaccaataaacaagaggatgacgatgaaatagtagatgagcaagaagagtctagacttgcttcggagctggaagtaaaggactccaagatggatgtacaagaatcaaggtcacataatattcacaaccaaaataataataataattacaggtttgaatgggaaaatacaaattatttgaacactgtggaaagatcattccctgaagatatttttgaatattctgtagagtga

SEQ ID NO: 14826 - protein, 549 aa, Candida glabrata CBS 138
MGKENVAVATLLYSADYLPGVFTLGFQLRKLIDAGGCGCVKTCIVVTKLLYNDILSDISKNLLNCLYDDIVLVDPLDYQHITQDMNKENLKMLERPELSFALIKARIFELTQYEQVLYLDADTLPLNSGIFDLFDQLADQTSEQVAAVPDIGWPDIFNSGVMMIVPNRDVVAELNNYILNVVSIDGSDQGILNQFFNQNMRLNDFGRIANYSTKEWIRLPYLYNVTTPNYGYECPPAMKFFGPHIRLVHFIGKHKPWSKWSQEQFQKSSYAAQWRAAYLDFQIQYDLVDLLAHTTIKDEDEHIEPQQDECEEHIEENQPDEYHHEQTQYNERLEKIDEINEDECDIIEEEQQPIEKPPTPIQLPLDFKEWLTTFISKEDEEQQHNEEPSVEESQGNEPEETHFRGVHYEEHMIQHHEEETINRQVSHPKEDAANEAAREIEQPKDRYDRKVEIIEEEDIKDHELDDLIDDESSTNKQEDDDEIVDEQEESRLASELEVKDSKMDVQESRSHNIHNQNNNNNYRFEWENTNYLNTVERSFPEDIFEYSVE

SEQ ID NO: 14827 - DNA, 1233 bp, Kluyveromyces lactis NRRL Y-1140
  CDS (1)..(1233)
atgttaggtgttgttacattgttgtactcgttggattatttgccaggtgctttgacattagcatatcaattgaggaaattactacctaaaggttcaaaagagaagcagttatgtttgattctttctaaggaattgattgaagaaggacagttaagcgacgacgccttgaaagtgcttgaaatcttattcgatgatattatagaaatagaccccatcgacttaagcgacccggtcataagacaaaaccaagtgaaccttatgatgttggagaatcgatcagagttagcgttcacatttatgaaattacatttatgggagttgacacaatatgagaaagttctgtaccttgatagtgatgtgctaccccttgattcagatatattcaaaatttttgatcatgtttccaatcaaaccagcgatcaaattgctgctgtaccagattgtggctggcccgatttgttcaacagtggtgtaatggtcattaagcccagtaaggaaaagtaccaggaattgcacgaattggcaacaaaagaattatctatagatggtgcggaccaagggatcttgaaccaatttttcaaccctatgtgtcacgatggggatagactgacggagtggatcagattaccttttttctacaacgtgacgtctcctaacgctggatatcaatactctccagctatcaagttttttgccaacaagctaaagttggtccatttcatcggtaaaaacaagccatggaagcatgggtcaactggtggtcaatacaacgataaatataggaaccaatggtggtcattgtacatggaactatgtcatgaatatttccagtccgaacttgatattgacattgaccacatatgtcgcggtgtgaaggacgtagatttgtcagacatcgatttggaagatgtaaaacctacaccggtatggaatccagctaaggaagcaccatccgatgagttacctgccgaagctccgcatttaaatatatccaactcttacacttgggaatcagaactcgtagtaattccagatgacactccagcacaagaaaaagtaacggtaccatctgaagatggcgctgatattactgctgatcatgatactattgttgaggcagaactgccagtgacggaacatcgtcataagacttacacaagaccaaagccaattttcccatgggaactagacacaaactacaaagccacccgtgttttcccggaagatgaataa

SEQ ID NO: 14828 - protein, 410 aa, Kluyveromyces lactis NRRL Y-1140
MLGVVTLLYSLDYLPGALTLAYQLRKLLPKGSKEKQLCLILSKELIEEGQLSDDALKVLEILFDDIIEIDPIDLSDPVIRQNQVNLMMLENRSELAFTFMKLHLWELTQYEKVLYLDSDVLPLDSDIFKIFDHVSNQTSDQIAAVPDCGWPDLFNSGVMVIKPSKEKYQELHELATKELSIDGADQGILNQFFNPMCHDGDRLTEWIRLPFFYNVTSPNAGYQYSPAIKFFANKLKLVHFIGKNKPWKHGSTGGQYNDKYRNQWWSLYMELCHEYFQSELDIDIDHICRGVKDVDLSDIDLEDVKPTPVWNPAKEAPSDELPAEAPHLNISNSYTWESELVVIPDDTPAQEKVTVPSEDGADITADHDTIVEAELPVTEHRHKTYTRPKPIFPWELDTNYKATRVFPEDE

SEQ ID NO: 14829 - DNA, 1740 bp, Debaryomyces hansenii CBS767
  CDS (1)..(1740)
atgactcaaggggtattcactcttttatataacgaagaatatttggcaggggcccttgttctagccattgcgctccgtaagatcctcgaacgccagcccgaggttaatatttcattgggggttattattgataaagaacggttgaacgactctcaggtatcacttttgcggggtttgtacgatgatataattgaagtagaacaattggagtccgatatggatcacaggttgacctacgacttagggagacctgaattgaagcagacatttaccaaaatccagctttggtcgttgacaaagtacgacaatatattgtacttggatgctgacactttgcctaatgtccccaaggatgaatcgcaggggtcaattctcgatttgttgaagttagacttcgcttccaataagattctcgcagctcctgatagtgggtttccagatatcttcaactcaggggtcatgttgttgaagccgaacatgtccgactacactaatctattgaacttaatagaggaatcgagagttgatcgcaagctttcgttcgatggggcggaccagggtctcctaaacgagtatttcaacctgcagccagattgggttcgagatttagtgtcttctaaccagacggaggttgcggctgcttatggtgccaaatcgtcgaattggattccattgccatttttatataacgtaactccgtccaccgaatacgaatatttgcccgcatacaagcattttgccagtactgggtggttgagcactatatacggcagtctgggtagagggtattcgaatttattgcctcatttcaatggagaaaaatcccaaataaaacttgttcattttattggacccatgaaaccatggaaagcagaacttcccattggtatttatggccagtggtgggacacatggtatgggtattttggtaatgtcacagttgaggaagttgtttatcatggtgggggcgatttagttgttgaatctagatcgttcgaagatcaaagggaaactcaaatacagccggtagaaactccaccgacgaactcaaaacagggtgagaaattcgatccgtcgtatctctgcgatccaacaaactaccagcacattcccagcaacattgtccccagtgttgacgcttcgtgggatcctgcaaacgaaccacctcctgcggccaagcccgttaatcatgaaactgtagagctcgagaaaggcatgagatcattcacaaatgcatgggactctagcgatgaaaagtccacccatgaggattcgcatgcaccagaatatgaaggtgttcaactttctatggaagctcaacgtccttccgatggacatcctacagttgaacataacaaagacgaacatcctacagtagagcagcctacagacaacgactccacagcgcacccatttggccaccacacctctcagagaccagaaagagtatttgctgacgacaacgttgttcttccccatccatatatgcctcgagccatctccgataacgcagatccggtccctagctcaacaccacccggatccggtcaattggagcatgaagaaatctacaaaacgttagctaacctccaaatagaccagacccacccagcaaacttggatcaagacctgttccaacggacagaacaagactcacctcaaaatgatacccccattgccaaattatttccctgggagttcaacaaggaacaatatgttccacagagaacgttcgattag

SEQ ID NO: 14830 - protein, 579 aa, Debaryomyces hansenii CBS767
MTQGVFTLLYNEEYLAGALVLAIALRKILERQPEVNISLGVIIDKERLNDSQVSLLRGLYDDIIEVEQLESDMDHRLTYDLGRPELKQTFTKIQLWSLTKYDNILYLDADTLPNVPKDESQGSILDLLKLDFASNKILAAPDSGFPDIFNSGVMLLKPNMSDYTNLLNLIEESRVDRKLSFDGADQGLLNEYFNLQPDWVRDLVSSNQTEVAAAYGAKSSNWIPLPFLYNVTPSTEYEYLPAYKHFASTGWLSTIYGSLGRGYSNLLPHFNGEKSQIKLVHFIGPMKPWKAELPIGIYGQWWDTWYGYFGNVTVEEVVYHGGGDLVVESRSFEDQRETQIQPVETPPTNSKQGEKFDPSYLCDPTNYQHIPSNIVPSVDASWDPANEPPPAAKPVNHETVELEKGMRSFTNAWDSSDEKSTHEDSHAPEYEGVQLSMEAQRPSDGHPTVEHNKDEHPTVEQPTDNDSTAHPFGHHTSQRPERVFADDNVVLPHPYMPRAISDNADPVPSSTPPGSGQLEHEEIYKTLANLQIDQTHPANLDQDLFQRTEQDSPQNDTPIAKLFPWEFNKEQYVPQRTFD

SEQ ID NO: 14831 - DNA, 1212 bp, Debaryomyces hansenii CBS767
  CDS (1)..(1212)
atgacagttgcatacattactctattagtgaatgaagtttatttgccaggagcattaaccgtggcaaaaatattgaagaatgactacaaaacgagccatcctttagttatattgctagatacaagccaaattagtgagaagtcgacgaaattaattgaagacgtctacgatgaaattattcctattgatggtggcttaataacgtctccaatagacaaattagtttcccaattgaatagacttgaattagcggtcacattcaccaagatcttgctttggaagcaaatacagtacaccaaattggtatatctcgattgtgatatcttaccgatgcaaggaatagacgatttatttgagatagagattagctcaaaccaagttgcagcttctcctgatagtggatggcccgatatttttaattctggggtgatggttttgaaaccaagcatgattgtttacaataagttaagcgaatttgtcgagaccgaggataatacttttgatggggccgaccagggactatttaacgagttcttcaatatcgcttctaaaggattgaattgggttagattaccatttctatacaatgtgaccttttcgcagtcatatcagtacttgccagcatttgatcgcttttttaaggatatcaggattttgcattttataggtctgcaaaagccatggatgtttgggggatacgacaagttcaaggagtactggtggagtgcatttaataagcattattcgcctgatgtagtccaatatgtcttacaaactactgggtcaggatccaataagggtgaggcaagtgcgttgaatattgagccttcccccaacgtctgggacatagaatctgtcgataacaaagtacaagaatcgcccgtcgacaccccatcaatttttccatgggaggagagaaaggagaatgcgccacccacaagagtatttacttcgttctcgactcaccactcatcaattagaccgacagaaaagctgcctaagggaaaggagttcaacaaggtgcccctgagctataaggatgatatcgagacctcaaccagtagcaccaggtcaaggactggacaacctatgttcagacaatatgaatttaccgaaagtttcgatccagaagaatcattcgacaaggtatccaaaatacccatcaatttgttgaagaagaagctagagcaggagaagcaaaacaatccatag

SEQ ID NO: 14832 - protein, 403 aa, Debaryomyces hansenii CBS767
MTVAYITLLVNEVYLPGALTVAKILKNDYKTSHPLVILLDTSQISEKSTKLIEDVYDEIIPIDGGLITSPIDKLVSQLNRLELAVTFTKILLWKQIQYTKLVYLDCDILPMQGIDDLFEIEISSNQVAASPDSGWPDIFNSGVMVLKPSMIVYNKLSEFVETEDNTFDGADQGLFNEFFNIASKGLNWVRLPFLYNVTFSQSYQYLPAFDRFFKDIRILHFIGLQKPWMFGGYDKFKEYWWSAFNKHYSPDVVQYVLQTTGSGSNKGEASALNIEPSPNVWDIESVDNKVQESPVDTPSIFPWEERKENAPPTRVFTSFSTHHSSIRPTEKLPKGKEFNKVPLSYKDDIETSTSSTRSRTGQPMFRQYEFTESFDPEESFDKVSKIPINLLKKKLEQEKQNNP

SEQ ID NO: 14833 - DNA, 1086 bp, Candida albicans SC5314
  CDS (1)..(1086): transl_table=12
atgtcttttgcttatgccactcttttaataggggaatcctatttaccaggtgtattaactttgggtaacagattaaaacagttgggcacaaaacataaattattgatcttattagatgtcagttcaatttcattacaaagtaaacaattgattgagtcaatttatgatgaattgattcctatcgataatcaattgattttatctccattgcagaagttgagtgaacaattacaacgtcaagaattatcaattagttattcaaagattttattatggaatcaattagattatgattcgattgtttatcttgatgccgatgtattaccattacaaaatttagatcgattgtttattgattatgatgttgatgataatcaaattggtgctgcttctgattctggatggccagatatttttaattccggggtgtttaaattgaaacctaacaaacaaacatttgaacaattattggaatttagtgttgatccaaacaatacttttgatggaggcgatcaaggattgtttaatgaatatttcaagttggagaattggataaggttaccttatttatataacgtgacacctaactatcgtcaagattatcaatatttaccagcattcaatagatttttcaaggatattaaagtattacattttattggtcaagtgaaaccttggcactatgaaaatgtcttagcaagtgatttggccaactttcatcagtattggtgggacgaatttaataagcttattggagatgatgttgcattgaaatatacattgttgaatttacctagaggtgaagcaacaaagttgaaatttggtaaaactgtgaatgcatgggataaaaaagatattgaacaagacactgaattggtagaagaagaagaagaggaagaagaagtagtcagtcacagtccaattttcccttgggaacatcgtcaagagaaaagacagcctactcgtgttttccaaaatattcctactacttctactgtaggtaatgtatcgggaaaatctggtacaaaggaggaacaagagttggatagaagtactgaaactttgaaaagaactcatatctcctaa

SEQ ID NO: 14834 - protein, 361 aa, Candida albicans SC5314
MSFAYATLLIGESYLPGVLTLGNRLKQLGTKHKLLILLDVSSISLQSKQLIESIYDELIPIDNQLILSPLQKLSEQLQRQELSISYSKILLWNQLDYDSIVYLDADVLPLQNLDRLFIDYDVDDNQIGAASDSGWPDIFNSGVFKLKPNKQTFEQLLEFSVDPNNTFDGGDQGLFNEYFKLENWIRLPYLYNVTPNYRQDYQYLPAFNRFFKDIKVLHFIGQVKPWHYENVLASDLANFHQYWWDEFNKLIGDDVALKYTLLNLPRGEATKLKFGKTVNAWDKKDIEQDTELVEEEEEEEEVVSHSPIFPWEHRQEKRQPTRVFQNIPTTSTVGNVSGKSGTKEEQELDRSTETLKRTHIS

SEQ ID NO: 14835 - DNA, 24 bp, Artificial sequence
  primer
atggccaagaaagttgccatctgt

SEQ ID NO: 14836 - DNA, 23 bp, Artificial sequence
  primer
tcaggtatcaggctttgggaatg

SEQ ID NO: 14837 - protein, 539 aa, Artificial sequence
  consensus sequence
  Variant (4)..(7): Xaa in position 4 to 7 is any amino acid
  Variant (12)..(14): Xaa in position 12 to 14 is any amino acid
  Variant (16)..(18): Xaa in position 16 to 18 is any amino acid
  Variant (20)..(30): Xaa in position 20 to 30 is any amino acid
  Variant (31)..(41): Xaa in position 31 to 41 is any or no amino acid
  Variant (43)..(61): Xaa in position 43 to 61 is any amino acid
  Variant (62)..(62): Xaa in position 62 is any or no amino acid
  Variant (64)..(76): Xaa in position 64 to 76 is any amino acid
  Variant (77)..(82): Xaa in position 77 to 82 is any or no amino acid
  Variant (84)..(87): Xaa in position 84 to 87 is any amino acid
  Variant (88)..(88): Xaa in position 88 is any or no amino acid
  Variant (90)..(90): Xaa in position 90 is any amino acid
  Variant (93)..(97): Xaa in position 93 to 97 is any amino acid
  Variant (99)..(100): Xaa in position 99 to 100 is any amino acid
  Variant (103)..(111): Xaa in position 103 to 111 is any amino acid
  Variant (115)..(115): Xaa in position 115 is any amino acid
  Variant (117)..(117): Xaa in position 117 is any amino acid
  Variant (120)..(134): Xaa in position 120 to 134 is any amino acid
  Variant (135)..(141): Xaa in position 135 to 141 is any or no amino acid
  Variant (143)..(144): Xaa in position 143 to 144 is any amino acid
  Variant (146)..(147): Xaa in position 146 to 147 is any amino acid
  Variant (149)..(149): Xaa in position 149 is any amino acid
  Variant (154)..(154): Xaa in position 154 is any amino acid
  Variant (160)..(163): Xaa in position 160 to 163 is any amino acid
  Variant (165)..(171): Xaa in position 165 to 171 is any amino acid
  Variant (173)..(182): Xaa in position 173 to 182 is any amino acid
  Variant (183)..(187): Xaa in position 183 to 187 is any or no amino acid
  Variant (190)..(190): Xaa in position 190 is any amino acid
  Variant (194)..(195): Xaa in position 194 to 195 is any amino acid
  Variant (197)..(198): Xaa in position 197 to 198 is any amino acid
  Variant (201)..(203): Xaa in position 201 to 203 is any amino acid
  Variant (204)..(227): Xaa in position 204 to 227 is any or no amino acid
  Variant (229)..(230): Xaa in position 229 to 230 is any amino acid
  Variant (233)..(234): Xaa in position 233 to 234 is any amino acid
  Variant (239)..(242): Xaa in position 239 to 242 is any amino acid
  Variant (243)..(244): Xaa in position 243 to 244 is any or no amino acid
  Variant (246)..(248): Xaa in position 246 to 248 is any amino acid
  Variant (251)..(253): Xaa in position 251 to 253 is any amino acid
  Variant (255)..(257): Xaa in position 255 to 257 is any amino acid
  Variant (258)..(284): Xaa in position 258 to 284 is any or no amino acid
  Variant (286)..(288): Xaa in position 286 to 288 is any amino acid
  Variant (293)..(294): Xaa in position 293 to 294 is any amino acid
  Variant (298)..(308): Xaa in position 298 to 308 is any amino acid
  Variant (309)..(313): Xaa in position 309 to 313 is any or no amino acid
  Variant (315)..(391): Xaa in position 315 to 391 is any amino acid
  Variant (392)..(538): Xaa in position 392 to 538 is any or no amino acid
TLLXXXXYLPGXXXLXXXLXXXXXXXXXXXXXXXXXXXXXXLXXXXXXXXXXXXXXXXXXXXIXXXXXXXXXXXXXXXXXXXLXXXXXRXELXXXXXKXXLWXXXXXXXXXYLDXDXLPXXXXXXXXXXXXXXXXXXXXXXQXXAXXDXGWPDXFNSGVXXXXPXXXXXXXLXXXXXXXXXXXXXXXDGXDQGXXNXXFNXXXXXXXXXXXXXXXXXXXXXXXXXXXWXXLPXXYNVTXXXXXXYXXXPAXXXFXXXXXXXXXXXXXXXXXXXXXXXXXXXXXXIXXXHFIGXXKPWXXXXXXXXXXXXXXXXWXXXXXXXXXXXXXXXXXXXXXXXXXXXXXXXXXXXXXXXXXXXXXXXXXXXXXXXXXXXXXXXXXXXXXXXXXXXXXXXXXXXXXXXXXXXXXXXXXXXXXXXXXXXXXXXXXXXXXXXXXXXXXXXXXXXXXXXXXXXXXXXXXXXXXXXXXXXXXXXXXXXXXXXXXXXXXXXXXXXXXXXXXXXXXXXXXXXXXXXXXXXXXXXXXXXXXXXXXXXXXXXXP

SEQ ID NO: 14838 - protein, 33 aa, Artificial sequence
  protein pattern
  Variant (2)..(2): Xaa in position 2 is Ile or Val
  Variant (3)..(3): Xaa in position 3 is Ala or Gly
  Variant (5)..(5): Xaa in position 5 is any amino acid
  Variant (6)..(6): Xaa in position 6 is Ala, Pro or Ser
  Variant (8)..(8): Xaa in position 8 is any amino acid
  Variant (13)..(13): Xaa in position 13 is Ile, Leu or Met
  Variant (16)..(16): Xaa in position 16 is Ser or Thr
  Variant (19)..(19): Xaa in position 19 is Phe, Leu or Met
  Variant (20)..(20): Xaa in position 20 is any amino acid
  Variant (21)..(21): Xaa in position 21 is Ile or Leu
  Variant (22)..(22): Xaa in position 22 is any amino acid
  Variant (24)..(24): Xaa in position 24 is Asp, Asn or Ser
  Variant (25)..(28): Xaa in position 25 to 28 is any amino acid
  Variant (29)..(29): Xaa in position 29 is Ala, Glu, Asn, Gln, Ser or Thr
  Variant (30)..(30): Xaa in position 30 is any amino acid
  Variant (32)..(32): Xaa in position 32 is any amino acid
  Variant (33)..(33): Xaa in position 33 is Asp, Glu or Asn
QXXAXXDXGWPDXFNXGVXXXXPXXXXXXXLXX

SEQ ID NO: 14839 - protein, 27 aa, Artificial sequence
  protein pattern
  Variant (2)..(3): Xaa in position 2 to 3 is any amino acid
  Variant (4)..(4): Xaa in position 4 is any or no amino acid
  Variant (6)..(6): Xaa in position 6 is any or no amino acid
  Variant (8)..(9): Xaa in position 8 to 9 is any amino acid
  Variant (10)..(10): Xaa in position 10 is any or no amino acid
  Variant (12)..(14): Xaa in position 12 to 14 is any amino acid
  Variant (15)..(15): Xaa in position 15 is Ile or Leu
  Variant (16)..(16): Xaa in position 16 is Lys or Arg
  Variant (17)..(18): Xaa in position 17 to 18 is Ile, Leu or Val
  Variant (23)..(24): Xaa in position 23 to 24 is any amino acid
YXXXPXAXXXFXXXXXXXHFIGXXKPW

SEQ ID NO: 14840 - protein, 37 aa, Artificial sequence
  protein pattern
  Variant (2)..(5): Xaa in position 2 to 5 is any amino acid
  Variant (6)..(6): Xaa in position 6 is any or no amino acid
  Variant (8)..(8): Xaa in position 8 is any amino acid
  Variant (11)..(12): Xaa in position 11 to 12 is any amino acid
  Variant (13)..(13): Xaa in position 13 is Ala, Ser or Thr
  Variant (14)..(15): Xaa in position 14 to 15 is any amino acid
  Variant (17)..(17): Xaa in position 17 is Ala, Ile or Leu
  Variant (18)..(18): Xaa in position 18 is any amino acid
  Variant (21)..(24): Xaa in position 21 to 24 is any amino acid
  Variant (25)..(25): Xaa in position 25 is Phe or Tyr
  Variant (26)..(26): Xaa in position 26 is Asp, Glu or Thr
  Variant (27)..(27): Xaa in position 27 is any amino acid
  Variant (28)..(28): Xaa in position 28 is Ile, Leu or Val
  Variant (29)..(29): Xaa in position 29 is Leu or Val
  Variant (30)..(30): Xaa in position 30 is Phe or Tyr
  Variant (33)..(33): Xaa in position 33 is Ala, Cys or Ser
  Variant (35)..(35): Xaa in position 35 is any amino acid
LXXXXXRXELXXXXXKXXLWXXXXXXXXXXLDXDXLP

SEQ ID NO: 14841 - protein, 19 aa, Artificial sequence
  protein pattern
  Variant (4)..(7): Xaa in position 4 to 7 is any or no amino acid
  Variant (12)..(12): Xaa in position 12 is Ala or Val
  Variant (13)..(13): Xaa in position 13 is Phe or Leu
  Variant (14)..(14): Xaa in position 14 is Ala or Thr
  Variant (15)..(15): Xaa in position 15 is Leu or Val
  Variant (16)..(16): Xaa in position 16 is Ala or Gly
  Variant (17)..(18): Xaa in position 17 to 18 is any amino acid
  Variant (19)..(19): Xaa in position 19 is Leu or Val
TLLXXXXYLPGXXXXXXXX

SEQ ID NO: 14842 - protein, 11 aa, Artificial sequence
  protein pattern
  Variant (2)..(2): Xaa in position 2 is Ile or Val
  Variant (3)..(3): Xaa in position 3 is any amino acid
  Variant (6)..(6): Xaa in position 6 is Phe or Tyr
  Variant (7)..(7): Xaa in position 7 is any amino acid
WXXLPXXYNVT

SEQ ID NO: 14843 - DNA, 1920 bp, Saccharomyces cerevisiae
  CDS (1)..(1920)
atgatatctagaaccattggtgaatctattccgcccaacacaaaacatgctgtttccgtgtgtttgcccacatgggaagctacagtaggctatgaagagggtgaaagcagtataattaactcgcttactaccggatatccaagatttttcatacacaagtcaataaagaaattatgtgaaattttatccgctaagtactccatggaagatgaagcttgtctttgcttcccctcttacaaggttgccaataggtgcagagagtttatcaaagtgaaaacgggtctttctaccaaagtacgcatcttacaactatgtacacctaaacctatgaaccaagaggaaaagctctggagaagggaatgtaaaatcacggtggtgtttgtagaccaggaaatattccccgtgatgaagcagtattggcaacattctggtgagattgtatctagcagaatggcggagtatattttacatgaattacaagtcaaggataatcttaagaagatggaaacagtggataacggtaaaaaatttatgaccgaagatgaaaacagagtgaacgaagaatatatagaaacgagatttgggagaaatttaaattttcttgctgctgataaagccaaatatctaatacgaaagaggattgccacaaaagttgttgaaaaaattgactctgaaggtctatcggacctattctcttttgaacactataacgagagcaacggtccattcaatgttggcagtggagaggctctggatgatgatcagttgaattcggacatacctgccgaaacaattacttctatgggagaaagtggctcaaacagtacttttgaaaacacagctaccgatgacttgaagtttcatgtcaaccctaatacggatgtttacttatttccaagtggaatggcgtccattttcactgcccacaggctgcttttaaacttcgatgccaagcgcttatcaaggtcttctagtagacaagataagttgattggatatggacctccgttcaagaagaccgtcatgtttggattcccatatacagatactctgagcattcttcggaagttcaatcacacacatttcttgggacagggagattcaacgtcaatgaacgctctgaaaaatattttacattctggtgagcaaatactggcggtatttatagaagctccatcgaacccactgttgaaaatgggagatttacaagaactgaaaaggctatcagacttgtattcattttacatagtggtcgatgaaactgtgggtggctttgtcaatatagatgtattaccgtatgccgatattgtttgtagttcgctaacgaaaatcttcagcggcgactcgaacgttattgcaggatccttagtactaaatcctagaggaaagatttatgagtttgctagaaaatttatgaagactgaagacggatatgaagattgcctatggtgcgaagatgcgttatgcctggaaagaaattcgagagacttcgtggaacgtacaatcaaggtgaatacaaacactgatatattgttaaaaagggtgttattgcctcaggtgggaaaattgttcaagaaaatatattaccccagtttaacatcagaggataccaagcggaattatgacagcgttatgtctacaaaagatggtgggtatggaggtttattttcactaacttttttcaatattgaagaggcaaagaagtttttcaataatctggaattgtgcaaaggaccttctctcggtacgaatttcactttggcgtgtccatatgctattattgcccactaccaggaattagacgaggtagctcaatatggtgtcgaaacaaatcttgtaagagtgagcgtcggtttggaaaatagcgacgttttatgcaatgtttttcagcgtgccattgagaaagctttaggggaataa

SEQ ID NO: 14844 - protein, 639 aa, Saccharomyces cerevisiae
MISRTIGESIPPNTKHAVSVCLPTWEATVGYEEGESSIINSLTTGYPRFFIHKSIKKLCEILSAKYSMEDEACLCFPSYKVANRCREFIKVKTGLSTKVRILQLCTPKPMNQEEKLWRRECKITVVFVDQEIFPVMKQYWQHSGEIVSSRMAEYILHELQVKDNLKKMETVDNGKKFMTEDENRVNEEYIETRFGRNLNFLAADKAKYLIRKRIATKVVEKIDSEGLSDLFSFEHYNESNGPFNVGSGEALDDDQLNSDIPAETITSMGESGSNSTFENTATDDLKFHVNPNTDVYLFPSGMASIFTAHRLLLNFDAKRLSRSSSRQDKLIGYGPPFKKTVMFGFPYTDTLSILRKFNHTHFLGQGDSTSMNALKNILHSGEQILAVFIEAPSNPLLKMGDLQELKRLSDLYSFYIVVDETVGGFVNIDVLPYADIVCSSLTKIFSGDSNVIAGSLVLNPRGKIYEFARKFMKTEDGYEDCLWCEDALCLERNSRDFVERTIKVNTNTDILLKRVLLPQVGKLFKKIYYPSLTSEDTKRNYDSVMSTKDGGYGGLFSLTFFNIEEAKKFFNNLELCKGPSLGTNFTLACPYAIIAHYQELDEVAQYGVETNLVRVSVGLENSDVLCNVFQRAIEKALGE

SEQ ID NO: 14845 - DNA, 1884 bp, Magnaporthe grisea 70-15
  CDS (1)..(1884)
atgatcgaggtggagcttggcgcgtcgataccgccagacactgcacatgcagtgagcgtgtcgctgccgacatggcaggccaacgtgggatatgaggagggccagtcatgggtggtcgaccgcatgacgactggctaccctaggttctttatccacaagaccatcactggctttgccgatgagctggccgcaagatttggccaacccgggcagaaggccatgttgttccccaacaggcaggctgctttgagatgcgtcgattacgtcaggggacgtgccccgtcgcaatcggcactggctggcctcgacgctgtgcacctgaccctgacccctgaggcccccaaggtcgttgtcgaccagctcaggcccatctcacccgccgtatcggctgtgctgctgtcccccgaggcgttcccggtcgccaaggagtactggcagcactctggcgacggtgtctcgagccggagggccgagttttgccagaacctcttctcggccaaactgctggtcccagaaggctcatcacccctttcgccccagccgccagtcttcaagtccgccaagggaccgaggcggtaccgccgggagacgccatcaaacgacacacctgcgcccaacggtaccaacggggccaccacgcctcccaaagcagccaagacgcaagagcaagagtcggaagaggagacggagcgcttcctcgaggagcggttcgggcgtaacctcgacatctccctcctcccccgcgcgcgatcggccatcaagaggcgcatcgctggtgccctttcagcggaccatgacatctccagcagccacacattcccagccatggagtccaacacgcgcggcgtcaacaacctcgtggaagatgacgtgctcatatatccctgcggcatgaacgccatcttccatgcccaccggctcctcatgtcggcgcgcggccgtgatcttaagagcatcaactttggcttcccctatgttgacacgctcaagattctccaaaagtttggccccggctgcgtcttctacggccacgcctccgaggccgacctggacgacctggaacgccgcctagaggccggcgagcggtacctggcgctcttttgcgagttcccaggcaacccgctgcttacgtgtcccaacctggcccggatccgtaccatggccgacaagcacgactttgccgtcgtcgtcgacgagaccatcgggaccttttccaacatcaacgtgctgcagtacgccgacattgtggtcagcagcctaaccaagatcttctcgggtgactgcaatgtcatgggcggcagcagcatcctgaaccccaacgggcggtactacggcgccctcaaggccgccgtggcgaccgactacgaggacacgtactgggccgaggacgtgctcttcatggagcgcaacagccgcgactttgcctcgcgcgtcgtccgcatcaacgtcaacgccgaggccgtttgcgacctgctccacagccacccgctggtccgccgcgtgcactaccccagggtcaacgcggaccgcgcgaactacgagcagtgccggctgccatcgggaggctatggaggcttgctctcggtcgtgtttcgcgacaaggaggccgccgtggccttttacgacgccatcaagacggcaaagggccccagcctcggtacaaacttcaccctggtctcgccatatgtcctcctcgcccactacaacgaactggactgggccgctagcctgggcgttgaccccaacctgctgagaatcagtatcgggctgggcgagacggaggagctcgttgacacgtttaagaaggcgctcgaagtggcagaggtcgcggtcggcgcggctgggaaggaggaggctccggctgctgcacctaaggtccagtag

SEQ ID NO: 14846 - protein, 627 aa, Magnaporthe grisea 70-15
MIEVELGASIPPDTAHAVSVSLPTWQANVGYEEGQSWVVDRMTTGYPRFFIHKTITGFADELAARFGQPGQKAMLFPNRQAALRCVDYVRGRAPSQSALAGLDAVHLTLTPEAPKVVVDQLRPISPAVSAVLLSPEAFPVAKEYWQHSGDGVSSRRAEFCQNLFSAKLLVPEGSSPLSPQPPVFKSAKGPRRYRRETPSNDTPAPNGTNGATTPPKAAKTQEQESEEETERFLEERFGRNLDISLLPRARSAIKRRIAGALSADHDISSSHTFPAMESNTRGVNNLVEDDVLIYPCGMNAIFHAHRLLMSARGRDLKSINFGFPYVDTLKILQKFGPGCVFYGHASEADLDDLERRLEAGERYLALFCEFPGNPLLTCPNLARIRTMADKHDFAVVVDETIGTFSNINVLQYADIVVSSLTKIFSGDCNVMGGSSILNPNGRYYGALKAAVATDYEDTYWAEDVLFMERNSRDFASRVVRINVNAEAVCDLLHSHPLVRRVHYPRVNADRANYEQCRLPSGGYGGLLSVVFRDKEAAVAFYDAIKTAKGPSLGTNFTLVSPYVLLAHYNELDWAASLGVDPNLLRISIGLGETEELVDTFKKALEVAEVAVGAAGKEEAPAAAPKVQ

SEQ ID NO: 14847 - DNA, 1794 bp, Gibberella zeae PH-1
  CDS (1)..(1794)
atgccggtaattggcctgggtgaatccatcccttctgatacagcacatgctgtcagtgtctctcttccaacttggaaagccaatgtcggatacgaagagggtgaagattgggtagtgaaccgcatgactacaggctaccctcgaggcatccaggcttttgccaaagaaatcgtggatcgttatggcagtcctggccagcaagccatgctctttcctacgccgcgagtagcgaagcggtgtctggattttatagtccaacggatctcccctgagctggcgagtcaggtccgcatcttcgactttgctcttgacaagtcaaaggagctctctcctgtattgaagaaactcacctccaccatctctgctgtgctttacccctctgatgtatttcctgttgcaaaacagtactggcaacatactggagagggtacttccagcaggcgtgctgagttttgtcatggtctcttcaatgatgatcttcttatcccggctgcccggacccctcccgaggctgttcaaagcaggcccttccgtggtccaagacgctacactcgccctggctcaatcgatggtgtttcttctccagtacctacggcacctaaacgaacttccccagagaatccagtggagtctattgagagttcgacgttcctcgaggaacgttttggtagaaatcttgacctgtccatggttgagcgtgccaagtctgcgattcgtagacgtattgcgggtgctatggctcacgaggtagacatgaacaacggtccgctaccagccatgacatccaacactcgcggcatacccagcctcgaagagaccgacgtctacctttaccctgccggcatgaacgccatcttcaatgcccatcgtgcgctgcttcatgcaagagagccggccgaaagcattaattttggtttcccttatgtcgacacgctcaaaattctccagaagtttggtcccggctgtctcttctacggccatgcatcgcctgaagaccttgatgatctggaggcacgattgaaaaagggcgagcgatacctaggcctcttctgcgagttccctggaaaccccctcttgacatgtcctgaccttacccgtatccgcaaacttgccgatgagtacgattttgctatcgtaattgacgaaacaataggcacatttgccaacatcaacgtcctccccgttgcagacattgttgtcagcagcttgaccaagattttctccggcgattccaacgttatgggcggaggtcttgtcctcaaccctgatagcaagtactatcgagcgctcaaggcagccatggaggaaatctacgaggataattactggcctgaggatgttgtcttcatggaaaggaacagccgcgattatgaatctcgcgtggtacgcaccaacgcgaactccgacgccatttgtgaggtgctgcggaatcatcaccttgtaaagcggatatactaccccaaatccaatgattccagggagcactacgaaaaggtccggctccccgatggaggatatggcggtctactatctgttgtgttccaacgcaaggagtacgcccaggcgttcttcgacgccttgcctctggccaaggggccgagtttaggaaccaacttcacactggtatccccgtatgttctcctggcacattatcaagaactagagtgggccgagtcatttggcgtcgacccgtatcttatccgtgtcagcgttggattagaagacactactgagcttggtgacatattcacagacgccttgaaggcagccgaagccgtgacagttacaggctga

SEQ ID NO: 14848 - protein, 597 aa, Gibberella zeae PH-1
MPVIGLGESIPSDTAHAVSVSLPTWKANVGYEEGEDWVVNRMTTGYPRGIQAFAKEIVDRYGSPGQQAMLFPTPRVAKRCLDFIVQRISPELASQVRIFDFALDKSKELSPVLKKLTSTISAVLYPSDVFPVAKQYWQHTGEGTSSRRAEFCHGLFNDDLLIPAARTPPEAVQSRPFRGPRRYTRPGSIDGVSSPVPTAPKRTSPENPVESIESSTFLEERFGRNLDLSMVERAKSAIRRRIAGAMAHEVDMNNGPLPAMTSNTRGIPSLEETDVYLYPAGMNAIFNAHRALLHAREPAESINFGFPYVDTLKILQKFGPGCLFYGHASPEDLDDLEARLKKGERYLGLFCEFPGNPLLTCPDLTRIRKLADEYDFAIVIDETIGTFANINVLPVADIVVSSLTKIFSGDSNVMGGGLVLNPDSKYYRALKAAMEEIYEDNYWPEDVVFMERNSRDYESRVVRTNANSDAICEVLRNHHLVKRIYYPKSNDSREHYEKVRLPDGGYGGLLSVVFQRKEYAQAFFDALPLAKGPSLGTNFTLVSPYVLLAHYQELEWAESFGVDPYLIRVSVGLEDTTELGDIFTDALKAAEAVTVTG

SEQ ID NO: 14849 - DNA, 2067 bp, Kluyveromyces lactis NRRL Y-1140
  CDS (1)..(2067)
atgaaaatatcgacagaagttggggactctatacctcctaatactaagcacgcagtgtctgtttgccttccaacatgggaagctacggttggatatgaggaaggtgaaagttgggttgtggaaaagatgacaactgggtatcccaggttttttatacacaagtcaattcaaagactatgcaatgtgttaaaggaaaaatatgcaaagcaggacgagacgtgtcttgtgttccccagttatgaagtggcaaagcgatgccgtgaattttgcaaagttaagaataaggatactttaagaaataagatcagaatattgcagttagccacctccaaacctttgaacaaagaagaagaatcatggagaagagaatgtaaaattgctgtagtatttgctaaatccgagctgtatccactattgaagcaatactggcaacatagtggtgaaattatatcatccagattggcagagtacgtgttagacgaattatttgaagttgaaaataaagatggtaaaatggtcgccaagcaaggtgaagagtttgttgaacgtagatttggcagaagtttagatttttcatatgccaatagagccaaattactaatcaagagacgtattgcgaggaaagtagtggacgtcgaagaggatgatgagcaacccacacagaccaatgacgctaacagtgtcaatcataattctttgacgagagtgaatgtcatccacgaggaacaagatggtacttcgacatttgatcacacagctgactcttctgctgaagatatagtcagagtgcagttcttaggtgctgatgatgatgacgatgacggtaattttgttgatatggaccaaaactctacgattcctgcagaaccatttgatgaagttgaatttgagcaaatcaatatatctccgccttcaccagaacgtgagaggacagatcctatttcgctgacagatgtaatagagtctcagaacgtgtcctcttcaattcatctaaaccctgaacgggacgtgtttttgttcccaagtggtatggcttcgatttttactgcacatagattattgttagagcttgattccaagcgagttaaacgcaataacgttaatacctccgcaaatactccgattggatacggtggtgcgtataagaaaactgtcatgtttgggtttccatatactgacacattaagcattttgagaaagtttaatcatacccatttcttgggacaaggtgattctcaggctatgaacgaattgaaagagattcttcatggtggtgagcaaattttggcggtatttattgagagtccatcgaatcctttgctcaagatgggtgatcttgtggaattgaaaagactctcagatctatacggtttctacatagtcattgatgagactgttggtgggttcttgaacattgatgtactaccttacgcggatgtagtatgcagttcattgacgaaaattttcagtggtgattccaatgtcatggccgggtccattgtcttgaatcccagatcgagattatacgagtttgccacgactatgttacatttgactgaaaaatggtacgaggacttattgtggtgcgaagatgctatctgtctcgagagaaattcaagagatttcatatcgcgtagtatattggtgaatgaaaatacagagtcgttattggaaaaggtgatcttaccacagcaaggagaggggaaattgttcaagaaggttttctatccaaaatacaccaacgctgaaacgaaaaagaattatgaccaagtaaaagcaaaaactgcaggaagtggatatggtggattgttttcagtgacgttttacaacatcgagcaggctaagatgtttttcaattccttgaacttgtgtaagggaccgtcattagggaccaatttcacactagcatgtccttatacagtcctagcacattaccaagagatggaagaggtggccaagtttggccttgaagataatcttgtaagagtttcggtgggacttgaaagcaaacaacaccttgaaaaagtgtttcaaaccgccatcgatgcagctttaactgttcaataa

SEQ ID NO: 14850 - protein, 688 aa, Kluyveromyces lactis NRRL Y-1140
MKISTEVGDSIPPNTKHAVSVCLPTWEATVGYEEGESWVVEKMTTGYPRFFIHKSIQRLCNVLKEKYAKQDETCLVFPSYEVAKRCREFCKVKNKDTLRNKIRILQLATSKPLNKEEESWRRECKIAVVFAKSELYPLLKQYWQHSGEIISSRLAEYVLDELFEVENKDGKMVAKQGEEFVERRFGRSLDFSYANRAKLLIKRRIARKVVDVEEDDEQPTQTNDANSVNHNSLTRVNVIHEEQDGTSTFDHTADSSAEDIVRVQFLGADDDDDDGNFVDMDQNSTIPAEPFDEVEFEQINISPPSPERERTDPISLTDVIESQNVSSSIHLNPERDVFLFPSGMASIFTAHRLLLELDSKRVKRNNVNTSANTPIGYGGAYKKTVMFGFPYTDTLSILRKFNHTHFLGQGDSQAMNELKEILHGGEQILAVFIESPSNPLLKMGDLVELKRLSDLYGFYIVIDETVGGFLNIDVLPYADVVCSSLTKIFSGDSNVMAGSIVLNPRSRLYEFATTMLHLTEKWYEDLLWCEDAICLERNSRDFISRSILVNENTESLLEKVILPQQGEGKLFKKVFYPKYTNAETKKNYDQVKAKTAGSGYGGLFSVTFYNIEQAKMFFNSLNLCKGPSLGTNFTLACPYTVLAHYQEMEEVAKFGLEDNLVRVSVGLESKQHLEKVFQTAIDAALTVQ

SEQ ID NO: 14851 - DNA, 1776 bp, Debaryomyces hansenii CBS767
  CDS (1)..(1776)
atgagtaacaacggtccatctcaagaaattggagcccctattccaagtaatacacctcatgcagtttctgtaaccttaccaacatgggaggctacagtagggtatgaggaaggtgaagattgggttgtgaataaaatgagttctgggtatccaagatttttcatacattcagttatacaggatttggcgaacaatatcgaagcaaaatatggtagagaaggtgaaagatgtatggtatttccttcctatagtgttgctaaaagatgtagagaattcgttaaagcaaaaagtgataaatcaaatttatcagttagaatcttgcaattaagtacagctccaccagaagacgaattggaaaaatccctggttatcgaatcaaatataggtgttatttttttcccttccagtgaattcccattggctaagaattattggcaacattcgggtgaaggtattagttcgagaatgggtgaatatgtattgaaagaaatatttcacaaggaaaagaaacctagtacatataaaggaagccatatgaaacaagaattacaagcacaaagaattcagcaaagatcaccttcgctttccaaatctttgcaatcgcctagtttttcatcaaacgaagaaacagagaaggaatttaacacgttcattgaacaaaagtacggtagagttttggacttaaaatttgcagcgcaagccaaagtagcattgaggagaagaatctgtggtaagatcgataagtcccatagccaagaagacgaaatgcaaaaagctagacgtggtaaacatttaagtgaaactgatgtctacttgtatccatcaggaatggcagctattttcaatgctcaccacgctttattacaagtagcggaaacaaaaaataagtcggtttgttttggattcccatatgttgatactttaaacatcttaaagaagtttggtcctggtgttcatttctttggttttggggatgatgaatcgttggaagatatggaatcacaattgaaaagtggcgaaataaaaattaccgctttgttttgtgaatgtccatctaatccattattgaagacaccaaatttaaaaaagattagggagttggctgacgaatataattttgcagtagtgatagatgaaactgttggtaattttgtcaatatccacgttttaccatatgctgatattgttgcttcttctttaacaaaagtattttctggtgattctaatgttatggcaggatcgttaatcttgaatcctgagtcgaaaatgtatcatacattgaagaagtattttgacgatgagtatgaagatttattctgggctgaagatgctttatatttagaaagaaactctcgtgattttgctgaaagatcggctaaaattaatgaaactgctttggcaacggtcgatttattacaacagaatcctttgatttcaaaggtgtattacccatcgatttctgatactaagcattattatgacgccattaagacacctaatggtggatatggtggattgatatctttcatctttaaagaaccagaagatgcgatatgttttttcaatgccgttaatttacataagggtccatccttgggaactaatttcactttggcttgtccatatgctattttagcacactatcaagaattagacgagatagcaaagtgggacatcgatagaaatttgatcagaattagtattggtttagagctggagtctgatttactcggtgttttgaacaagagtttaaaacaagcggcagcccaacattag

SEQ ID NO: 14852 - protein, 591 aa, Debaryomyces hansenii CBS767
MSNNGPSQEIGAPIPSNTPHAVSVTLPTWEATVGYEEGEDWVVNKMSSGYPRFFIHSVIQDLANNIEAKYGREGERCMVFPSYSVAKRCREFVKAKSDKSNLSVRILQLSTAPPEDELEKSLVIESNIGVIFFPSSEFPLAKNYWQHSGEGISSRMGEYVLKEIFHKEKKPSTYKGSHMKQELQAQRIQQRSPSLSKSLQSPSFSSNEETEKEFNTFIEQKYGRVLDLKFAAQAKVALRRRICGKIDKSHSQEDEMQKARRGKHLSETDVYLYPSGMAAIFNAHHALLQVAETKNKSVCFGFPYVDTLNILKKFGPGVHFFGFGDDESLEDMESQLKSGEIKITALFCECPSNPLLKTPNLKKIRELADEYNFAVVIDETVGNFVNIHVLPYADIVASSLTKVFSGDSNVMAGSLILNPESKMYHTLKKYFDDEYEDLFWAEDALYLERNSRDFAERSAKINETALATVDLLQQNPLISKVYYPSISDTKHYYDAIKTPNGGYGGLISFIFKEPEDAICFFNAVNLHKGPSLGTNFTLACPYAILAHYQELDEIAKWDIDRNLIRISIGLELESDLLGVLNKSLKQAAAQH

SEQ ID NO: 14853 - DNA, 1785 bp, Aspergillus nidulans FGSC A4
  CDS (1)..(1785)
atgcttcaggaacccggaggcccggtacccccaaacacagatcatgctgtgagcgtgtcacttcccacatgggaagcgaacgtggcgtacgaagagggggagctatggcttgtaaataagatgcaatgcggttatccccgattctttgtccatcccatcatccaggagctcgcccaagaaattgttgctcgatttgggaatccagaatatgaggcaacgacccttttcccttctccgaacactgcgcgagtgtgtcacacattcatcctatcaagaatttcacgcgaagaagcacataaaattcgcgtccttgactttgttcctaccaaggagctggaaaccgagctgagcaccattcagtcacttctatcgtgcgttatatatcctaaggagcacgcaaaaatcgcgaaacaagcgtggcaacatacgggtgacggcgtttcaagcaggcggggtgaattctgtcttggtgctctgaaggatggtcttcttacggaaaggaaaaatgttacaggagatgcaacgcgccaaatcatccacaagggccctcggagatatcagggaaagggttcaataaacgggataggtaaagtttcatcacataacgcagtttcagccaacaaaccgcacgaaggacgtgagtcagttcagtttattgaagaacggtttggaaggaacttgagtacctcactagccagcaaggcaaagattgccgtacgcaggcgaatagcaggtgtgctgacggcagacgtggaattgaatgaggctttggagaaagcctcacaggaaggaagagtagcagggctttcagaatcggatgttttccttttcccaagcggcatgagttcgatcttcaattcccacaggttgctcctcgaagcgaggggttctatgaaaagcgtctgcttcggattcccctacattgatacattgaaaatccttgagaaatggggccccggatgtgtcttttacgggcgagggtcatctgaggatctaaatgatctggaggcacggttagccggtggagagagattcttggctctcttcactgaattcccgggcaatccccttctcaagacacctgatcttaagcggatccgagccttagccaacaagtatgagtttgcggtggtcgtcgatgaaacagtgggaaattttctcaacatcaacgtgctttctcacgcggacatcgtggtcagtagtttgacgaaaatcttcagcggagacagcaatgttatgggagggagtgcggtgctaaatccgcacggtcgatactatccattattgaaagatacattcaaccggggctatgaagacaacttatgggtagaagatgccgtcttcctcgaaaggaacagccgcgacttcgtttctcgcattgaaaaaatcaatcatacaacagaggtgataacagcaatgctccaagaatctccaattgttaagaatgtgtattaccctaagttcagtcctacactgcctttctacgaggcatttcgcactccaaatggaggctatggtggtttgttctctgtcactttccactccacagcagaggcgattgccttcttcgacaacctagaagtccacaagggacccagtcttgggactaacttcacgctgagttctccgtatacgctacttgctcactatagtgagcttgactgggcaagctcatttggcgtagagtttgacttggtgcggataagcgtcggtttggaagatgtcccattgcttcgcgctaaagtgcaacaagcacttgatgcagtcgctaagatatctaaatag

SEQ ID NO: 14854 - protein, 594 aa, Aspergillus nidulans FGSC A4
MLQEPGGPVPPNTDHAVSVSLPTWEANVAYEEGELWLVNKMQCGYPRFFVHPIIQELAQEIVARFGNPEYEATTLFPSPNTARVCHTFILSRISREEAHKIRVLDFVPTKELETELSTIQSLLSCVIYPKEHAKIAKQAWQHTGDGVSSRRGEFCLGALKDGLLTERKNVTGDATRQIIHKGPRRYQGKGSINGIGKVSSHNAVSANKPHEGRESVQFIEERFGRNLSTSLASKAKIAVRRRIAGVLTADVELNEALEKASQEGRVAGLSESDVFLFPSGMSSIFNSHRLLLEARGSMKSVCFGFPYIDTLKILEKWGPGCVFYGRGSSEDLNDLEARLAGGERFLALFTEFPGNPLLKTPDLKRIRALANKYEFAVVVDETVGNFLNINVLSHADIVVSSLTKIFSGDSNVMGGSAVLNPHGRYYPLLKDTFNRGYEDNLWVEDAVFLERNSRDFVSRIEKINHTTEVITAMLQESPIVKNVYYPKFSPTLPFYEAFRTPNGGYGGLFSVTFHSTAEAIAFFDNLEVHKGPSLGTNFTLSSPYTLLAHYSELDWASSFGVEFDLVRISVGLEDVPLLRAKVQQALDAVAKISK

SEQ ID NO: 14855 - DNA, 1788 bp, Candida albicans SC5314
  CDS (1)..(1788): transl_table=12
atgccttcacaagaaatagggatgcctatcccaaatatgccacatgctgtttctgtgactttaccaacatgggaagcaacagtaggttatgaagaaggtgaagattgggtagtttcaaaaatgaattcaggttatcctcgatttttcattcattcttcaattcaaaaattatgttccaatttagaaaaaaaatatggtcgagacggagaaagatgtatgtgtttccccagttataaagtagctaaacgatgtcgtgaatttattaaagctcatactgttaatcaaacttcatttaaaattcgagtattacaattgagtacacttgaaccaagtaacgatacagaaaaatcaactatgataggagccactattggagtagttttcttccctagatcagaatatcctttggcaaagaattattggcaacattcaggtgaaggtatttcatcaagaatgggggaatacattttaaaagaattatttgaaaaagataatgacaataatgataattataataattccaatggtgctgatatttctaaaatgtcaggaaacctcaaacaagaactccaatctttacaaattcaaagtcgttctccatccatttcggcctctcgagcttctagtgctgctggatataatattgatgatgttaaccgtgattttgattcatttattgaacaaaaatatggtcgagttttagatttgaaatttgctaatgaagccaaagcagctttaagaagaagaattgctggcaaggcagataaatcaactgaacgagttgaagaattagaaagagcgaaaagaggtaaacatttaaatgaaaatgatgtatatttattcccctcagggatggcatcgatattttatgctcatcatgcattactcaatgtttctgatcagcctaaaaaatctgtttgttttggattcccgtacgttgatactttgaatatattgaagaaatttggtcctggggtacatttccttggattaggggatgatgaatcgttagataatttagaagaacaattaagtcaaggattggatatattggcacttttctgtgaatgtccttcaaatccacttttgaaaactccaaatttgcatagaataagacaattggccgataaatataattttgccattgttatagatgaaacggtggggaatttcattaatattcatgtattgccatatgctgatatggtggcatcttcattaactaaagtattttccggggattcaaatgttttagctggatcattgatattgaatcctgattccaagtattatactattttgaaaacatttttcaataaagaatatgaagatttattttgggctgaagatgccctttggttagaacgtaattcacgtgattttgttgaaagagtacataaaattgatgatacgtcagcaaaagttgttgaattattacaaaatagtccattgatttcacaaatttattatcctagtgtttctgattcgaaaaaatactatgatgttataaagaatgaaggtggtggttatggaggattaatatcatttttatttaaacaacctcaacaagctgtcaaatttttcaacgcagtaaatcttcacaagggtccatctttaggtacaaattttactttggcatgtccttatgctatattagctcattatcaagaattagatgaaatttctcaatggggggtcgatagaaatttgattcgtataagtattggattagaagatccaactgaattgcttgatgtattgcaaaaaagtttagatgaaagtatatag

SEQ ID NO: 14856 - protein, 595 aa, Candida albicans SC5314
MPSQEIGMPIPNMPHAVSVTLPTWEATVGYEEGEDWVVSKMNSGYPRFFIHSSIQKLCSNLEKKYGRDGERCMCFPSYKVAKRCREFIKAHTVNQTSFKIRVLQLSTLEPSNDTEKSTMIGATIGVVFFPRSEYPLAKNYWQHSGEGISSRMGEYILKELFEKDNDNNDNYNNSNGADISKMSGNLKQELQSLQIQSRSPSISASRASSAAGYNIDDVNRDFDSFIEQKYGRVLDLKFANEAKAALRRRIAGKADKSTERVEELERAKRGKHLNENDVYLFPSGMASIFYAHHALLNVSDQPKKSVCFGFPYVDTLNILKKFGPGVHFLGLGDDESLDNLEEQLSQGLDILALFCECPSNPLLKTPNLHRIRQLADKYNFAIVIDETVGNFINIHVLPYADMVASSLTKVFSGDSNVLAGSLILNPDSKYYTILKTFFNKEYEDLFWAEDALWLERNSRDFVERVHKIDDTSAKVVELLQNSPLISQIYYPSVSDSKKYYDVIKNEGGGYGGLISFLFKQPQQAVKFFNAVNLHKGPSLGTNFTLACPYAILAHYQELDEISQWGVDRNLIRISIGLEDPTELLDVLQKSLDESI

SEQ ID NO: 14857 - DNA, 1788 bp, Candida albicans SC5314
  CDS (1)..(1788): transl_table=12
atgccttcacaagaaatagggatgcctatcccaaatatgccacatgctgtttctgtgactttaccaacatgggaagcaacagtaggttatgaagaaggtgaagattgggtagtttcaaaaatgaattcaggttatcctcgatttttcattcattcttcaattcaaaaattatgttccaatttagaaaaaaaatatggtcgagacggagaaagatgtatgtgtttccccagttataaagtagctaaacgatgtcgtgaatttattaaagctcatactgttaatcaaacttcatttaaaattcgagtattacaattgagtacacttgaaccaagtaacgatacagaaaaatcaactatgataggagccactattggagtagttttcttccctagatcagaatatcctttggcaaagaattattggcaacattcaggtgaaggtatttcatcaagaatgggggaatacattttaaaagaattatttgaaaaagataatgacaataatgataattataataattccaatggtgctgatatttctaaaatgtcaggaaacctcaaacaagaactccaatctttacaaattcaaagtcgttctccatccatttcggcctctcgagcttctagtgctgctggatataatattgatgatgttaaccgtgattttgattcatttattgaacaaaaatatggtcgagttttagatttgaaatttgctaatgaagccaaagcagctttaagaagaagaattgctggcaaggcagataaatcaactgaacgagttgaagaattagaaagagcgaaaagaggtaaacatttaaatgaaaatgatgtatatttattcccctcagggatggcatcgatattttatgctcatcatgcattactcaatgtttctgatcagcctaaaaaatctgtttgttttggattcccgtacgttgatactttgaatatattgaagaaatttggtcctggggtacatttccttggattaggggatgatgaatcgttagataatttagaagaacaattaagtcaaggattggatatattggcacttttctgtgaatgtccttcaaatccacttttgaaaactccaaatttgcatagaataagacaattggccgataaatataattttgccattgttatagatgaaacggtggggaatttcattaatattcatgtattgccatatgctgatatggtggcatcttcattaactaaagtattttccggggattcaaatgttttagctggatcattgatattgaatcctgattccaagtattatactattttgaaaacatttttcaataaagaatatgaagatttattttgggctgaagatgccctttggttagaacgtaattcacgtgattttgttgaaagagtacataaaattgatgatacgtcagcaaaagttgttgaattattacaaaatagtccattgatttcacaaatttattatcctagtgtttctgattcgaaaaaatactatgatgttataaagaatgaaggtggtggttatggaggattaatatcatttttatttaaacaacctcaacaagctgtcaaatttttcaacgcagtaaatcttcacaagggtccatctttaggtacaaattttactttggcatgtccttatgctatattagctcattatcaagaattagatgaaatttctcaatggggggtcgatagaaaaatgattcgtataagtattggattagaagatccaactgaattgcttgatgtattgcaaaaaagtttagatgaaagtatatag

SEQ ID NO: 14858 - protein, 595 aa, Candida albicans SC5314
MPSQEIGMPIPNMPHAVSVTLPTWEATVGYEEGEDWVVSKMNSGYPRFFIHSSIQKLCSNLEKKYGRDGERCMCFPSYKVAKRCREFIKAHTVNQTSFKIRVLQLSTLEPSNDTEKSTMIGATIGVVFFPRSEYPLAKNYWQHSGEGISSRMGEYILKELFEKDNDNNDNYNNSNGADISKMSGNLKQELQSLQIQSRSPSISASRASSAAGYNIDDVNRDFDSFIEQKYGRVLDLKFANEAKAALRRRIAGKADKSTERVEELERAKRGKHLNENDVYLFPSGMASIFYAHHALLNVSDQPKKSVCFGFPYVDTLNILKKFGPGVHFLGLGDDESLDNLEEQLSQGLDILALFCECPSNPLLKTPNLHRIRQLADKYNFAIVIDETVGNFINIHVLPYADMVASSLTKVFSGDSNVLAGSLILNPDSKYYTILKTFFNKEYEDLFWAEDALWLERNSRDFVERVHKIDDTSAKVVELLQNSPLISQIYYPSVSDSKKYYDVIKNEGGGYGGLISFLFKQPQQAVKFFNAVNLHKGPSLGTNFTLACPYAILAHYQELDEISQWGVDRKMIRISIGLEDPTELLDVLQKSLDESI

SEQ ID NO: 14859 - DNA, 1809 bp, Aspergillus niger
  CDS (1)..(1809)
atgatccaagacattggaggtccagtccctcctcacactgatcacgcagtcagtgtgtcccttccaacatggaaagcgaatgtcgcatacgaggaaggagagtcgtgggttgtggataagatgcaatgtggataccctcgcttctttatacatcccattattcaggatctggcgagggagatcgtacgtcgctatggcagcccagaattggaaacggctatactatttccttctctcaaaacatcaggggtctgttattcgtttctcaaatcgaaaatactagccgaggaaccctgtaatgtccggacaatagatttcgccctacccattcaaggcgaagacgcgccgtctggtacggattcgatactatcgtgcgtgatatatcccatccaacacgcgccgattgccaagcaggtctggcaacatacaggaaatggaatctcaagtagacgtgctgagttctgcctgaacgcgttaagggatgggtttctcgtggaaaggaaacctgcagctcaatgtatggcatcgccacggtttttcaaggggccaaggaggtatcagggtcgagagtctataagtggaatgtctcagggaagtggaacgcacgcccgcgacagtactacgggtacaaacacgacaaccaggaacatgcaagatggccgcgaacatgtccagttcattgaagaacgattcggtcggaatctaagcacctcgctggccggtcaggcaaggctggctgtacggcgacgcattgcgggcgttctgacagccgacatggagcttaatgaggcccttgaagaaaagtcaggagaaggccgtgtcgcggggctgacagagtccgatgtttttctctttccgaccggcatgagttccatcttcaacgctcatcagatgttgatggctgcgaagggagagatgaagagcatctgcttcggattcccctataccgacaccctaaagatactccaaaaatggggcccgggctgtctgttttatggtcatggctcttcggaggatctcgatgacctggagtcgcagctactgaaaggagagagattccttgctcttttcactgaattcccgggcaatccgttactgaaagcccccgatttgaagagaatcaggtcactcgccgacaggtataatttcgctgttgtagtagatgagacggtagggaattttctcaacatcaatgtgcttccctatgcagatattgtggtaagcagcttgaccaaaattttcagtggtgatagtaatgtcatggggggaagtgcagtactcaacccccatgggcattattacgggtctctaaaaaacatatttgcacgcgaatatgaggacaatctttgggcagaagatgccgtattcctcgaaaggaatagccgcgatttcgtatccagaattgataagattaataaaaccacggaagacatcacggcgatgttggaggactctccactcgtgaaacaggtatactatccgaagtacaactcttcaaagccattgtatgaagcatttcgcaaccaaagtggaggatatggcggtctattttcggttacattccattcaacagcagcggcagttgccttttttgatcatctcgaagtgctcaagggacccagtctcggtactaattttacactgagctgcccttacactctgttggcgcattatagtgaactagaatgggcaagctcattcggtgtcgactttgacctggtaaggataagtgtcggcttagaagacgtttcggatcttcgccagcgatttcagcaggccctgaaggctgtcgctgaagtaaacgcataa

SEQ ID NO: 14860 - protein, 602 aa, Aspergillus niger
MIQDIGGPVPPHTDHAVSVSLPTWKANVAYEEGESWVVDKMQCGYPRFFIHPIIQDLAREIVRRYGSPELETAILFPSLKTSGVCYSFLKSKILAEEPCNVRTIDFALPIQGEDAPSGTDSILSCVIYPIQHAPIAKQVWQHTGNGISSRRAEFCLNALRDGFLVERKPAAQCMASPRFFKGPRRYQGRESISGMSQGSGTHARDSTTGTNTTTRNMQDGREHVQFIEERFGRNLSTSLAGQARLAVRRRIAGVLTADMELNEALEEKSGEGRVAGLTESDVFLFPTGMSSIFNAHQMLMAAKGEMKSICFGFPYTDTLKILQKWGPGCLFYGHGSSEDLDDLESQLLKGERFLALFTEFPGNPLLKAPDLKRIRSLADRYNFAVVVDETVGNFLNINVLPYADIVVSSLTKIFSGDSNVMGGSAVLNPHGHYYGSLKNIFAREYEDNLWAEDAVFLERNSRDFVSRIDKINKTTEDITAMLEDSPLVKQVYYPKYNSSKPLYEAFRNQSGGYGGLFSVTFHSTAAAVAFFDHLEVLKGPSLGTNFTLSCPYTLLAHYSELEWASSFGVDFDLVRISVGLEDVSDLRQRFQQALKAVAEVNA

SEQ ID NO: 14861 - DNA, 1992 bp, Cryptococcus neoformans
  CDS (1)..(1992)
atgcccacatcaacgagtaaccttccagcgcctatccctcttggttgttccgttcccgctcttacggctcatgccatctctgtgtctctccccacttgggaggacaacatcggatacgaagaaggccacaaacgcgtagtcgacaaaatggagactggttaccctcgattctttattcaccgtagtattcaaaagctcgctgccctatgtctctccaaattcggtcagcctaacgaactttgtattctcttgcccgctcctcgtgtcgctgctgcaggccgtgatttcctcgcagctcaagatcctcctatcccttctcgaacggttgagttcgttatctgtccttccagtaaatcgctcaccgatctatcctccgccaaatccctcggtatcgactgtatcgagctccagatccttttgtttgataaggacaaatggccttatggtaaagcattctggcagcacaccggtgatggtgtttcgtcacgtatggctgagagggccctctctttcctcggtgagacaccagctggtgtccagtccagagcgccttctcctccaaccttagaaaggcccgcgagcaaggctcccagttcaaggaacagacattactctaagaggaccggttcggtacctcctaccccgactacacctagcgaatcaccctacagcatgcctcaatcctctacggtcctcgagaagcctccagtcgaccccatcacagacgaaaacctcacctctgatttgacgacttacctcgaagaacgatacgggcgcaacctccctttattcaacgctccccttgccaagcaagctctcaagcggcgaattgctggaggattgttgcctagtgatgaggactatggcaaaatcgaggatgttgctcgaggtgccggttcgggaaagaaggccgtgactgaggaaaatgtgtatctttacccctgtggaatgagcgccatttggcacgcgcacgacatttcgaggattgcgcgaaagcttcagggcgaggctgaagggaaaagtgtctgctacggtttcccgtacactgacactttgaaaattcttaataaatggggacctggttgccatttccttggtactggcggatccgaagacatcaatgcccttgagaaaatcctcgtggaggccaaagaaaatcccaatgaaccccctattcttgctttattctgtgaattcccatctaatcccttgctccgaagtccagatcttgttcgcatcagagaacttgcggacaaatatagtttcttcatcatcgttgatgaaactattggtaacttcattaacgtcgaagtcgtgacctttgcggatattgtggtcagcagtttaaccaagattttcagtggtgatgccaatgtgatgggaggaagccttatccttaaccctaatggccctcattacgacacactcaaggctgctcaatcttcggtatacgaagattattattatcctgaagatgcggtttatatggaacgcaactcccgcgactatcgcgctcgtatcaagaaagttaacgacaacgcatacgacatgtgcgatttcctgcacaaacggtccctggacgatgagtctactcctgctgaaggcaaagtgttaaagaaggtatactatccacggtacatcacacctgagacttatgctcaagctcaacgacaccccacgctcggcaaagggggttatggtggtcttttctccttaacatttacctcgctcgctgcgtcaaaagcgttttacgatgctatcggatgtgcaaagggcccatcattggggacgagcttcacccttgcttcgccatataccatcttggcccattaccttgaattggactgggcggctggttacggtgtggagaagggattggtcaggatcagtgtgggacaggaagatcaatcagtgttgaagacgtggtttgaaacagcattggcggcaagtgaggcagcaggtagggcagaaaaggaagggcgaaaggaatag

SEQ ID NO: 14862 - protein, 663 aa, Cryptococcus neoformans
MPTSTSNLPAPIPLGCSVPALTAHAISVSLPTWEDNIGYEEGHKRVVDKMETGYPRFFIHRSIQKLAALCLSKFGQPNELCILLPAPRVAAAGRDFLAAQDPPIPSRTVEFVICPSSKSLTDLSSAKSLGIDCIELQILLFDKDKWPYGKAFWQHTGDGVSSRMAERALSFLGETPAGVQSRAPSPPTLERPASKAPSSRNRHYSKRTGSVPPTPTTPSESPYSMPQSSTVLEKPPVDPITDENLTSDLTTYLEERYGRNLPLFNAPLAKQALKRRIAGGLLPSDEDYGKIEDVARGAGSGKKAVTEENVYLYPCGMSAIWHAHDISRIARKLQGEAEGKSVCYGFPYTDTLKILNKWGPGCHFLGTGGSEDINALEKILVEAKENPNEPPILALFCEFPSNPLLRSPDLVRIRELADKYSFFIIVDETIGNFINVEVVTFADIVVSSLTKIFSGDANVMGGSLILNPNGPHYDTLKAAQSSVYEDYYYPEDAVYMERNSRDYRARIKKVNDNAYDMCDFLHKRSLDDESTPAEGKVLKKVYYPRYITPETYAQAQRHPTLGKGGYGGLFSLTFTSLAASKAFYDAIGCAKGPSLGTSFTLASPYTILAHYLELDWAAGYGVEKGLVRISVGQEDQSVLKTWFETALAASEAAGRAEKEGRKE

SEQ ID NO: 14863 - DNA, 1818 bp, Podospora anserina
  CDS (1)..(1818)
atgcccgccttcaacctcggcgagtctatcccgccgcacacggagcatgtaagcaactttatggcggtgagcgtgtcactaccaacgtggagagcaaatgttggttatgaagaaggagaggactgggttgttggcagtatgaccactggttatcctcgctttttcatccacaggagcatccaagcttttgccaaagacattctggagaaaactgggcggaaagggctggttgcttttctgttcccaactcgtcaggttgctgcccggtgtgtgagctttgtcaaattacgcgctcctcctgccatcgtgtcatctcttgaagttctgcatctggttcttgacccggcaaacccgcagtccaaggctcttcgtgggctatctccctctatctcggccgtcatctgctctcccgagggtttcagttttctgaagcagtattggcagcacacgggcgatggtgtctctagccgcagggcagagttctgtcacagtctcttcaaggatggtctgttgcgtgtggatgaaccccccaagaacacggccgcgcccatgagcccaaagccatgcagaggaccaaagcgttaccaacgagggggctctctcgacgcaggaaagccatcaaccacatcccaaacgtcaacaaccgtccctgacagagaggagacgtcgcgattcttggaggagcgcttcggtcggaacctggatgtttcttttgttgagcccgccaaatcggccatcaaacggcgaattgccggggcgctcagaagcgatcgtgaactaacagctagcccggtgcccgaaaaggagatggaatccaatacccgtggtgttgtcaacctccgcgaggatgacatctatcttttcccagccggcatgaacgccatctttaacgctcaccgtgcccttcttggagcgcgtggaggtctcaagtcggtcaacttcgggttcccttatgttgacaccctcaagattcttgagaagtttggccctggatgcgtcttctacggcaatgcgtccgaggccgaccttgacgacctcgaagctcggctgaaagcaggcgagcgcttcctggggctcttttgtgaattcccgggcaatccgctcctcacttgccccaatcttgcccgcatccgcgagatggccgacaagtacgactttgccgtcgtggtggacgaaacaatcgggacctttgccaacatcaacgttctccccttcgccgatatcgtcgtctctagcttgaccaagatcttctcgggtgactgcaacgtcatgggaggcagtgccatctttaacccaaacagtcgatactactctgcgttaaaagactttgcccgcacggggtacgaggacacatactggcccgaggatgtcatgttcatggagcgaaatagccgggactttgcgtctcggattgaacggatcaacgccaacgctgaggccatctgtgatgtgtttcgtgagaacaagctcatcaaggcggtcttttacccgcgtgataacgagtccagcgccaactacgaagcctgcaaggttcctggtggagggtacggcgggttgatctcggtcgtgttccaccgcaaggagcaggctgttgcattttatgatgctgttgacacagccaaggggccaagcctgggaaccaacttcacgttgacatccccctatgtgcttttggctcactatcaagagttggaatgggcgtcgcaatttggtgttgaccctgatctgatccgcatcagcgtcgggttggaggacactgctgatattgtaaaggtgtttgaagctgcattgcatgtagcagagcacggctcgcaatag

SEQ ID NO: 14864 - protein, 605 aa, Podospora anserina
MPAFNLGESIPPHTEHVSNFMAVSVSLPTWRANVGYEEGEDWVVGSMTTGYPRFFIHRSIQAFAKDILEKTGRKGLVAFLFPTRQVAARCVSFVKLRAPPAIVSSLEVLHLVLDPANPQSKALRGLSPSISAVICSPEGFSFLKQYWQHTGDGVSSRRAEFCHSLFKDGLLRVDEPPKNTAAPMSPKPCRGPKRYQRGGSLDAGKPSTTSQTSTTVPDREETSRFLEERFGRNLDVSFVEPAKSAIKRRIAGALRSDRELTASPVPEKEMESNTRGVVNLREDDIYLFPAGMNAIFNAHRALLGARGGLKSVNFGFPYVDTLKILEKFGPGCVFYGNASEADLDDLEARLKAGERFLGLFCEFPGNPLLTCPNLARIREMADKYDFAVVVDETIGTFANINVLPFADIVVSSLTKIFSGDCNVMGGSAIFNPNSRYYSALKDFARTGYEDTYWPEDVMFMERNSRDFASRIERINANAEAICDVFRENKLIKAVFYPRDNESSANYEACKVPGGGYGGLISVVFHRKEQAVAFYDAVDTAKGPSLGTNFTLTSPYVLLAHYQELEWASQFGVDPDLIRISVGLEDTADIVKVFEAALHVAEHGSQ

SEQ ID NO: 14865 - DNA, 1833 bp, Schizosaccharomyces pombe
  CDS (1)..(1833)
atgtctgcaaatatttcttacctagtcaatccacctacagaggtcggttcatcaattccagctgatactgaacatgccatttcagttactttacctacatggaaatccaatgttggatatgaagagggagatcctaatgtaactactaaaatgaagtcaggatatccgaggttctttataagcgcacacgtcaaggattgcattagcatcataaagaaatttccagagattgagattttgaagctaaaggactacgatatgtttttgtatccttcattatccgttgctaagcaaagtgcagcttttcttgaaagtaaaggacctatagactctgcggaagtcattatttatgatgccacgaagggactgcgaaaacatcttgattcaattgaccgaaatcgcaaatatactgaagaaatacacatacctcaggtttattctgtattgtttccatccaaatactttgggattgccaagcaattctggcaacatacgggggacggtatttcaagcagacgcgcagctgcttttctgcattcctacaaaaaaattcagtctatttccgaatttttggttgcccagaggtctatttctcatctcaaaagtaaaagcagaagccgatatgcttcccatccagatctacaggctttgaatacttggatgactaacgaaggaaaccaagctaatgatgaaatggaagacgtatccctatatttggaggagagatatgggcgtaatttagatttaagtttggctacagcagctaaacttgttcttcgacgacgtatcgctggtaccttaaaagatgaagttgatttgcaaaaggctttacccaaagaagggtctcagtatttacgtgaagttaaaggtttaagtcacgacgatgtttttttatttcctactggcatgagtgctatttacaatactcatcgcatattaaggttggtgcttgatgatagccgtaaaagtgtttgttttggtttttgttatgttgataccttaaaaattttacagaaatggggatctggctgctacttttatggactaggtaatgacgagcaacttgatgagtttgagaaacggttagaaagtggagagaaagttatggcattgttttgtgagtttccatcaaatcctcttttaaactctcccgatttggttcgtattcggaaattagcagacagttatgattttgctgtcgtggttgatgaaacaattggaaattttgtcaacgttgaggttttaccattagcagatgtagttgtcagcagcctcacaaagatttttagcggtgatagtaatgtaatgggaggtagtatggttttaaatccgtcaagtcgttactactctcgaataaaagatgctatgaaggctctttatgaagacttattatatgatgaggatgctttgacattagaaagaaatagcagagattttgctgaacgttcacaagtgataaaccataacgcggaaacaatttgtaatttgctttatcaaaaccctaaaattaaaactctatactatcccaaatacaatacatcaaaagagcattttgaagcttgccggagagaaaatggaggttatggtggtcttttgtctgtcgttttccacaatcctgaagatgcgcgccaattttacgacaaaatccaagtagcaaaaggtccctcacttggtacaaattttacgttggcttctccctatgcaattttagctcactaccaagagttggattgggctggtgagaatggcatagatagaaaccttgttcgtgtcagcgttggaatggaacccagcgaacacctgaaaaatgtttttataaatgctctttcataa

SEQ ID NO: 14866 - protein, 610 aa, Schizosaccharomyces pombe
MSANISYLVNPPTEVGSSIPADTEHAISVTLPTWKSNVGYEEGDPNVTTKMKSGYPRFFISAHVKDCISIIKKFPEIEILKLKDYDMFLYPSLSVAKQSAAFLESKGPIDSAEVIIYDATKGLRKHLDSIDRNRKYTEEIHIPQVYSVLFPSKYFGIAKQFWQHTGDGISSRRAAAFLHSYKKIQSISEFLVAQRSISHLKSKSRSRYASHPDLQALNTWMTNEGNQANDEMEDVSLYLEERYGRNLDLSLATAAKLVLRRRIAGTLKDEVDLQKALPKEGSQYLREVKGLSHDDVFLFPTGMSAIYNTHRILRLVLDDSRKSVCFGFCYVDTLKILQKWGSGCYFYGLGNDEQLDEFEKRLESGEKVMALFCEFPSNPLLNSPDLVRIRKLADSYDFAVVVDETIGNFVNVEVLPLADVVVSSLTKIFSGDSNVMGGSMVLNPSSRYYSRIKDAMKALYEDLLYDEDALTLERNSRDFAERSQVINHNAETICNLLYQNPKIKTLYYPKYNTSKEHFEACRRENGGYGGLLSVVFHNPEDARQFYDKIQVAKGPSLGTNFTLASPYAILAHYQELDWAGENGIDRNLVRVSVGMEPSEHLKNVFINALS

SEQ ID NO: 14867 - DNA, 2775 bp, Saccharomyces cerevisiae
  CDS (589)..(2316)
ggtagctgagcgaacagtttcgagatttcagcattaatttcatctaataagactttccgtctgctttcaagatcaacgtgctgaacatttttactctgctttcataatactcccattttaggctttgattcaaaagcccactcaatgcaatacctaaaatgatatccttcaaagatatgtttaatgaatatgcagccacagctttgaattcagattgaccttgtgttgcattaagtcagacacctctagatttgtgtggctgctctcaagaaaggatgttgaagaagatttatttacggaagaaataactgtatacggcattttattctttcttaaacgagcaaattaaagaatagacggatagagactggagctttagcatgtgttccgagaagtccttgacacgcgccacggttgttatgccgcacactacaatgatgtgtttgaaaaagtatattaatgcctattgtcaagatgcaattcatcaattccagcattgagtgattcttctctggtgcggtaaaacataaattttaaatctagtactcaaccaccactgaacaactattaatcatcgtggaaattattatgacggaaattgaatttgggcaaccccttcccagcaatctagactatgctgtttcttttggcattcctacatgggattcggcaataggctatgcggaaaaggtgccagaggtaataggcaaaatggctacaggatatccgaggtactttcctcaaccccccgtccagaggctttgtgcttactttgttaagaaatttgggcgaggttcagaaaactgtcgtccttttccatccgttaacctgggtttaaagtgtttcgagtacgtaaaatctgtctcaggacctgaaagtaaagctcaccttgaagtggaaacagttacgattaaaaaccgtggggcaaaaacgtcgaaagaaccggcggaattggtgctaaccattgctgctgtccttgcatcggaggaagagttcgagactgtgaaagagtattggaaattaagaggtgaatgtgtatctagtcgattggcgttgtctgtcaaccaacttcttgactgcgctaatcatggctcagagcaggtattgcgtgagctagaggctggtgtttttgcagcaaagaagggggaggagaaagcaaagaacctgataaagggaaggatagttgagaatcgcttcaggccctttggtttggagaagaaaaccccgaattgggagggactcaacctcaacccaaatgaagacgtttatcttgtatcaagtggcatgtctgcaatatctacggctcgtaatttactcaccttttgggaggagaagaagaattcaggagattcattaaacaagaccacctctgaccaaaagaaaaagccattattatgtgacactgttggcatcttcggcttccctttcaaagatacgcaggtcattatgactaaatttggaaaatgtaaattttttggatttggaaattctagagacgttgtcgaattacaaaagtttttagaaacaagcaaacaacgcattcttgccgttttcgtcgagacaccttcaaatcctctgctgaatatgccggatttgaaaaaattgaggagtttggccgaccagtatggcttttttattgtaattgatgatactattgggggccttaacgttgacatcttgccctatgctgatatagtcagcacgtccctgactaagcttttcaatggtgctagtaatgtaatgggcggctctgtcgttttaaatccgaaatcatctctgtatccatatgctcgtgagtacttcaggagcgctaatttcgaggatttgttatggtgtgaagatgcgatagttttagaacgtaattccagggattttgaagatagaactttacgtgctaatgcaaacacaggaatattgttgaatgatttgcttttacccgaggaggggaaaatatgcaaaaagatttattatccaactgttacttctaaggagacctttgagaactacgaaagtgtacgtaatgaacgtggtggctatggatgcttgttctctgtagcctttttcaatgagggcgatgcaaaagcattctatgactctttaaaggtattcaagggaccttctaatggtactaactttaccttagcatgtccatatgtccatctggcgcaccactcagaattagaagaagtttccaagtttggggccgaccccaacattattagagtaagcgtaggtttagaagatatccagtggttattgaaagttttttcaagtgctttagatgttgtgaaaagcagaggctccaaacactcatgaagcagatcatgagtagaatatcaaaaatcaagaattctttataatctttatagaatattgtttataaaagtttttttccattctagcatataatttttttggaggaagtcttttctggaaccttcacatggatcttaattaatgaaagtagacagagctcataagatcactagttgtttataaactgaagatgttccttcttattgacttcaacattatatcgctctgaattagttgatctgtaacttcagagtttctttaccagaataaaagcgtcacagtttttctttagtttatatgtacacaggttggggtttactataaactataaaaaagaagtgttgtcgccgctattttaaggtttatacacaattttaaccaaaaaaaagaataagttgagcaacgttggaactgcctctgcaacgaattccggctatatacaacctgcatctttgaaat

SEQ ID NO: 14868 - protein, 575 aa, Saccharomyces cerevisiae
MTEIEFGQPLPSNLDYAVSFGIPTWDSAIGYAEKVPEVIGKMATGYPRYFPQPPVQRLCAYFVKKFGRGSENCRPFPSVNLGLKCFEYVKSVSGPESKAHLEVETVTIKNRGAKTSKEPAELVLTIAAVLASEEEFETVKEYWKLRGECVSSRLALSVNQLLDCANHGSEQVLRELEAGVFAAKKGEEKAKNLIKGRIVENRFRPFGLEKKTPNWEGLNLNPNEDVYLVSSGMSAISTARNLLTFWEEKKNSGDSLNKTTSDQKKKPLLCDTVGIFGFPFKDTQVIMTKFGKCKFFGFGNSRDVVELQKFLETSKQRILAVFVETPSNPLLNMPDLKKLRSLADQYGFFIVIDDTIGGLNVDILPYADIVSTSLTKLFNGASNVMGGSVVLNPKSSLYPYAREYFRSANFEDLLWCEDAIVLERNSRDFEDRTLRANANTGILLNDLLLPEEGKICKKIYYPTVTSKETFENYESVRNERGGYGCLFSVAFFNEGDAKAFYDSLKVFKGPSNGTNFTLACPYVHLAHHSELEEVSKFGADPNIIRVSVGLEDIQWLLKVFSSALDVVKSRGSKHS

SEQ ID NO: 14869 - DNA, 1950 bp, Saccharomyces cerevisiae
  CDS (1)..(1950)
atggtttcagcgcaagtggctaccgagctaggacagcctataccactggacactcaacatgcggtatctgtatgtttcccgacatggaaatctgtaatttcgtatgtggagaaagaccccaaagttttagggtgtttaaagtctggctaccccaggttttggatccacccctcgattcaaaagctgcgtgatattttaatagaaaagtatgctaaagaaaacgaaacgtgcttttgcttcccctcttatagagttgccaaacggtgcagagagtatgtaagaaggaagtgcgcgcatcgcaatggcaaagtaaggatattacagttagccacggcgaaacctatcaacgaggagcagaagacgtggaaaagagagtgtaagattgcggtagtgtttgtagatggggcatacgagaatatattaaaacagtattggcaatacaccggagagatcatctcaagcagactagctgaatatgttttgcatgaacttttcatggtagaaaagaaatccagccctgcagaggaaaaggaatacatagagatgcggtatggcaggaatctgaattttgcatttgccgatcgagccaaggaattgattaagaagaggatcgctacaaaggttatagataaagatgagcacgatgaggaggaaaactaccatttcttagcaggtaaccaagatgaacaggacttccaggacacgtttctggattcatccctcaatgaggctaaccacggagaagatcatgacggcgggattagcggtgaagtagacagtcaagaagaaccgcataatggccttgtttccactatacccccggagcccatcgaaatgagcacgatagaggaagagcaatccgtagaggaagatgccgggaggtgtgcattaagggtttgccctgagagagacgtttttttgtttccgagcggcatggcgtcgatattcactgcgcatagattgctgttgcaatgggactcactgcgtttgaatagatccagaaatggaagcgacgtcacctcgtcacctccgaataagaagaccgtgatttttgggttcccttatgcggatacattacatgtcttgcaagagtttaatgaaacgtatttcttgggagaaggagatgagtcttcaatgaaagaactaacaaaaattttacattccggggagcaaattcttgccgtttttatagagaccccatcaaacccactattaaaaatgggaaatttactggaactgaaaaggctttcggaattatttgggtttttcattatcattgatgaaactgtgggtggaatagttaatattgacggtctaccgtttgctgatatcgtttgcagttcattgacgaagacatttagtggggactctaacgtcattggtggttcaatggttttaaatccacaaagccgggtatacgagtttgcctcccgttttatgcaattagaagacgaatatgaagatttattatggtgcgaagacgcaatttacctggaaagaaattccagagatttcattgctagaaccatcaggatcaactacagcaccgaatacctcttagataaaatactgaagccacacgtaggcgaaaataaactattcaagaaaatctactaccctaatctaacctcaaaagaaacactaaccaactatgacatggtgaggtgtaagaaagaaggtggatacggcgggctcttttcactaacgttccatgacgaagatcatgctgcggccttttatgacaatctaaagctgaacaagggtccttccttgggcacaaatttcacactcgcattcccctatacgctcatgacatactaccacgaactcgacatggctgaaaaatttggggttgagagaaatcttctcagaatcagcgtaggcctcgaaagtcagtcaatattgggcaagatcttccaagaggcaattgataaaacggtagaaatatga

SEQ ID NO: 14870 - protein, 649 aa, Saccharomyces cerevisiae
MVSAQVATELGQPIPLDTQHAVSVCFPTWKSVISYVEKDPKVLGCLKSGYPRFWIHPSIQKLRDILIEKYAKENETCFCFPSYRVAKRCREYVRRKCAHRNGKVRILQLATAKPINEEQKTWKRECKIAVVFVDGAYENILKQYWQYTGEIISSRLAEYVLHELFMVEKKSSPAEEKEYIEMRYGRNLNFAFADRAKELIKKRIATKVIDKDEHDEEENYHFLAGNQDEQDFQDTFLDSSLNEANHGEDHDGGISGEVDSQEEPHNGLVSTIPPEPIEMSTIEEEQSVEEDAGRCALRVCPERDVFLFPSGMASIFTAHRLLLQWDSLRLNRSRNGSDVTSSPPNKKTVIFGFPYADTLHVLQEFNETYFLGEGDESSMKELTKILHSGEQILAVFIETPSNPLLKMGNLLELKRLSELFGFFIIIDETVGGIVNIDGLPFADIVCSSLTKTFSGDSNVIGGSMVLNPQSRVYEFASRFMQLEDEYEDLLWCEDAIYLERNSRDFIARTIRINYSTEYLLDKILKPHVGENKLFKKIYYPNLTSKETLTNYDMVRCKKEGGYGGLFSLTFHDEDHAAAFYDNLKLNKGPSLGTNFTLAFPYTLMTYYHELDMAEKFGVERNLLRISVGLESQSILGKIFQEAIDKTVEI

SEQ ID NO: 14871 - DNA, 26 bp, Artificial sequence
  primer
atgatatctagaaccattggtgaatc

SEQ ID NO: 14872 - DNA, 25 bp, Artificial sequence
  primer
ttattcccctaaagctttctcaatg

SEQ ID NO: 14873 - protein, 696 aa, Artificial sequence
  consensus sequence
  Variant (2)..(4): Xaa in position 2 to 4 is any amino acid
  Variant (6)..(8): Xaa in position 6 to 8 is any amino acid
  Variant (9)..(9): Xaa in position 9 is any or no amino acid
  Variant (11)..(15): Xaa in position 11 to 15 is any amino acid
  Variant (20)..(20): Xaa in position 20 is any amino acid
  Variant (25)..(29): Xaa in position 25 to 29 is any amino acid
  Variant (34)..(36): Xaa in position 34 to 36 is any amino acid
  Variant (38)..(40): Xaa in position 38 to 40 is any amino acid
  Variant (42)..(43): Xaa in position 42 to 43 is any amino acid
  Variant (50)..(51): Xaa in position 50 to 51 is any amino acid
  Variant (52)..(53): Xaa in position 52 to 53 is any or no amino acid
  Variant (55)..(74): Xaa in position 55 to 74 is any amino acid
  Variant (75)..(79): Xaa in position 75 to 79 is any or no amino acid
  Variant (82)..(85): Xaa in position 82 to 85 is any amino acid
  Variant (87)..(88): Xaa in position 87 to 88 is any amino acid
  Variant (90)..(129): Xaa in position 90 to 129 is any amino acid
  Variant (130)..(137): Xaa in position 130 to 137 is any or no amino acid
  Variant (139)..(148): Xaa in position 139 to 148 is any amino acid
  Variant (150)..(151): Xaa in position 150 to 151 is any amino acid
  Variant (155)..(155): Xaa in position 155 is any amino acid
  Variant (157)..(159): Xaa in position 157 to 159 is any amino acid
  Variant (163)..(164): Xaa in position 163 to 164 is any amino acid
  Variant (166)..(233): Xaa in position 166 to 233 is any amino acid
  Variant (234)..(344): Xaa in position 234 to 344 is any or no amino acid
  Variant (347)..(347): Xaa in position 347 is any amino acid
  Variant (349)..(349): Xaa in position 349 is any amino acid
  Variant (351)..(351): Xaa in position 351 is any amino acid
  Variant (354)..(355): Xaa in position 354 to 355 is any amino acid
  Variant (357)..(358): Xaa in position 357 to 358 is any amino acid
  Variant (361)..(362): Xaa in position 361 to 362 is any amino acid
  Variant (364)..(370): Xaa in position 364 to 370 is any amino acid
  Variant (371)..(391): Xaa in position 371 to 391 is any or no amino acid
  Variant (393)..(395): Xaa in position 393 to 395 is any amino acid
  Variant (401)..(401): Xaa in position 401 is any amino acid
  Variant (405)..(405): Xaa in position 405 is any amino acid
  Variant (408)..(408): Xaa in position 408 is any amino acid
  Variant (410)..(414): Xaa in position 410 to 414 is any amino acid
  Variant (415)..(415): Xaa in position 415 is any or no amino acid
  Variant (417)..(417): Xaa in position 417 is any amino acid
  Variant (419)..(427): Xaa in position 419 to 427 is any amino acid
  Variant (429)..(431): Xaa in position 429 to 431 is any amino acid
  Variant (433)..(434): Xaa in position 433 to 434 is any amino acid
  Variant (436)..(438): Xaa in position 436 to 438 is any amino acid
  Variant (439)..(444): Xaa in position 439 to 444 is any or no amino acid
  Variant (447)..(447): Xaa in position 447 is any amino acid
  Variant (449)..(449): Xaa in position 449 is any amino acid
  Variant (451)..(451): Xaa in position 451 is any amino acid
  Variant (453)..(453): Xaa in position 453 is any amino acid
  Variant (458)..(461): Xaa in position 458 to 461 is any amino acid
  Variant (463)..(467): Xaa in position 463 to 467 is any amino acid
  Variant (469)..(469): Xaa in position 469 is any amino acid
  Variant (471)..(471): Xaa in position 471 is any amino acid
  Variant (473)..(473): Xaa in position 473 is any amino acid
  Variant (475)..(476): Xaa in position 475 to 476 is any amino acid
  Variant (478)..(478): Xaa in position 478 is any amino acid
  Variant (482)..(482): Xaa in position 482 is any amino acid
  Variant (484)..(484): Xaa in position 484 is any amino acid
  Variant (486)..(486): Xaa in position 486 is any amino acid
  Variant (488)..(489): Xaa in position 488 to 489 is any amino acid
  Variant (492)..(493): Xaa in position 492 to 493 is any amino acid
  Variant (496)..(496): Xaa in position 496 is any amino acid
  Variant (498)..(498): Xaa in position 498 is any amino acid
  Variant (504)..(504): Xaa in position 504 is any amino acid
  Variant (509)..(509): Xaa in position 509 is any amino acid
  Variant (512)..(513): Xaa in position 512 to 513 is any amino acid
  Variant (516)..(517): Xaa in position 516 to 517 is any amino acid
  Variant (521)..(524): Xaa in position 521 to 524 is any amino acid
  Variant (526)..(535): Xaa in position 526 to 535 is any amino acid
  Variant (536)..(538): Xaa in position 536 to 538 is any or no amino acid
  Variant (542)..(543): Xaa in position 542 to 543 is any amino acid
  Variant (545)..(545): Xaa in position 545 is any amino acid
  Variant (548)..(551): Xaa in position 548 to 551 is any amino acid
  Variant (559)..(560): Xaa in position 559 to 560 is any amino acid
  Variant (562)..(565): Xaa in position 562 to 565 is any amino acid
  Variant (567)..(586): Xaa in position 567 to 586 is any amino acid
  Variant (587)..(597): Xaa in position 587 to 597 is any or no amino acid
  Variant (600)..(607): Xaa in position 600 to 607 is any amino acid
  Variant (608)..(609): Xaa in position 608 to 609 is any or no amino acid
  Variant (611)..(618): Xaa in position 611 to 618 is any amino acid
  Variant (619)..(621): Xaa in position 619 to 621 is any or no amino acid
  Variant (627)..(627): Xaa in position 627 is any amino acid
  Variant (629)..(630): Xaa in position 629 to 630 is any amino acid
  Variant (632)..(636): Xaa in position 632 to 636 is any amino acid
  Variant (638)..(639): Xaa in position 638 to 639 is any amino acid
  Variant (641)..(647): Xaa in position 641 to 647 is any amino acid
  Variant (659)..(660): Xaa in position 659 to 660 is any amino acid
  Variant (663)..(664): Xaa in position 663 to 664 is any amino acid
  Variant (669)..(669): Xaa in position 669 is any amino acid
  Variant (672)..(677): Xaa in position 672 to 677 is any amino acid
  Variant (679)..(682): Xaa in position 679 to 682 is any amino acid
  Variant (684)..(684): Xaa in position 684 is any amino acid
  Variant (686)..(686): Xaa in position 686 is any amino acid
  Variant (688)..(688): Xaa in position 688 is any amino acid
  Variant (692)..(695): Xaa in position 692 to 695 is any amino acid
GXXXPXXXXHXXXXXAVSVXLPTWXXXXXYEEGXXXVXXXMXXGYPRFFXXXXIXXXXXXXXXXXXXXXXXXXXXXXXXFPXXXXAXXCXXXXXXXXXXXXXXXXXXXXXXXXXXXXXXXXXXXXXXXXXXXXXXXXVXXXXXXXXXXKXXWQHXGXXXSSRXXEXXXXXXXXXXXXXXXXXXXXXXXXXXXXXXXXXXXXXXXXXXXXXXXXXXXXXXXXXXXXXXXXXXXXXXXXXXXXXXXXXXXXXXXXXXXXXXXXXXXXXXXXXXXXXXXXXXXXXXXXXXXXXXXXXXXXXXXXXXXXXXXXXXXXXXXXXXXXXXXXXXXXXXXXXXXXXXXXXXXDVXLXPXGMXXIXXAHXXLXXXXXXXXXXXXXXXXXXXXXXXXXXXXKXXXFGFPYXDTLXILXKXXXXXXFXGXXXXXXXXXLXXXLXXGXXXXXXXXXLAXFXEXPXNPLLXXXXLXXXXXLXDXYXFXXVXDETXGXFXNXXVLXXADXVXSSLTKXFSGDXNVXXGSXXLNPXXXXYXXXXXXXXXXXXXYEDXXWXEDXXXXERNSRDFXXRXXXXNXXXXXXXXXXXXXXXXXXXXXXXXXXXXXXXYPXXXXXXXXXXYXXXXXXXXXXXGYGGLXSXXFXXXXXAXXFXXXXXXXKGPSLGTNFTLXXPYXXLAHYXELXXXXXXGXXXXLXRXSXGLEXXXXL

SEQ ID NO: 14874 - protein, 41 aa, Artificial sequence
  protein pattern
  Variant (2)..(2): Xaa in position 2 is any amino acid
  Variant (3)..(3): Xaa in position 3 is any or no amino acid
  Variant (5)..(5): Xaa in position 5 is any or no amino acid
  Variant (7)..(7): Xaa in position 7 is any amino acid
  Variant (9)..(9): Xaa in position 9 is Ile or Val
  Variant (10)..(10): Xaa in position 10 is any amino acid
  Variant (12)..(12): Xaa in position 12 is Leu or Val
  Variant (13)..(13): Xaa in position 13 is Pro, Gln, Ser or Thr
  Variant (14)..(14): Xaa in position 14 is any amino acid
  Variant (17)..(17): Xaa in position 17 is Ile, Met or Val
  Variant (19)..(19): Xaa in position 19 is Ala, Cys or Val
  Variant (25)..(25): Xaa in position 25 is Ile or Val
  Variant (30)..(30): Xaa in position 30 is Ala, Cys or Ser
  Variant (33)..(33): Xaa in position 33 is Ile, Leu or Met
  Variant (34)..(34): Xaa in position 34 is Ala or Gly
  Variant (36)..(36): Xaa in position 36 is Gly or Ser
  Variant (37)..(37): Xaa in position 37 is any amino acid
  Variant (38)..(38): Xaa in position 38 is Ile or Val
  Variant (39)..(39): Xaa in position 39 is Phe or Leu
TXXGXFXNXXVXXXADXVXSSLTKXFSGDXNVXXGXXXXNP

SEQ ID NO: 14875 - protein, 61 aa, Artificial sequence
  protein pattern
  Variant (7)..(7): Xaa in position 7 is Phe, Ile or Leu
  Variant (9)..(9): Xaa in position 9 is Phe, Leu or Val
  Variant (10)..(10): Xaa in position 10 is any amino acid
  Variant (12)..(15): Xaa in position 12 to 15 is any amino acid
  Variant (16)..(16): Xaa in position 16 is any or no amino acid
  Variant (18)..(19): Xaa in position 18 to 19 is any amino acid
  Variant (20)..(20): Xaa in position 20 is any or no amino acid
  Variant (22)..(22): Xaa in position 22 is Phe or Tyr
  Variant (23)..(23): Xaa in position 23 is Asp or Asn
  Variant (24)..(24): Xaa in position 24 is any amino acid
  Variant (25)..(25): Xaa in position 25 is Ile, Leu or Val
  Variant (26)..(28): Xaa in position 26 to 28 is any amino acid
  Variant (36)..(36): Xaa in position 36 is Asn or Ser
  Variant (40)..(40): Xaa in position 40 is Ala, Ser, Thr or Val
  Variant (41)..(41): Xaa in position 41 is any amino acid
  Variant (44)..(44): Xaa in position 44 is Ala, Thr or Val
  Variant (45)..(45): Xaa in position 45 is Ile or Leu
  Variant (46)..(46): Xaa in position 46 is Ile, Leu or Met
  Variant (47)..(47): Xaa in position 47 is Ala or Thr
  Variant (48)..(48): Xaa in position 48 is His or Tyr
  Variant (50)..(50): Xaa in position 50 is any amino acid
  Variant (53)..(53): Xaa in position 53 is Asp or Glu
  Variant (54)..(54): Xaa in position 54 is any amino acid
  Variant (55)..(55): Xaa in position 55 is Ala, Ile or Val
  Variant (56)..(56): Xaa in position 56 is Ala, Glu, Gly or Ser
  Variant (57)..(58): Xaa in position 57 to 58 is any amino acid
  Variant (59)..(59): Xaa in position 59 is Asp or Gly
  Variant (60)..(60): Xaa in position 60 is Ile or Val
  Variant (61)..(61): Xaa in position 61 is Asp or Glu
GGYGGLXSXXFXXXXXAXXXFXXXXXXXKGPSLGTXFTLXXPYXXXXXYXELXXXXXXXXX

SEQ ID NO: 14876 - protein, 32 aa, Artificial sequence
  protein pattern
  Variant (2)..(2): Xaa in position 2 is Ile or Val
  Variant (5)..(5): Xaa in position 5 is Cys, Ser or Thr
  Variant (10)..(10): Xaa in position 10 is any amino acid
  Variant (11)..(11): Xaa in position 11 is Ala, Asp or Ser
  Variant (12)..(12): Xaa in position 12 is Asn or Thr
  Variant (13)..(13): Xaa in position 13 is Ile or Val
  Variant (14)..(14): Xaa in position 14 is Ala or Gly
  Variant (19)..(21): Xaa in position 19 to 21 is any amino acid
  Variant (22)..(22): Xaa in position 22 is Ile, Leu or Val
  Variant (23)..(23): Xaa in position 23 is any amino acid
  Variant (24)..(24): Xaa in position 24 is Asp, Glu, Gly, Asn, Ser or Thr
  Variant (25)..(25): Xaa in position 25 is any amino acid
  Variant (26)..(26): Xaa in position 26 is Leu or Met
  Variant (27)..(27): Xaa in position 27 is any amino acid
  Variant (28)..(28): Xaa in position 28 is Cys, Ser or Thr
AXSVXLPTWXXXXXYEEGXXXXXXXXXXGYPR

SEQ ID NO: 14877 - protein, 39 aa, Artificial sequence
  protein pattern
  Variant (2)..(4): Xaa in position 2 to 4 is any amino acid
  Variant (5)..(10): Xaa in position 5 to 10 is any or no amino acid
  Variant (12)..(12): Xaa in position 12 is any amino acid
  Variant (14)..(14): Xaa in position 14 is Gly or Ser
  Variant (19)..(20): Xaa in position 19 to 20 is any amino acid
  Variant (21)..(21): Xaa in position 21 is Gly or Pro
  Variant (22)..(22): Xaa in position 22 is Asp or Asn
  Variant (24)..(24): Xaa in position 24 is any amino acid
  Variant (25)..(25): Xaa in position 25 is Glu, Lys or Arg
  Variant (26)..(26): Xaa in position 26 is Ile or Leu
  Variant (27)..(27): Xaa in position 27 is Lys or Arg
  Variant (28)..(28): Xaa in position 28 is any amino acid
  Variant (29)..(29): Xaa in position 29 is Leu or Met
  Variant (30)..(30): Xaa in position 30 is Ala or Ser
  Variant (31)..(31): Xaa in position 31 is Asp, Glu or Asn
  Variant (32)..(32): Xaa in position 32 is any amino acid
  Variant (33)..(33): Xaa in position 33 is Phe, His or Tyr
  Variant (34)..(34): Xaa in position 34 is Asp, Glu, Gly, Asn or Ser
  Variant (36)..(36): Xaa in position 36 is any amino acid
  Variant (37)..(39): Xaa in position 37 to 39 is Ile or Val
GXXXXXXXXXEXPXNPLLXXXXLXXXXXXXXXXXFXXXX

SEQ ID NO: 14878 - protein, 37 aa, Artificial sequence
  protein pattern
  Variant (4)..(5): Xaa in position 4 to 5 is any amino acid
  Variant (6)..(6): Xaa in position 6 is Trp or Tyr
  Variant (7)..(7): Xaa in position 7 is any amino acid
  Variant (10)..(10): Xaa in position 10 is Ala or Val
  Variant (11)..(11): Xaa in position 11 is Ile, Leu, Met or Val
  Variant (12)..(12): Xaa in position 12 is any amino acid
  Variant (13)..(13): Xaa in position 13 is Leu or Met
  Variant (20)..(20): Xaa in position 20 is Phe or Tyr
  Variant (21)..(21): Xaa in position 21 is any amino acid
  Variant (22)..(22): Xaa in position 22 is Ala, Glu or Ser
  Variant (24)..(26): Xaa in position 24 to 26 is any or no amino acid
  Variant (28)..(29): Xaa in position 28 to 29 is any amino acid
  Variant (30)..(30): Xaa in position 30 is Asn, Thr or Val
  Variant (31)..(36): Xaa in position 31 to 36 is any amino acid
  Variant (37)..(37): Xaa in position 37 is Leu, Met or Val
YEDXXXXEDXXXXERNSRDXXXRXXXIXXXXXXXXXX

SEQ ID NO: 14879 - protein, 22 aa, Artificial sequence
  protein pattern
  Variant (2)..(2): Xaa in position 2 is Ser or Thr
  Variant (3)..(3): Xaa in position 3 is Ile or Val
  Variant (4)..(4): Xaa in position 4 is any amino acid
  Variant (5)..(5): Xaa in position 5 is Phe or Tyr
  Variant (8)..(8): Xaa in position 8 is Cys or Pro
  Variant (10)..(10): Xaa in position 10 is any amino acid
  Variant (14)..(14): Xaa in position 14 is any amino acid
  Variant (15)..(15): Xaa in position 15 is Ile or Val
  Variant (17)..(17): Xaa in position 17 is any amino acid
  Variant (18)..(18): Xaa in position 18 is Glu or Lys
  Variant (19)..(19): Xaa in position 19 is Phe or Trp
  Variant (20)..(20): Xaa in position 20 is Gly or Asn
  Variant (21)..(21): Xaa in position 21 is any amino acid
  Variant (22)..(22): Xaa in position 22 is Gly or Thr
KXXXXGFXYXDTLXXLXXXXXX

SEQ ID NO: 14880 - protein, 22 aa, Artificial sequence
  protein pattern
  Variant (2)..(2): Xaa in position 2 is Ala, Glu, Asn or Gln
  Variant (3)..(3): Xaa in position 3 is any amino acid
  Variant (6)..(6): Xaa in position 6 is His or Tyr
  Variant (7)..(7): Xaa in position 7 is Ser or Thr
  Variant (9)..(9): Xaa in position 9 is Asp, Glu or Asn
  Variant (10)..(10): Xaa in position 10 is Gly or Ile
  Variant (11)..(11): Xaa in position 11 is any amino acid
  Variant (15)..(15): Xaa in position 15 is any amino acid
  Variant (16)..(16): Xaa in position 16 is Ala or Gly
  Variant (18)..(19): Xaa in position 18 to 19 is any amino acid
  Variant (20)..(21): Xaa in position 20 to 21 is any or no amino acid
KXXWQXXGXXXSSRXXEXXXXL

SEQ ID NO: 14881 - protein, 19 aa, Artificial sequence
  protein pattern
  Variant (2)..(2): Xaa in position 2 is Ile or Val
  Variant (3)..(3): Xaa in position 3 is any amino acid
  Variant (4)..(4): Xaa in position 4 is Ile or Leu
  Variant (5)..(5): Xaa in position 5 is Phe or Tyr
  Variant (7)..(7): Xaa in position 7 is Ala, Cys, Ser or Thr
  Variant (10)..(10): Xaa in position 10 is Ala, Asn or Ser
  Variant (11)..(11): Xaa in position 11 is Ala or Ser
  Variant (13)..(13): Xaa in position 13 is Phe or Tyr
  Variant (14)..(14): Xaa in position 14 is any amino acid
  Variant (15)..(15): Xaa in position 15 is Ala, Ser or Thr
  Variant (17)..(18): Xaa in position 17 to 18 is any amino acid
DXXXXPXGMXXIXXXHXXL

SEQ ID NO: 14882 - protein, 14 aa, Artificial sequence
  protein pattern
  Variant (2)..(2): Xaa in position 2 is Ile, Leu or Val
  Variant (4)..(4): Xaa in position 4 is Ile or Val
  Variant (6)..(6): Xaa in position 6 is Ile or Val
  Variant (8)..(13): Xaa in position 8 to 13 is any or no amino acid
LXRXSXGXXXXXXL

SEQ ID NO: 14883 - protein, 13 aa, Artificial sequence
  protein pattern
  Variant (2)..(2): Xaa in position 2 is any amino acid
  Variant (3)..(3): Xaa in position 3 is Lys or Arg
  Variant (4)..(4): Xaa in position 4 is Phe or Tyr
  Variant (7)..(7): Xaa in position 7 is Asn or Val
  Variant (9)..(9): Xaa in position 9 is Asp, Asn, Pro or Ser
  Variant (10)..(12): Xaa in position 10 to 12 is any amino acid
  Variant (13)..(13): Xaa in position 13 is Ala, Leu or Val
EXXXGRXLXXXXX

SEQ ID NO: 14884 - protein, 10 aa, Artificial sequence
  protein pattern
  Variant (2)..(2): Xaa in position 2 is Lys or Arg
  Variant (3)..(3): Xaa in position 3 is any amino acid
  Variant (4)..(4): Xaa in position 4 is Ala, Leu or Val
  Variant (5)..(5): Xaa in position 5 is Ile, Leu or Val
  Variant (6)..(7): Xaa in position 6 to 7 is Lys or Arg
AXXXXXXRIA

SEQ ID NO: 14885 - DNA, 1080 bp, Saccharomyces cerevisiae
  CDS (1)..(1080)
atgagcactaaagttgttaatgttgccgttatcggtgccggtgttgttggttcagctttcttggatcaattgttagccatgaagtctaccattacttacaatctagttcttttggctgaagctgagcgttctttaatctccaaggacttttctccattaaatgttggttctgattggaaggctgctttagcagcctccactactaaaacgttgcctttggatgatttaattgctcatttgaagacttcacctaagccagtcattttggttgataacacttccagcgcttacattgctggtttttacactaagtttgtcgaaaatggtatttccattgctactccaaacaagaaggccttttcctctgatttggctacctggaaggctcttttctcaaataagccaactaacggttttgtctatcatgaagctaccgtcggtgctggtttgcctatcatcagtttcttaagagaaattattcaaaccggtgacgaagttgaaaaaattgaaggtatcttctctggtactctatcttatattttcaacgagttctccactagtcaagctaacgacgtcaaattctctgatgttgtcaaagttgctaaaaaattgggttatactgaaccagatccaagagatgatttgaatgggttggatgttgctagaaaggttaccattgttggtaggatatctggtgtggaagttgaatctccaacttccttccctgtccagtctttgattccaaaaccattggaatctgtcaagtctgctgatgaattcttggaaaaattatctgattacgataaagatttgactcaattgaagaaggaagctgccactgaaaataaggtattgagattcattggtaaagtcgatgttgccaccaaatctgtgtctgtaggaattgaaaagtacgattactcacacccattcgcatcattgaagggatcagataacgttatttccatcaagactaagcgttacaccaatcctgttgtcattcaaggtgccggtgccggtgctgccgttactgccgctggtgttttgggtgatgttatcaagattgctcaaagactttag

SEQ ID NO: 14886 - protein, 359 aa, Saccharomyces cerevisiae
MSTKVVNVAVIGAGVVGSAFLDQLLAMKSTITYNLVLLAEAERSLISKDFSPLNVGSDWKAALAASTTKTLPLDDLIAHLKTSPKPVILVDNTSSAYIAGFYTKFVENGISIATPNKKAFSSDLATWKALFSNKPTNGFVYHEATVGAGLPIISFLREIIQTGDEVEKIEGIFSGTLSYIFNEFSTSQANDVKFSDVVKVAKKLGYTEPDPRDDLNGLDVARKVTIVGRISGVEVESPTSFPVQSLIPKPLESVKSADEFLEKLSDYDKDLTQLKKEAATENKVLRFIGKVDVATKSVSVGIEKYDYSHPFASLKGSDNVISIKTKRYTNPVVIQGAGAGAAVTAAGVLGDVIKIAQRL

SEQ ID NO: 14887 - DNA, 1396 bp, Oryza sativa
  CDS (62)..(1216)
tttcgttgtgggtggttaatttgtttttgttttaggtaatgcacatttgtgtagccaacaaatggcggcgccggtgaggtcggtgctccccgtcgtgctcctcggctgcggcggcgtcggccgccacctcctccgccacatcctctcctgccgccctctccacgccaaccagggcgtcgccatccgggtgctcggcgtcgccgacagctcctctctgctcgtcgccgacgacctccactccaacggcttcgacgacgcgctcctcgctgatctctgcgccgccaagtccgccggctcgcccttatcttctctgctctctcgagggcaatgtcagctattcaacaaccctgaggctaggaggaaagtcattgacactgccagcgttcttgggaaaacaactggtcttgtactagttgattgttctgcaacttatgatactgttggcatgctaaaggatgccgtggatcgtggatgttgtgttgtattggcaaacaagaaaccgcttacttgtgcttatgaggatttcgaaaagttggtttccaacttccgtcgcatgagatttgaatctactgttggagccggtttgcctgtaatagcttctgtgacccgtattattgcctctggagatccagtttctcgtattgttggcagtctgagtggtacacttggttatgtgatgagtgagctggaggatggaaagagatttagtgaagttgtgaaaactgccaagtctcttggctatacagaaccagatccacgtgatgatctcagtgggatggacgtagctagaaaggcattgatcttagctaggcttctggggcagcggatcagcatggagaatattaatgttgagggtttataccccagtgaatttggacctgatgcaatgtccacaaaggacttccttgaaagtggtttagtacagcttgataaaagcattgaagaaagagtaaaggcagcatctttgaaaggaaatgttcttcgctatgtctgtaagattgaaagcacagggtgccaagtgggccttgaagaactcccgaaaaactctgcactgggaaggttgagaggaagtgacaatgtggtggagatatacagcagatgctacgagagcgcccctctggtgattcagggcgctggagctggcaatgataccactgcagctggagttcttgctgacatacttgatctccaggatctcttccacaaaacggcttgaaacctatgtcttctaggtcgaaccgcagagttgattatgagtcttgtgacttgtggggttgttttggtcacagtattacttaaataaatcttgagcagatatcaatttttgtactgtacgcagaaggtttttgaacaaatttggaagttggaaccaatgagcagtgacatccttttgctt

SEQ ID NO: 14888 - protein, 384 aa, Oryza sativa
MAAPVRSVLPVVLLGCGGVGRHLLRHILSCRPLHANQGVAIRVLGVADSSSLLVADDLHSNGFDDALLADLCAAKSAGSPLSSLLSRGQCQLFNNPEARRKVIDTASVLGKTTGLVLVDCSATYDTVGMLKDAVDRGCCVVLANKKPLTCAYEDFEKLVSNFRRMRFESTVGAGLPVIASVTRIIASGDPVSRIVGSLSGTLGYVMSELEDGKRFSEVVKTAKSLGYTEPDPRDDLSGMDVARKALILARLLGQRISMENINVEGLYPSEFGPDAMSTKDFLESGLVQLDKSIEERVKAASLKGNVLRYVCKIESTGCQVGLEELPKNSALGRLRGSDNVVEIYSRCYESAPLVIQGAGAGNDTTAAGVLADILDLQDLFHKTA

SEQ ID NO: 14889 - DNA, 1950 bp, Zea mays subsp. mays
  CDS (172)..(1326)
aactaatcactacctctccctctccgtcgcgacacaggccacggcgggcggcggcggaggcttccgtgcggctcttggcggattgaacgcccactcgagctgcgccggcggctgtttcagccgtccttagatagaccctgctttcctcccgggcgaatcaaagttgcacaaatgccgacaccagtgaagtcggtgctccccgtggtgctcctcggctgcggcggcgtcggccgctacctcctccgccacatcgtctcctgtcgtcccctccacgccaaccagggcgtggccatccgggtggtgggcgtcgccgatagctcctccctgctcgtcgccgaagatgtccactccaccggcctcgatgacgcgctcctcacccagctctgcgccgccaagtccgcaggctctcccctctcctccctgctcggccgagggcactgtcagctgttcaagaaccctgaggctaggggcaaagtcatagacgccgctaccacacttggaagtacaactggtctggtgctagttgactgttctgcaacttatgacactgttagcctgctgaaagatgctgtggatcatggatgctgtgtcgtattggcaaacaagaaacctcttaccggtgcttatgaggattttcagaagttggtctccaacttccgtcggataagatttgaatctactgttggagcaggtttgcctgtgatagcttctgtaacccgtattattgcatctggagaccctattactcgtattgttggcagtctgagtggtacacttgggtatgtgatgagtgagcttgaggatggaaagaaatttagtgaagttgtaaaaactgccaagtctcttggctatacagaaccagatccacgtgatgatcttggtggaatggatgtggctagaaaggcattgatcctggctaggcttcttgggcaacagataagcatggagagtatcaatgttgagagtttatatcctagtgaattaggacctgatgcagtgtccacaaaggacttccttgaaagtggtttagtgcaacttgacaagagcatggaagaaagaatcagagcagcatcttcgagaggaaacgttcttcgttacgtctgtgagattgaaagcgcagggtgccaagtaggccttaaagagctcccaaaggattctgcgctgggtagattgaggggaagtgacaatgtggtcgagatatacagcagatgttaccagagctcccctctggtgatccagggcgcaggagctggcaacgacaccactgccgccggcgtccttgctgacataatcgacctccaagacctgttccagacgatggcttgatcgttgatcggcatccacaccagtacaccatcttgatttttgcaaggcaccagagcgtttgatactttgatcggtgccagtggaatcccccactgcccactggttggcttcgctccttgtcatgtgtgcattttgttcacgggcatgctctcaggctgagagcctgagacgtctgacattcgaaatgtaattttgagcaggcgtgtgggggatttctttacagtttacataaaggaactttgtttcagtgaaataatgtcgcggtctccacattaaactaataaacagtccgagctacattgccgctatctgatagtgaaataatatcgctggcagcctgaaaccgtgaacgagagacgtgggaaattgatgcaattcaccctgatgcagattcggcaattgatgcaaggttgcaattcagtgtcctgaaatgtctacgaggagaggagaggagatgagatggctggaattttaaatactactcttgcatcacgcaattcaattctgtgttccgttattatatatcgttcactgatgcgacagcatagcagactagtagtcaataataatttttgttggaattgccacgaacccgccaccataaggcattgttcgtttctactc

SEQ ID NO: 14890 - protein, 384 aa, Zea mays subsp. mays
MPTPVKSVLPVVLLGCGGVGRYLLRHIVSCRPLHANQGVAIRVVGVADSSSLLVAEDVHSTGLDDALLTQLCAAKSAGSPLSSLLGRGHCQLFKNPEARGKVIDAATTLGSTTGLVLVDCSATYDTVSLLKDAVDHGCCVVLANKKPLTGAYEDFQKLVSNFRRIRFESTVGAGLPVIASVTRIIASGDPITRIVGSLSGTLGYVMSELEDGKKFSEVVKTAKSLGYTEPDPRDDLGGMDVARKALILARLLGQQISMESINVESLYPSELGPDAVSTKDFLESGLVQLDKSMEERIRAASSRGNVLRYVCEIESAGCQVGLKELPKDSALGRLRGSDNVVEIYSRCYQSSPLVIQGAGAGNDTTAAGVLADIIDLQDLFQTMA

SEQ ID NO: 14891 - DNA, 1397 bp, Triticum aestivum
  CDS (130)..(1269)
ccaaacggccgaacccccaacggagcagctaaaaactctgctgccggcgctaggaacactccagcaactcctctctggacgagacgaatcgaagccgatccgagtttccaaatgccgcaggcgcaggctatgtcggtcctgccggtggtgctcctcggctgcggcggcgtcggccgccacctcctccgccacatcgtctcctgcaggcctctccacgccaaccagggcgtctccatccgggtggtgggcgttgccgacagctcctcgctgctcgtcgcagacgacgtccgcgccagcggcctcgatgacgcgctcctcaacgacctctgctccgccaagtccgccggctcgcctctgtcctcgctgctcgctcgcgggcactgtcaggtgttcaacaagccggaggcaatggggaaagtcatcgatgcagctaccatgcttggaagaacaaccggtctggtgatagttgattgttctgcaacttatgacactgttggtgtgctgaaggatgccgtgaatcatggatgctgcgttgttttggcaaacaaaaaacctcttacatgtgcttatgaggattttaaaaagttgacatcccacttccgtcagataagatttgaatctaccgttggagcaggtttgcctgtaatagcttctgtaacccgcattattgcatctggagatccagtttcccgaatcgttggcagtctgagtggtacacttggctatgtgatgagtgagctggaggatggaaaaaaaattagtgaagttgtgaaaactgccaaggctcttggttatacagaaccagatccacgtgatgatctaagtgggatggatgtggctagaaaggcgttgatcctagctaggcttctcgggcagcagatcagcatggagaatatcaatgttgagagtttatatccgagtgagttaggacctgaggttatgtccacaacggatttccttgagagtgggttggcaaaacttgatgagacgattgaagaaagggtcaaggcagcatctttgaggggaaatgttctgcgctatgtttgtgtcattggaagcacagggtgtcaagtgggccttcaagaggtcccaaaagattctgcactggggagattgaggggaagtgacaatgtggtggagatatacagcagatgctacgagagctccccgctggtgatccagggtgcaggagccgggaacgacaccactgccgcaggagttctcgctgatataatcgatctccaagatcttttccagacaagagcgtgattgtcttgtttagcaccaaggagtttgatgcgttgtatgatcgaccataatgtccattgaactgaaattggttctggcgtttgaggttgtatgaacattttcggttgtgtttggctgctgttgatttg

SEQ ID NO: 14892 - protein, 379 aa, Triticum aestivum
MSVLPVVLLGCGGVGRHLLRHIVSCRPLHANQGVSIRVVGVADSSSLLVADDVRASGLDDALLNDLCSAKSAGSPLSSLLARGHCQVFNKPEAMGKVIDAATMLGRTTGLVIVDCSATYDTVGVLKDAVNHGCCVVLANKKPLTCAYEDFKKLTSHFRQIRFESTVGAGLPVIASVTRIIASGDPVSRIVGSLSGTLGYVMSELEDGKKISEVVKTAKALGYTEPDPRDDLSGMDVARKALILARLLGQQISMENINVESLYPSELGPEVMSTTDFLESGLAKLDETIEERVKAASLRGNVLRYVCVIGSTGCQVGLQEVPKDSALGRLRGSDNVVEIYSRCYESSPLVIQGAGAGNDTTAAGVLADIIDLQDLFQTRA

SEQ ID NO: 14893 - DNA, 1107 bp, Aspergillus fumigatus
  CDS (1)..(1107)
atgtcgaacatctatctcggtgtcatcggcgtcggtggtgttggaaccgcattcctgaaccaacttgcccgtcttccaaatgcccccaagctgatcctcctcgcccgctcaacacaaaccctcctggccccgacaccggcctactcgcctgccatccccgccggtgactggaaggcggccgccgagaccccctcgctcaccaagtctggtgctctgtcgcccgaagagattgcgtcctatctttcctccgcccccggccgctccatcctggtcgacaataccagcgacccggccctggccagctcatacccggtcttcctccgcaagggcatctccattgtcaccccgaacaagaagggcttctcctccgacctctcgctgtggaaggagatcttcgccgcagccgccgagggcaaggcgctcgtctaccacgagagcaccgtcggcgccgggttgcctgtcatctcgacgctgcgcgatctcgtggcaaccggcgacgaggtcacccgcatcgagggcgtgttctccggcacgctctccttcctcttcaacacctttgcccctgtctcgggcgcctccaacgccaagtggagcgaggttgtcgcccaggccaaggagctgggatacaccgagcccgacccgcgcgatgacctgaacggcatggacgtggcgcgcaaactgaccatcctggcgcgtattgcgggtctcgaagttcagggcccggactccttccccatcgagtcgctgattcccgctgagctggcgtcgctgccttccaccgcggacggcatctcgcagttcatgacgaaactgcctagcttcgattcgcagatggcggctatcaaggagggggccgagaagcagggcaaggtcgtgcggtacgtgggtagtgtggatgtagcaaagaaagaggttcgcgttgggctacaacagttcgacaaggacagtgctattgcgggactcaagggcagtgacaacatcatcagcttctacaccaagcggtacggaagcaacccgcttattgtacagggcgccggtgcgggcggcgaggtcacggccatgggcgtgacggccgatctcatcaaggtcattcagcgattgggttag

SEQ ID NO: 14894 - protein, 368 aa, Aspergillus fumigatus
MSNIYLGVIGVGGVGTAFLNQLARLPNAPKLILLARSTQTLLAPTPAYSPAIPAGDWKAAAETPSLTKSGALSPEEIASYLSSAPGRSILVDNTSDPALASSYPVFLRKGISIVTPNKKGFSSDLSLWKEIFAAAAEGKALVYHESTVGAGLPVISTLRDLVATGDEVTRIEGVFSGTLSFLFNTFAPVSGASNAKWSEVVAQAKELGYTEPDPRDDLNGMDVARKLTILARIAGLEVQGPDSFPIESLIPAELASLPSTADGISQFMTKLPSFDSQMAAIKEGAEKQGKVVRYVGSVDVAKKEVRVGLQQFDKDSAIAGLKGSDNIISFYTKRYGSNPLIVQGAGAGGEVTAMGVTADLIKVIQRLG

SEQ ID NO: 14895 - DNA, 2748 bp, Oryza sativa (japonica cultivar-group); identical to SEQ ID NO: 795
  CDS (1)..(2748)

SEQ ID NO: 14896 - protein, 915 aa, Oryza sativa (japonica cultivar-group); identical to SEQ ID NO: 796

SEQ ID NO: 14897 - DNA, 1155 bp, Oryza sativa (japonica cultivar-group)
  CDS (1)..(1155)
atggcggcgccggtgaggtcggtcctccccgtcgtcctcctcggctgcggcggcgtcggccgccaccttctccgccacatcgtctcctgccgcccgctccacgccaaccagggcgtcgccatccgggtgctcggcgtcgccgacagctcctctctgctcgtcgccgacgacctccactccaacggcttcgacgacgcgctcctcgctgatctctgcgccgccaagtccgccggctcgcccctatcttccctgctcgctcgagggcaatgtcagctattcaacaacactgaggctaggaggaaagtcattgacactgccagcgttctagggaaaacaactggtcttgtactagttgattgttctgcaacttatgatactgttggcatgctaaaggatgccgtggattgtggatgttgtgttgtattggcaaacaagaaaccgcttacttgtgcttatgaggatttcgaaaagttggtctccaacttccgtcgcataagatttgaatctactgttggagccagtctgcctgtaatagcttctgtgactcgtattattgcctctggagatccagtttctcgtattgttggcagtctgagtggtacacttggttatgtgatgagtgagctggaggatggaaagaaatttagtgaagttgtgaaaactgccaagtctcttggctatacagaaccagatccacgtgatgatctcagtgggatggacgtagctagaaaggcattgatcttagctaggcttctggggcaacagattagcatggagaatattaatgttgagagtttataccccagtgaattaggacctgatgcaatgtccacaaaggacttccttgaaagtggtttagtacagcttgataaaagcattgaagaaagagtaaaggcagcatctttgaaaggaaatgttcttcgctatgtctgtaagattgaaagcacagggtgccaagtgggccttgaagaactcccgaaaaactctgcactgggaaggttgagaggaagtgacaatgtggtggagatatacagcagatgctacgagagcgcccctctggtgattcagggcgctggagctggcaatgataccactgcagctggagttcttgctgacatacttgatctccaggatctcttccacaaaacggcttga

SEQ ID NO: 14898 - protein, 384 aa, Oryza sativa (japonica cultivar-group)
MAAPVRSVLPVVLLGCGGVGRHLLRHIVSCRPLHANQGVAIRVLGVADSSSLLVADDLHSNGFDDALLADLCAAKSAGSPLSSLLARGQCQLFNNTEARRKVIDTASVLGKTTGLVLVDCSATYDTVGMLKDAVDCGCCVVLANKKPLTCAYEDFEKLVSNFRRIRFESTVGASLPVIASVTRIIASGDPVSRIVGSLSGTLGYVMSELEDGKKFSEVVKTAKSLGYTEPDPRDDLSGMDVARKALILARLLGQQISMENINVESLYPSELGPDAMSTKDFLESGLVQLDKSIEERVKAASLKGNVLRYVCKIESTGCQVGLEELPKNSALGRLRGSDNVVEIYSRCYESAPLVIQGAGAGNDTTAAGVLADILDLQDLFHKTA

SEQ ID NO: 14899 - DNA, 1155 bp, Oryza sativa (japonica cultivar-group)
  CDS (1)..(1155)
atggcggcgccggtgaggtcggtgctccccgtcgtgctcctcggctgcggcggcgtcggccgccacctcctccgccacatcctctcctgccgccctctccacgccaaccagggcgtcgccatccgggtgctcggcgtcgccgacagctcctctctgctcgtcgccgacgacctccactccaacggcttcgacgacgcgctcctcgctgatctctgcgccgccaagtccgccggctcgcccttatcttctctgctctctcgagggcaatgtcagctattcaacaaccctgaggctaggaggaaagtcattgacactgccagcgttcttgggaaaacaactggtcttgtactagttgattgttctgcaacttatgatactgttggcatgctaaaggatgccgtggatcgtggatgttgtgttgtattggcaaacaagaaaccgcttacttgtgcttatgaggatttcgaaaagttggtttccaacttccgtcgcatgagatttgaatctactgttggagccggtttgcctgtaatagcttctgtgacccgtattattgcctctggagatccagtttctcgtattgttggcagtctgagtggtacacttggttatgtgatgagtgagctggaggatggaaagagatttagtgaagttgtgaaaactgccaagtctcttggctatacagaaccagatccacgtgatgatctcagtgggatggacgtagctagaaaggcattgatcttagctaggcttctggggcaacggatcagcatggagaatattaatgttgagagtttataccccagtgaatttggacctgatgcaatgtccacaaaggacttccttgaaagtggtttagtacagcttgataaaagcattgaagaaagagtaaaggcagcatctttgaaaggaaatgttcttcgctatgtctgtaagattgaaagcacagggtgccaagtgggccttgaagaactcccgaaaaactctgcactgggaaggttgagaggaagtgacaatgtggtggagatatacagcagatgctacgagagcgcccctctggtgattcagggcgctggagctggcaatgataccactgcagctggagttcttgctgacatacttgatctccaggatctcttccacaaaacggcttga

SEQ ID NO: 14900 - protein, 384 aa, Oryza sativa (japonica cultivar-group)
MAAPVRSVLPVVLLGCGGVGRHLLRHILSCRPLHANQGVAIRVLGVADSSSLLVADDLHSNGFDDALLADLCAAKSAGSPLSSLLSRGQCQLFNNPEARRKVIDTASVLGKTTGLVLVDCSATYDTVGMLKDAVDRGCCVVLANKKPLTCAYEDFEKLVSNFRRMRFESTVGAGLPVIASVTRIIASGDPVSRIVGSLSGTLGYVMSELEDGKRFSEVVKTAKSLGYTEPDPRDDLSGMDVARKALILARLLGQRISMENINVESLYPSEFGPDAMSTKDFLESGLVQLDKSIEERVKAASLKGNVLRYVCKIESTGCQVGLEELPKNSALGRLRGSDNVVEIYSRCYESAPLVIQGAGAGNDTTAAGVLADILDLQDLFHKTA

SEQ ID NO: 14901 - DNA, 957 bp, Pyrococcus abyssi GE5
  CDS (1)..(957): transl_table=11
atgaaagttaaagtctcagttttcggatttggaaccgtcggaagggcattggcagaaataatagccgaaaagagaaaagtcttcggagtggagttaaatgtcgtctcaataacagataggagcggaactatttggggagattttgacctgcttgaggccaaagaggttaaagaatcaacaggaaaacttagtaacatcggtgaatacgaggtttatgacttctcaccccaggagctcatagaggaggttaagcccgacatactagttgacgttagtagctgggatgacgctcatgagatgtatagctatgctttggcagaggggataagcgtcgtaacaagtaataagccgccgatagctaaccactacgatgagctaattaccttagctagagaaaatggggttggcatattctttgagtcaacggttatggcgggaaccccgataatagggttgcttagggagaaccttctaggagaagaaatagtgaagatggaagccatcgttaatgcgagcacaaccttcatcttgacgaggatggagaacggtaaaacctttgaagaggccatggaggaggctagaaccttaggaatcctggaggaggatccttccaaggatatagatggtatagatgcgtactacaaagctaaaatcctccactgggtttcctacggggaacaaccggaggaagaagagagggaagggataaggaatgttaaagatgctaggaacgttagattagttgccgagatatctaagggcaggataagcgttgccccgaggaagcttccagataacagtcccctactcgtttccgaagttgaaaacgcagcattgataaaaaccgagaacttgaccttaaccctaaagggcccaggagggggtggaaaagttacagctagtggggtcttcacggatataataaaagccgcacttaagtttccgagtcctcgctaa

SEQ ID NO: 14902 - protein, 318 aa, Pyrococcus abyssi GE5
MKVKVSVFGFGTVGRALAEIIAEKRKVFGVELNVVSITDRSGTIWGDFDLLEAKEVKESTGKLSNIGEYEVYDFSPQELIEEVKPDILVDVSSWDDAHEMYSYALAEGISVVTSNKPPIANHYDELITLARENGVGIFFESTVMAGTPIIGLLRENLLGEEIVKMEAIVNASTTFILTRMENGKTFEEAMEEARTLGILEEDPSKDIDGIDAYYKAKILHWVSYGEQPEEEEREGIRNVKDARNVRLVAEISKGRISVAPRKLPDNSPLLVSEVENAALIKTENLTLTLKGPGGGGKVTASGVFTDIIKAALKFPSPR

SEQ ID NO: 14903 - DNA, 960 bp, Pyrococcus horikoshii OT3
  CDS (1)..(960): transl_table=11
atgaaagttaacatctcaattttcggatttggaaccgttggtagagctctagctgaaattatagctgaaaaaagtagaatttttggggttgaactgaacgtcatctcaataaccgacagaagcgggactatatggggtgattttgaccttttggaagctaaggaagttaaggaatccacgggaaagctgagcaacatcggggattatgaagtttacaacttttcccctcaggagctagtcgaggaagttaaaccaaacattctagttgatgtcagtagctgggatgaagctcatgaaatgtacaaagttgctcttggtgaggggataagcgtcgtgacaagcaataagccgcccatagctaattattatgacgaactaatgaatttagccaaggaaaataatgcaggaatattctttgaatcaacggtaatggccggaacgccgataataggtgtattaagggaaaatctgcttggagagaatattaagagaattgacgctgttgtaaatgctagtaccaccttcattcttactaagatgagtgaaggaaaaacgcttgatgatgccatagaggaagccaagagcctaggtattctagaagaggatccctcaaaggacatagatggaatagacgcttattacaaggcgaagatccttcactgggtttcctatggggaacctccagaagaggaagagaggttaggaattagggaggttagagatgccaggaatgttagactcgtagctcaggtatctaagggaaagataagcgtaaagccgaggaaactttcaagtgataatccgttgctcgttgaaggagtgcaaaatgcagctgttataaggacgaacaatttaggggaagttatacttaagggcccagggggaggaggaagagttaccgctagcggagttttcaccgatataataaaggcaactctaaaattcccaaacctccgctag

SEQ ID NO: 14904 - protein, 319 aa, Pyrococcus horikoshii OT3
MKVNISIFGFGTVGRALAEIIAEKSRIFGVELNVISITDRSGTIWGDFDLLEAKEVKESTGKLSNIGDYEVYNFSPQELVEEVKPNILVDVSSWDEAHEMYKVALGEGISVVTSNKPPIANYYDELMNLAKENNAGIFFESTVMAGTPIIGVLRENLLGENIKRIDAVVNASTTFILTKMSEGKTLDDAIEEAKSLGILEEDPSKDIDGIDAYYKAKILHWVSYGEPPEEEERLGIREVRDARNVRLVAQVSKGKISVKPRKLSSDNPLLVEGVQNAAVIRTNNLGEVILKGPGGGGRVTASGVFTDIIKATLKFPNLR

SEQ ID NO: 14905 - DNA, 1131 bp, Arabidopsis thaliana
  CDS (1)..(1131)
atgaagaagatcccggtgcttctcatgggctgcggaggcgttggccgccaccttcttcaacacatcgtctcttgccgatcgcttcacgccaaaatgggagttcatatacgggtgattggagtatgtgatagtaaatccttagttgctccaatggatgtgctcaaagaggaactgaatgatgaactcttgtcagaagtttgccttatcaaatcaactggttctgcattatcgaagttgggtgctttgggtggatatcgagtcgtccatgattccgagttaagcacggaaacagaagagattgcaaaacttcttggtaaatctacaggcttagctgtggtggattgctcagccagcatggagacgattgaaatattgatgaaggcagttgacttgggttgctgtattgtcctggcaaataagaagcctgttacttcaacgctggaacattacgacaaattggctttgcatccgcgattcatccgccatgaatctactgttggtgctggtcttcctgtcatcgcatccttgaaccgcataatttcgtctggagatcctgttcataggattgtcggtagtttgagcggtaccttgggatatgtaatgagtgagcttgaagatggcaagcctctaagccaagttgttcaagctgccaaaaagctggggtacactgaaccagatccacgtgacgacctcggtggcatggatgttgctagaaagggtttgattcttgctcgacttcttgggaagaggataattatggacagcattaagatagagagcttgtatccagaagagatgggacctggactcatgtctgtggatgatttcctccataatggaatagtaaaacttgatcagaatatagaggagagagttaaaaaagcttcatcaaaagggtgtgtgcttcgttatgtctgtgtgattgagggttcaagcgttcaagttggcattcgagaagtttcaaaagattcaccattgggacggctaagaggcagtgacaatatagtagagatatatagccgttgctacaaggagcagcctttggtgattcaaggtgccggagccgggaacgacacaactgcagccggtgttcttgcagacatcatcgacttgcaggatctttttcactga

SEQ ID NO: 14906 - protein, 376 aa, Arabidopsis thaliana
MKKIPVLLMGCGGVGRHLLQHIVSCRSLHAKMGVHIRVIGVCDSKSLVAPMDVLKEELNDELLSEVCLIKSTGSALSKLGALGGYRVVHDSELSTETEEIAKLLGKSTGLAVVDCSASMETIEILMKAVDLGCCIVLANKKPVTSTLEHYDKLALHPRFIRHESTVGAGLPVIASLNRIISSGDPVHRIVGSLSGTLGYVMSELEDGKPLSQVVQAAKKLGYTEPDPRDDLGGMDVARKGLILARLLGKRIIMDSIKIESLYPEEMGPGLMSVDDFLHNGIVKLDQNIEERVKKASSKGCVLRYVCVIEGSSVQVGIREVSKDSPLGRLRGSDNIVEIYSRCYKEQPLVIQGAGAGNDTTAAGVLADIIDLQDLFH

SEQ ID NO: 14907 - DNA, 1308 bp, Aquifex aeolicus VF5; identical to SEQ ID NO: 6274
  CDS (1)..(1308): transl_table=11

SEQ ID NO: 14908 - protein, 435 aa, Aquifex aeolicus VF5; identical to SEQ ID NO: 6275

SEQ ID NO: 14909 - DNA, 2478 bp, Vibrio cholerae O1 biovar eltor str. N16961; identical to SEQ ID NO: 641
  CDS (1)..(2478): transl_table=11

SEQ ID NO: 14910 - protein, 825 aa, Vibrio cholerae O1 biovar eltor str. N16961; identical to SEQ ID NO: 642

SEQ ID NO: 14911 - DNA, 2448 bp, Pasteurella multocida subsp. multocida str. Pm70; identical to SEQ ID NO: 643
  CDS (1)..(2448): transl_table=11

SEQ ID NO: 14912 - protein, 815 aa, Pasteurella multocida subsp. multocida str. Pm70; identical to SEQ ID NO: 644

SEQ ID NO: 14913 - DNA, 1248 bp, Campylobacter jejuni subsp. jejuni NCTC 11168; identical to SEQ ID NO: 6278
  CDS (1)..(1248): transl_table=11

SEQ ID NO: 14914 - protein, 415 aa, Campylobacter jejuni subsp. jejuni NCTC 11168; identical to SEQ ID NO: 6279

SEQ ID NO: 14915 - DNA, 2463 bp, Escherichia coli O157:H7 EDL933
  CDS (1)..(2463): transl_table=11
atgcgagtgttgaagttcggcggtacatcagtggcaaatgcagaacgttttctgcgggttgccgatattctggaaagcaatgccaggcaggggcaggtggccaccgtcctctctgcccccgccaaaatcaccaaccacctggtggcgatgattgaaaaaaccattagcggccaggatgctttacccaatatcagcgatgccgaacgtatttttgccgaacttctgacgggactcgccgccgcccagccgggattcccgctggcgcaattgaaaactttcgtcgaccaggaatttgcccaaataaaacatgtcctgcatggcattagtttgttagggcagtgcccggatagcattaacgctgcgctgatttgccgtggcgagaaaatgtcgatcgccattatggccggcgtattagaagcgcgcggtcacaacgttaccgttatcgatccggtcgaaaaactgctggcagtggggcattacctcgaatctactgtcgatattgcagagtccacccgccgtattgcggcaagtcgtattccggctgatcacatggtgctgatggcaggtttcaccgccggtaatgaaaaaggcgaactggtggtacttggacgcaacggttccgactactccgcggcggtgctggctgcctgtttacgcgccgattgttgcgagatttggacggacgttgacggggtatatacctgcgacccgcgtcaggtgcccgatgcgaggttgttgaaatcgatgtcctaccaggaagcgatggagctttcctacttcggcgctaaagttcttcacccccgcaccattacccccatcgcccagttccagatcccttgcctgattaaaaataccggaaatcctcaagctccaggtacgctcattggtgccagtcgtgatgaagacgaattaccggtcaagggcatttccaatctgaataatatggcaatgttcagcgtttccggcccggggatgaaaggaatggtcggcatggcggcgcgcgtctttgctgcaatgtcacgcgcccgtatttccgtggtgctgattacgcaatcatcttccgaatacagtatcagtttctgcgttccgcaaagcgactgtgtgcgagctgaacgggcaatgcaggaagagttctacctggaactgaaagaaggcttactggagccgctggcggtgacggaacggctggccattatctcggtggtaggtgatggtatgcgcaccttgcgtgggatctcggcgaaattctttgccgcgctggcccgcgccaatatcaacattgtcgctattgctcagggatcttctgaacgctcaatctctgtcgtggtaaataacgatgatgcgaccactggcgtgcgcgttactcatcagatgctgttcaataccgatcaggttatcgaagtgtttgtgattggcgtcggtggcgttggcggtgcgctgctggagcaactgaagcgtcagcaaagctggttgaagaataaacatatcgacttacgtgtctgcggtgttgctaactcgaaggctctgctcaccaatgtgcatggcctaaatctggaaaactggcaggaagaactggcgcaagccaaagagccgtttaatctcgggcgcttaattcgcctcgtgaaagaatatcatctgctgaacccggtcattgttgactgcacctccagccaggcagtggcggatcaatatgccgacttcctgcgcgaaggtttccacgttgtcacgccgaacaaaaaggccaacacctcgtcgatggattactaccatctgttgcgtcatgcggctgaaaaatcgcggcgtaaattcctctatgacaccaacgttggggctggattaccggttattgagaacctgcaaaatctgctcaatgctggtgatgaattgatgaagttctccggcattctttcaggttcgctttcttatatcttcggcaagttagacgaaggcatgagtttctccgaggcgactacgctggcgcgggaaatgggttataccgaaccggatccgcgagatgatctttctggtatggatgtagcgcgtaaactattaattctcgctcgtgaaacgggacgtgaactggagctggcggatattgaaattgaacctgtgctgcccgcagagtttaacgctgagggtgatgttgccgcttttatggcgaatctgtcacagctcgacgatctctttgccgcgcgcgtggcgaaggcccgtgatgaaggaaaagttttgcgctatgttggcaatattgatgaagatggcgtctgccgcgtgaagattgccgaagtggatggtaatgatccgctgttcaaagtgaaaaatggcgaaaacgccctggccttttatagccactattatcagccgctgccgttggtgctgcgcggatatggtgcgggcaatgacgttaccgctgccggtgtctttgccgatctgctacgtaccctctcatggaagttaggagtctga

SEQ ID NO: 14916 - protein, 820 aa, Escherichia coli O157:H7 EDL933
MRVLKFGGTSVANAERFLRVADILESNARQGQVATVLSAPAKITNHLVAMIEKTISGQDALPNISDAERIFAELLTGLAAAQPGFPLAQLKTFVDQEFAQIKHVLHGISLLGQCPDSINAALICRGEKMSIAIMAGVLEARGHNVTVIDPVEKLLAVGHYLESTVDIAESTRRIAASRIPADHMVLMAGFTAGNEKGELVVLGRNGSDYSAAVLAACLRADCCEIWTDVDGVYTCDPRQVPDARLLKSMSYQEAMELSYFGAKVLHPRTITPIAQFQIPCLIKNTGNPQAPGTLIGASRDEDELPVKGISNLNNMAMFSVSGPGMKGMVGMAARVFAAMSRARISVVLITQSSSEYSISFCVPQSDCVRAERAMQEEFYLELKEGLLEPLAVTERLAIISVVGDGMRTLRGISAKFFAALARANINIVAIAQGSSERSISVVVNNDDATTGVRVTHQMLFNTDQVIEVFVIGVGGVGGALLEQLKRQQSWLKNKHIDLRVCGVANSKALLTNVHGLNLENWQEELAQAKEPFNLGRLIRLVKEYHLLNPVIVDCTSSQAVADQYADFLREGFHVVTPNKKANTSSMDYYHLLRHAAEKSRRKFLYDTNVGAGLPVIENLQNLLNAGDELMKFSGILSGSLSYIFGKLDEGMSFSEATTLAREMGYTEPDPRDDLSGMDVARKLLILARETGRELELADIEIEPVLPAEFNAEGDVAAFMANLSQLDDLFAARVAKARDEGKVLRYVGNIDEDGVCRVKIAEVDGNDPLFKVKNGENALAFYSHYYQPLPLVLRGYGAGNDVTAAGVFADLLRTLSWKLGV

SEQ ID NO: 14917 - DNA, 2433 bp, Escherichia coli O157:H7 EDL933
  CDS (1)..(2433): transl_table=11
atgagtgtgattgcgcaggcaggggcgaaaggtcgtcagctgcataaatttggtggcagtagtctggctgatgtgaagtgttatttgcgtgtcgcgggcattatggcggagtactctcagcctgacgatatgatggtggtttccgccgctggtagcaccactaaccagttgattaactggttgaaactaagccagaccgatcgtctctctgcgcatcaggttcaacaaacgctgcgtcgctatcagtgcgatctgattagcggtctgctacccgccgaagaagccgatagcctcattagcgcttttgtcagcgatcttgagcgcctggcggcgctgctcgacagcggtattaacgacgcagtgtatgcggaagtggtgggccacggcgaagtgtggtcggcgcgcctgatgtctgcggtgcttaatcaacaagggctgccagcggcctggcttgatgcccgcgagtttttacgcgctgaacgcgctgcgcaaccgcaggttgatgaagggctttcttacccgttgctgcaacagctactggtacaacatccgggtaaacgtctggtggtgaccgggtttatcagccgtaacaacgccggtgaaacggtgctgctggggcgtaacggttccgactattccgcgacacaaatcggtgcgctggcgggtgtttctcgtgtaaccatctggagcgacgtcgccggggtatacagtgccgatccgcgtaaagtgaaagatgcctgtctgctgccattgctgcgtctggatgaagccagcgaactggcgcgtctggcggctcccgttcttcacgcccgtactttacagccagtatccggtagcgaaatcgacctgcagctgcgctgtagctacacgccggatcaaggctccacgcgcattgaacgcgtgctggcctccggtactggtgcgcgtattgtcaccagccacgatgatgtctgcttgattgagtttcaggtgcccaccagccaggatttcaaactggcgcataaagagatcgaccagatcctgaaacgtgctcaggtgcgcccactggcggttggcgtgcataacgatcgccagttgctgcaattttgctacacctcagaagtggccgacagtgcgctgaaaatcctcgacgaagcgggattacctggcgaactgcgcctgcgtcaggggctggcgctggtggcgatggtcggggcgggtgtcacccgtaacccgctgcattgccaccgcttctggcagcaactgaaaggccagccggtcgagtttacctggcagtccgatgacggcatcagcctggtggcagtactgcgcaccggcccgaccgaaagcctgattcagggcctgcatcagtccgtcttccgcgcagaaaaacgcatcggcctggtattgttcggcaaaggcaatatcggttcccgctggctggaactgttcgcccgcgagcagagcacgctttcggcgcgtaccggctttgaatttgtgctggcaggcgtggtggacagccgccgcagtctgttgagttatgacgggctggacgccagccgcgcgttagccttcttcaacgatgaagcggttgagcaggatgaagagtcgttgttcctgtggatgcgcgcccatccgtatgatgatttagtggtgctggacgttaccgccagccagcagctggctgaccagtatcttgatttcgccagccacggtttccacgtcatcagtgccaacaaactggcgggagcaagcgacagcaataaatatcgccagatccacgacgccttcgaaaaaaccgggcgtcactggctatacaacgccaccgtcggtgcgggcttgccgatcaaccataccgtgcgcgatctgatcgacagcggcgatactattttgtcgatcagtgggatcttctccggcacgctctcctggctgttcctgcaattcgacggtagcgtgccgtttaccgagctggtggatcaggcgtggcagcagggcttaaccgagcctgatccgcgtgacgacctctccggcaaagacgtaatgcgcaagctggtgattctggcgcgtgaagcgggttacaacattgaaccggaccaggtacgtgtggaatcgctggtgcctgctcattgcgaaggcggcagcatcgaccatttctttgaaaatggcgatgaacttaacgagcagatggtgcaacggctggaagcggcccgcgaaatggggctggtgctgcgctacgtggcgcgtttcgatgccaacggcaaagcgcgtgtgggcgtggaggcggtgcgtgaagaccatccgctggcatcactgctaccgtgcgataacgtctttgccatcgaaagccgctggtatcgcgacaacccgctggtgatccgtgggcctggcgcggggcgcgacgtcaccgccggggcgattcagtcggatatcaaccggctggcacagttgttgtaa

SEQ ID NO: 14918 - protein, 810 aa, Escherichia coli O157:H7 EDL933
MSVIAQAGAKGRQLHKFGGSSLADVKCYLRVAGIMAEYSQPDDMMVVSAAGSTTNQLINWLKLSQTDRLSAHQVQQTLRRYQCDLISGLLPAEEADSLISAFVSDLERLAALLDSGINDAVYAEVVGHGEVWSARLMSAVLNQQGLPAAWLDAREFLRAERAAQPQVDEGLSYPLLQQLLVQHPGKRLVVTGFISRNNAGETVLLGRNGSDYSATQIGALAGVSRVTIWSDVAGVYSADPRKVKDACLLPLLRLDEASELARLAAPVLHARTLQPVSGSEIDLQLRCSYTPDQGSTRIERVLASGTGARIVTSHDDVCLIEFQVPTSQDFKLAHKEIDQILKRAQVRPLAVGVHNDRQLLQFCYTSEVADSALKILDEAGLPGELRLRQGLALVAMVGAGVTRNPLHCHRFWQQLKGQPVEFTWQSDDGISLVAVLRTGPTESLIQGLHQSVFRAEKRIGLVLFGKGNIGSRWLELFAREQSTLSARTGFEFVLAGVVDSRRSLLSYDGLDASRALAFFNDEAVEQDEESLFLWMRAHPYDDLVVLDVTASQQLADQYLDFASHGFHVISANKLAGASDSNKYRQIHDAFEKTGRHWLYNATVGAGLPINHTVRDLIDSGDTILSISGIFSGTLSWLFLQFDGSVPFTELVDQAWQQGLTEPDPRDDLSGKDVMRKLVILAREAGYNIEPDQVRVESLVPAHCEGGSIDHFFENGDELNEQMVQRLEAAREMGLVLRYVARFDANGKARVGVEAVREDHPLASLLPCDNVFAIESRWYRDNPLVIRGPGAGRDVTAGAIQSDINRLAQLL

SEQ ID NO: 14919 - DNA, 2487 bp, Xylella fastidiosa 9a5c; identical to SEQ ID NO: 645
  CDS (1)..(2487): transl_table=11

SEQ ID NO: 14920 - protein, 828 aa, Xylella fastidiosa 9a5c; identical to SEQ ID NO: 646

SEQ ID NO: 14921 - DNA, 1290 bp, Caulobacter crescentus CB15; identical to SEQ ID NO: 6288
  CDS (1)..(1290): transl_table=11

SEQ ID NO: 14922 - protein, 429 aa, Caulobacter crescentus CB15; identical to SEQ ID NO: 6289

SEQ ID NO: 14923 - DNA, 2463 bp, Salmonella typhimurium LT2; identical to SEQ ID NO: 651
  CDS (1)..(2463): transl_table=11

SEQ ID NO: 14924 - protein, 820 aa, Salmonella typhimurium LT2; identical to SEQ ID NO: 652

SEQ ID NO: 14925 - DNA, 2433 bp, Salmonella typhimurium LT2; identical to SEQ ID NO: 653
  CDS (1)..(2433): transl_table=11

SEQ ID NO: 14926 - protein, 810 aa, Salmonella typhimurium LT2; identical to SEQ ID NO: 654

SEQ ID NO: 14927 - DNA, 1320 bp, Ralstonia solanacearum GMI1000; identical to SEQ ID NO: 6294
  CDS (1)..(1320): transl_table=11

SEQ ID NO: 14928 - protein, 439 aa, Ralstonia solanacearum GMI1000; identical to SEQ ID NO: 6295

SEQ ID NO: 14929 - DNA, 963 bp, Pyrococcus furiosus DSM 3638
  CDS (1)..(963): transl_table=11
atgaaggaggtcaaaatttctattttcggttttggaacagttggcagggctttggctgaaatagttgccgaaaactcagaagtttacgggattaagttgaaggtagtctcaataactgacaggagcgggactctctggggggactttgacctacttgaggccaaggaagttaaggaagcaactgggaagataagtaacataggagattacgaagtctattatcttaagccagaagagataattgaggagataagaccagatatctttgttgatgtcagtagttgggatgatgcggcgagggtttatgagttcgcattaaaggagggggtaagcgtagtaacaagcaataagccacctattgccgaaagttatgataagttgctaaaagcttcccaagaggggaatgctggattattcttcgaagctaccgtgatggcaggaacgccgattataggacttttgagggagaacctgctcggagagaagatagaggagatcaaggcagttgttaatgcaagtacaacttttattctcacaagaatggagcaaggaaagacatttgaagaagcttttaatgaagctaaatccctgggagtgttagaggaggatccttctaaggacatagatggaattgatgccttctataaggcaaagattcttcactgggtgtcatatggagctcctccagagtttgaggaaagagttgggattcgagaagttaaggatgcaagaaatgttagattggtggctcaagtctctgaaggaagaataagtgtgaagcccatcaaactcccggagaatagcccattattggttgaaggagtacaaaatgctgcaataataaagacggacaatttgggggaagttgttcttaaaggcccagggggaggaggaagagttactgcgagcggagttttcacagatataatcaaagctgccctaaggtttccaaaggctaggtaa

SEQ ID NO: 14930 - protein, 320 aa, Pyrococcus furiosus DSM 3638
MKEVKISIFGFGTVGRALAEIVAENSEVYGIKLKVVSITDRSGTLWGDFDLLEAKEVKEATGKISNIGDYEVYYLKPEEIIEEIRPDIFVDVSSWDDAARVYEFALKEGVSVVTSNKPPIAESYDKLLKASQEGNAGLFFEATVMAGTPIIGLLRENLLGEKIEEIKAVVNASTTFILTRMEQGKTFEEAFNEAKSLGVLEEDPSKDIDGIDAFYKAKILHWVSYGAPPEFEERVGIREVKDARNVRLVAQVSEGRISVKPIKLPENSPLLVEGVQNAAIIKTDNLGEVVLKGPGGGGRVTASGVFTDIIKAALRFPKAR

SEQ ID NO: 14931 - DNA, 1014 bp, Methanopyrus kandleri AV19
  CDS (1)..(1014): transl_table=11
gtgcgtcaggcgcgcctcttcgtgatcggcctcggggccgttgggctgggactgatgcgacttctggccaagaagcgggacgcgtacgcccgggagttcggcatcgacgttcgcgtggtaggagtcgcggattctcgaggtgtctgggtgaaaaacgacctggaccccgccgaagtgctgaaggttaagcaggaactgggtaccgtggcggaggtcggtgagagcggcgatgcgttggagatcatggaggacgtggagttcgacgttctcgtggagcttacgcccaccgacatagaaacgggcgagcccggtctatcacacatcatgaaggccatagagttgggtaggcacgtggtaactgcgaacaagggaccactggccgtagcttacggggaaatcatggaggcagccgaggaagccggcgtcgtcgtgcgttacgaggccacggccggcggggccatgcccgtgttcaacctcgtacgcgagacgctgaagagtgtggacatacattcgatagagggtgtactcaacggcactgtcaactacatcctcactaggatggaagaagagggcatatccctgaaggacgctatcgccgaggcgcaatctcgtgggatagccgaagcggatccgagtatggacatcgagggatgggataccgcctgtaaggtcgtcatcctcgcgaacgccatcttgggactggactgcaccatcaaggacgtggacgttacaggtatcgaggacattacacccgaggccattcggatcgcggaggagcggggctacaggatcaaattgatcggtcgagcggacagcgacggcgagctctcggtacgtccgtgtctggtgccgaagtccgaccctgtggccaaggtgagaggcgtcatgaacatcgtgagactcgagactgacgtagcgggagacatttacgtgtcgggtcggggcgccggtcccttagaaaccgctagcgccgtcatgagcgatgtcctctccatcgccgagagcgttggttag

SEQ ID NO: 14932 - protein, 337 aa, Methanopyrus kandleri AV19
MRQARLFVIGLGAVGLGLMRLLAKKRDAYAREFGIDVRVVGVADSRGVWVKNDLDPAEVLKVKQELGTVAEVGESGDALEIMEDVEFDVLVELTPTDIETGEPGLSHIMKAIELGRHVVTANKGPLAVAYGEIMEAAEEAGVVVRYEATAGGAMPVFNLVRETLKSVDIHSIEGVLNGTVNYILTRMEEEGISLKDAIAEAQSRGIAEADPSMDIEGWDTACKVVILANAILGLDCTIKDVDVTGIEDITPEAIRIAEERGYRIKLIGRADSDGELSVRPCLVPKSDPVAKVRGVMNIVRLETDVAGDIYVSGRGAGPLETASAVMSDVLSIAESVG

SEQ ID NO: 14933 - DNA, 999 bp, Methanosarcina acetivorans C2A
  CDS (1)..(999): transl_table=11
atgaaaacagtgcactgctccattttaggatttggggcaattggacagggtgtagccgaggtactccttatgaaaaaagagtatctgaaaagtatcgggctggaagttctcgttgttgcagttgtggattcgaaaggggctactgttgaccctgcaggagtggatctggctgattgccttgcccgcaagaggacaaagggaacggttgccatagaaaagctcacaggagtcgaggtcataaggtccgtatcccatgagctggtaatagaaaccactcctacaaatattgttacaggaggcgcagggcttcagaatatgcttgcagccttcgagacaggcaaggatgttgttacttcaaataaaggcccgcttaccctgaagtacagagaacttacgaaagctgcaaaagcagccgggtcaaacttcaggtttgaagcaaccgtcggaggctctatgcccgtcattaacctggcaaacgaagtccttgccggaaataggctccgaagtatcaagggaattcttaacggaacctgtaactatatcctcaccagaatgctcgaggaaagggcaagctataaggatattcttgccgagtccatggaactcggaattgccgaaaccgaccctacatacgatgtcgaaggtattgataccgcctgtaagctggtaattcttgccaatgcaattttcgggcttgatgtgacatataaggacgttgaggttacgggaatcacaaaaatcacacccgaagccctggaaatggcttacgaaagagggcatgtgatcaagctcataggagaagtcagccgggaaaggatacaggttgctccaaggcttgtgcctattaaccatcctcttgctgtgagaggcacccttaatgtagcttccatagacaccgaacttgccggagagatcacggttacgggcaaaggtgcgggcccgatcgaaaccgcaagtgcaattctcagtgactttgttgcaatttacggagatcggtaa

SEQ ID NO: 14934 - protein, 332 aa, Methanosarcina acetivorans C2A
MKTVHCSILGFGAIGQGVAEVLLMKKEYLKSIGLEVLVVAVVDSKGATVDPAGVDLADCLARKRTKGTVAIEKLTGVEVIRSVSHELVIETTPTNIVTGGAGLQNMLAAFETGKDVVTSNKGPLTLKYRELTKAAKAAGSNFRFEATVGGSMPVINLANEVLAGNRLRSIKGILNGTCNYILTRMLEERASYKDILAESMELGIAETDPTYDVEGIDTACKLVILANAIFGLDVTYKDVEVTGITKITPEALEMAYERGHVIKLIGEVSRERIQVAPRLVPINHPLAVRGTLNVASIDTELAGEITVTGKGAGPIETASAILSDFVAIYGDR

SEQ ID NO: 14935 - DNA, 999 bp, Methanosarcina mazei Go1
  CDS (1)..(999): transl_table=11
atgaaaacagtgcgctgttctattttaggatttggtgcaatcggacagggtgtagccgaggtactccttatgaaaaaagagtatctggaaagtatcgggctggaaattatagtggtcgctgtagtggactcaagaggagctactataaatcccgaaggtgttgaccttgcagactgccttgcacgcaaaagaaccacgggcacggttgctatagaaaaaattacaggcgttgaggttataaagtccatagaccacgaccttgttatagagaccactcccacaaatatcgtcaccggaggagcggggcttcagaatatgtttgcagccttcgaaatcggtaaagatgtcattacctccaataaaggtccacttaccctgaaatacagagaactgatggaagccgcaaaagttgcggggtccagtttcaggttcgaagctacggttggcggttccatgcccatcattaacctggcaaatgaggttcttgcaggaaacaggcttaaaagcatcaaagggattttgaacgggacatgcaattatatccttaccaggatgcttgaagaaagggcaagttataaagacattctcgccgagtccatggaactcggaatcgccgaaaccgaccccacatacgatgtggacgggattgatactgcctgcaagcttgtaatccttgccaatgcgattttcggcctcaatgcaacgtataaggatgttgaggttacagggatcacgaaaattactcccgaagctctggaaatggcttatgaaagggggcacgtgatcaagctcataggagaggtcagcagggaaagaatccatgttgctccgaggcttgtgcccatcaatcaccctcttgacgtgaggggcactcttaatgtggcttccatagataccgagcttgcaggagaaattacagttacgggtaagggtgcaggacctgtagaaacggcaagtgcaattctcagtgacctgattgcaatttacggaaatcagtaa

SEQ ID NO: 14936 - protein, 332 aa, Methanosarcina mazei Go1
MKTVRCSILGFGAIGQGVAEVLLMKKEYLESIGLEIIVVAVVDSRGATINPEGVDLADCLARKRTTGTVAIEKITGVEVIKSIDHDLVIETTPTNIVTGGAGLQNMFAAFEIGKDVITSNKGPLTLKYRELMEAAKVAGSSFRFEATVGGSMPIINLANEVLAGNRLKSIKGILNGTCNYILTRMLEERASYKDILAESMELGIAETDPTYDVDGIDTACKLVILANAIFGLNATYKDVEVTGITKITPEALEMAYERGHVIKLIGEVSRERIHVAPRLVPINHPLDVRGTLNVASIDTELAGEITVTGKGAGPVETASAILSDLIAIYGNQ

SEQ ID NO: 14937 - DNA, 2508 bp, Xanthomonas campestris pv. campestris str. ATCC 33913; identical to SEQ ID NO: 655
  CDS (1)..(2508): transl_table=11

SEQ ID NO: 14938 - protein, 835 aa, Xanthomonas campestris pv. campestris str. ATCC 33913; identical to SEQ ID NO: 656

SEQ ID NO: 14939 - DNA, 1044 bp, Xanthomonas campestris pv. campestris str. ATCC 33913
  CDS (1)..(1044): transl_table=11
gtgacgcccacaccgcggctcgccctgttgggcaccggcacggtcgggcgtgccttcgtgacgcgctataccgccttgcagcagcgtcagttgcgcctgccgcgctttgactggctggccaactcgcgcattgcgcacgattgtggtgccggcgcggagcaggcgctgcagctggccaacgcagcgccgcgtggccgtgcggagctgcagccgtgggcagaaaccactgcgctgcgcgccggcgatgtgctggtggatgccaccgccagcgacgtggtggcggattggcacgtggaatggctgacccgcggcgtgcatgtggtgaccgccaacaagctgggccagggcacggcactgtcgcgtgcgcaggacctgtatgccgcgcgtcacgccagcggcgcgtattacggcgacagtgccaccgtgggtgctgggctgcccttgctcagcagcgtgcgtgcactggtggccggcggcgaccagattcattcgatcgaaggggtgttgtcggggtcgttggcatggctgtttcatcgctacgatggcagtacgccgttctcggcgtgcgtccgcgaagcgatggcggccgggtacaccgagcccgatccgcgcatcgatctctccggtgaggacgtgcgccgcaagttgctgatcctggcgcgtgcggccgggcaaccgctggaagccgagcaggtgcatgtcgaatcgctggtgcctgccgcgctggcgtccgtggcgccggaggcggtggacgcgcacctggaaacgctcgatgcgctggtgcagacgcgttggcagcaggcccgcgccgccggccgctgcttgcggttcgtcggccgcgtggacgggcatggggcaagcgtgggcttacgcgaattggccctggaccacccgctggcgggcggcgcgggcaccgataaccgtgtcgccatcagcagcgatcgctaccgcgaccagccgctgttgattcaagggccgggcgccggtgccgaagtgaccgcggcggcgttgctggacgatgtgttgcggatcgttgctggctga

SEQ ID NO: 14940 - protein, 347 aa, Xanthomonas campestris pv. campestris str. ATCC 33913
MTPTPRLALLGTGTVGRAFVTRYTALQQRQLRLPRFDWLANSRIAHDCGAGAEQALQLANAAPRGRAELQPWAETTALRAGDVLVDATASDVVADWHVEWLTRGVHVVTANKLGQGTALSRAQDLYAARHASGAYYGDSATVGAGLPLLSSVRALVAGGDQIHSIEGVLSGSLAWLFHRYDGSTPFSACVREAMAAGYTEPDPRIDLSGEDVRRKLLILARAAGQPLEAEQVHVESLVPAALASVAPEAVDAHLETLDALVQTRWQQARAAGRCLRFVGRVDGHGASVGLRELALDHPLAGGAGTDNRVAISSDRYRDQPLLIQGPGAGAEVTAAALLDDVLRIVAG

SEQ ID NO: 14941 - DNA, 2508 bp, Xanthomonas axonopodis pv. citri str. 306; identical to SEQ ID NO: 657
  CDS (1)..(2508): transl_table=11

SEQ ID NO: 14942 - protein, 835 aa, Xanthomonas axonopodis pv. citri str. 306; identical to SEQ ID NO: 658

SEQ ID NO: 14943 - DNA, 1044 bp, Xanthomonas axonopodis pv. citri str. 306
  CDS (1)..(1044): transl_table=11
gtgacgccgacgccgcggctggccttgctggggaccggcaccgtggggcgcgctttcgtgacgcgctacaccgcgctgcagcagcgccaactatgcttgccgcgcttcgattggctggccaattcacgtgttgcgcaggattgtggcgtcagcgccgagcaggccctgcagcacgccaatgcggcgccacgcgggcagacggtcttgcagccgtgggcagaaaccaccgcgctgcgtgccggcgatgtgctggtggatgcgactgccagcgatgtcgttgccgattggcatgtcgaatggttgcagcgcggcgtgcatgtggtgaccgccaacaaactgggccagggcaccgcgttgtcgcgtgcacaggcgctgcacgcggcccgccatgccagcggcgcgtattacggcgatagcgccactgtgggcgcgggactgccggtgctgagcagcgtgcgcgccttggtcgccggtggggaccgcattcattcgatcgaaggcgtgttgtccggatcgttggcgtggctgtttcatcgttacgacggcagtggcgcgttttccgcctgcgtgcgggaagcgatggtggctggttataccgagccggatccacgcatcgatctctctggagaggatgtgcggcgcaagctgctgatcctggcgcgtgccgcggggtggcagctggaggccgagcaggtgcatgtggaatcgctggtgcctgccactattgccaggctgccgcttgctgagctggatgcgcagttgggcgcgctggatgcggtggtggggacgcgttggcagcaggcgcgtgcggcagggcgttgcctgcgctttgtcggccgcgtggacgcgcatggagcgagcgtgggcttgcgcgaactggcgctggatcacccgttggcaggcggtgccgggaccgataatcgggtggcgatcagcagcgaccgctatcgcgcgcagccgctgctgatccagggaccaggcgccggggccgaagtgactgcagcggcgctgctggatgatgtgctgcggattgtggccggctga

SEQ ID NO: 14944 - protein, 347 aa, Xanthomonas axonopodis pv. citri str. 306
MTPTPRLALLGTGTVGRAFVTRYTALQQRQLCLPRFDWLANSRVAQDCGVSAEQALQHANAAPRGQTVLQPWAETTALRAGDVLVDATASDVVADWHVEWLQRGVHVVTANKLGQGTALSRAQALHAARHASGAYYGDSATVGAGLPVLSSVRALVAGGDRIHSIEGVLSGSLAWLFHRYDGSGAFSACVREAMVAGYTEPDPRIDLSGEDVRRKLLILARAAGWQLEAEQVHVESLVPATIARLPLAELDAQLGALDAVVGTRWQQARAAGRCLRFVGRVDAHGASVGLRELALDHPLAGGAGTDNRVAISSDRYRAQPLLIQGPGAGAEVTAAALLDDVLRIVAG

SEQ ID NO: 14945 - DNA, 2457 bp, Chlorobium tepidum TLS; identical to SEQ ID NO: 659
  CDS (1)..(2457): transl_table=11

SEQ ID NO: 14946 - protein, 818 aa, Chlorobium tepidum TLS; identical to SEQ ID NO: 660

SEQ ID NO: 14947 - DNA, 2436 bp, Yersinia pestis KIM; identical to SEQ ID NO: 661
  CDS (1)..(2436): transl_table=11

SEQ ID NO: 14948 - protein, 811 aa, Yersinia pestis KIM; identical to SEQ ID NO: 662

SEQ ID NO: 14949 - DNA, 1317 bp, Bifidobacterium longum NCC2705
  CDS (1)..(1317): transl_table=11
ttggctcgcaacaacgaaaccccgattcgcgtaggcctgcttggtgccggcaccgtcggctcccagaccgcccgcctgattgtcgagcagaaggacgaactgtccgctcgtatcggccgcccgatcgaactgaccggcgtcgcctgcctcgacccgaaggaaaccgagaagttcccgtggatcgaccagtccatcgtcaccaccgatactttgagcgtggccaccaactcggacatcgtcatcgagctcatcggcggcaccaccgtggcccgcaagttcgtgcttgccgccatcgaatccggtgcttccgtggtcaccgccaacaaggcgctgctggccaagtacggcccggagatctactccgccgccgaggccaagggcgtcgacatctacttcgaggccgctgtgggtggcgcgattccgttcctgcgcccgctgcgcgagtccttggtcggcgacaaggtgaccagcatgctcggcatcgtcaacggcaccaccaactacatcctcgacgagatgaccaccaagggtctccagtttgacgacgtgctcaaggacgcccaggccaagggctacgccgaagccgacccgaccggcgacatcgaaggctacgatgctgccaacaaggccgccatcatggccaccctcggcttccacacctccgtgaccatcgacgatgtgtccgttgagggcatcaccaagatcaccgccgacgacatcgccgcagccaccgccgaacacaaggtcatcaagctgctcgccgtggtcgagaacggcgaggccggcgtctccgcccgcgtctacccggccctgatcgacgagaaccacccgctggcctccgtgcacggctccttcaacgccgtgttcgtcaaggccgaggccgccgacgacctcatgttctacggccgtggcgccggcggcgctccgaccgcctccgccgtcgtgggcgacgtggtgaccgaagcccgccacattgctgctggctgcaccggcccgtccatcccgctgtacaagaatctgccgaaggctccgattaccgcctccaaggctgcattcgccgtgcgcttcctgattcacgacaagccgggcgtgctggccgccatcgccgctgagttcgccaagaacggtgtctccatcaacggtgtgaaccaggacctgaagcccaccatgaccgatcccggctacgacggcgagattcagcagttgcgcgtcgtgacccacctgaccgacgaggaaaccctgcgcaacaccgtcaaggccgtgcaggcgctcgacttcgtcaccggcgacccgtccatcctgcgcgtgctggactga

SEQ ID NO: 14950 - protein, 438 aa, Bifidobacterium longum NCC2705
MARNNETPIRVGLLGAGTVGSQTARLIVEQKDELSARIGRPIELTGVACLDPKETEKFPWIDQSIVTTDTLSVATNSDIVIELIGGTTVARKFVLAAIESGASVVTANKALLAKYGPEIYSAAEAKGVDIYFEAAVGGAIPFLRPLRESLVGDKVTSMLGIVNGTTNYILDEMTTKGLQFDDVLKDAQAKGYAEADPTGDIEGYDAANKAAIMATLGFHTSVTIDDVSVEGITKITADDIAAATAEHKVIKLLAVVENGEAGVSARVYPALIDENHPLASVHGSFNAVFVKAEAADDLMFYGRGAGGAPTASAVVGDVVTEARHIAAGCTGPSIPLYKNLPKAPITASKAAFAVRFLIHDKPGVLAAIAAEFAKNGVSINGVNQDLKPTMTDPGYDGEIQQLRVVTHLTDEETLRNTVKAVQALDFVTGDPSILRVLD

SEQ ID NO: 14951 - DNA, 2463 bp, Shigella flexneri 2a str. 301; identical to SEQ ID NO: 665
  CDS (1)..(2463): transl_table=11

SEQ ID NO: 14952 - protein, 820 aa, Shigella flexneri 2a str. 301; identical to SEQ ID NO: 666

SEQ ID NO: 14953 - DNA, 2433 bp, Shigella flexneri 2a str. 301; identical to SEQ ID NO: 667
  CDS (1)..(2433): transl_table=11

SEQ ID NO: 14954 - protein, 810 aa, Shigella flexneri 2a str. 301; identical to SEQ ID NO: 668

SEQ ID NO: 14955 - DNA, 2394 bp, Shewanella oneidensis MR-1; identical to SEQ ID NO: 671
  CDS (1)..(2394): transl_table=11

SEQ ID NO: 14956 - protein, 797 aa, Shewanella oneidensis MR-1; identical to SEQ ID NO: 672

SEQ ID NO: 14957 - DNA, 2526 bp, Escherichia coli CFT073; identical to SEQ ID NO: 673
  CDS (1)..(2526): transl_table=11

SEQ ID NO: 14958 - protein, 841 aa, Escherichia coli CFT073; identical to SEQ ID NO: 674

SEQ ID NO: 14959 - DNA, 2433 bp, Escherichia coli CFT073
  CDS (1)..(2433): transl_table=11
atgagtgtgattgcgcaggcaggggcgaaaggtcgtcaactgcataaatttggtggcagtagtctggctgatgtgaagtgttatttgcgtgtcgcgggcattatggcggagtactctcagcctgacgatatgatggtggtttccgccgccggtagcaccactaaccagttgattaactggttgaaactaagccagaccgatcgtctctctgcgcatcaggttcaacaaacattacgtcgttatcagtgcgatctgattagcggcctgctacccgccgaagaagccgataacctcattagcgcttttgtcagcgatcttgagcacctggctgcgttgctcgacagcggtattaacgatgcggtgtatgcggaagtggtgggccacggtgaagtgtggtcggcgcgcctgatgtctgcggtgcttaatcaacaagggctgccagcggcctggcttgatgcccgcgagtttttacgcgctgaacgcgctgcgcaaccgcaggttgatgaagggctttcgtacccgttgctgcaacagctactggtacaacatccgggcaaacgtctggtggtgaccgggtttatcagccgtaacaacgccggtgaaacggtgctgcttgggcgtaacggttccgactattccgcgacacaaatcggtgcgctggcgggtgtttctcgcgtaaccatttggagtgacgtcgccggggtatatagcgccgacccgcgtaaagtgaaagatgcctgcctgctgccgttgctgcgtctggatgaagccagcgaactggcgcgtctggcggctcccgttcttcatgcccgtactttacagcccgtttctggcagcgaaatcgacctgcaactgcgctgtagctacacgccggatcaaggttccacgcgcattgaacgcgtgctggcctccggtactggtgcgcgtattgtcaccagccatgatgatgtctgcttgattgagtttcaggtgcccgccagccaggatttcaaactggcgcataaagagatcgaccagatcctgaaacgtgctcaggtgcgcccactggcggttggcgtgcataacgatcgccagttgctgcaattttgctacacctcagaagtggccgacagtgcgctgaaaatcctcgacgaagcgggattacctggcgaactgcgcctgcgtcaggggctggcgctggtggcgatggttggggcgggcgtcacccgtaacccgctgcattgccaccgcttctggcagcaactgaaaggccagccggtcgagtttacctggcagtctgatgatggcatcagcctggtggcagtactgcgcaccggcccgaccgaaagcctgattcaggggctgcatcagtccgtcttccgcgcggaaaaacgcatcggcctggtattgttcggtaagggcaatatcggttcccgctggctggaactgttcgcccgtgagcagagtacgctttcggcacgtaccggctttgaatttgtgctggcaggcgtggtggacagccgccgtagcctgttgagctatgacgggctggacgccagccgcgcgctagccttcttcaacgatgaagcggtcgagcaggatgaagagtcgctgttcctgtggatgcgcgcccatccgtatgatgatttagtggtgctggacgttaccgccagccagcagctcgctgaccagtatcttgatttcgccagccacggtttccacgtcatcagtgccaacaaactggcaggagcgagcgacagcaataaatatcgccagatccacgacgccttcgaaaaaaccgggcgtcactggctgtacaacgctaccgtcggcgcaggtttgccgatcaaccacaccgtgcgcgatctgatcgacagcggcgatactattttgtcgatcagcgggatcttctccggcacgctctcctggctgttcctgcaattcgacggtagcgtgccgtttaccgaactggtggatcaggcgtggcagcagggcttaaccgagcctgacccgcgtgatgacctttccggcaaagacgtgatgcgcaagctggtgattctggcgcgtgaagcgggttacaacattgaaccggaccaggtacgtgttgaatcactggtacctgcccattgcgaaggcggcagcatcgaccatttctttgaaaatggcgatgaacttaacgagcagatggtgcaacgactggaagcggcccgcgaaatggggctggtgctgcgctacgtggcgcgtttcgatgccaacggcaaagcgcgtgtgggcgtggaagcggtgcgtgaagaccatccgctggcatcactactgccatgcgataacgtctttgccatcgaaagccgctggtatcgcgacaacccgctggtgatccgcgggccaggtgcagggcgcgacgtcaccgccggggcgattcagtcggatattaaccgactggcgcagttgttgtag

SEQ ID NO: 14960 - protein, 810 aa, Escherichia coli CFT073
MSVIAQAGAKGRQLHKFGGSSLADVKCYLRVAGIMAEYSQPDDMMVVSAAGSTTNQLINWLKLSQTDRLSAHQVQQTLRRYQCDLISGLLPAEEADNLISAFVSDLEHLAALLDSGINDAVYAEVVGHGEVWSARLMSAVLNQQGLPAAWLDAREFLRAERAAQPQVDEGLSYPLLQQLLVQHPGKRLVVTGFISRNNAGETVLLGRNGSDYSATQIGALAGVSRVTIWSDVAGVYSADPRKVKDACLLPLLRLDEASELARLAAPVLHARTLQPVSGSEIDLQLRCSYTPDQGSTRIERVLASGTGARIVTSHDDVCLIEFQVPASQDFKLAHKEIDQILKRAQVRPLAVGVHNDRQLLQFCYTSEVADSALKILDEAGLPGELRLRQGLALVAMVGAGVTRNPLHCHRFWQQLKGQPVEFTWQSDDGISLVAVLRTGPTESLIQGLHQSVFRAEKRIGLVLFGKGNIGSRWLELFAREQSTLSARTGFEFVLAGVVDSRRSLLSYDGLDASRALAFFNDEAVEQDEESLFLWMRAHPYDDLVVLDVTASQQLADQYLDFASHGFHVISANKLAGASDSNKYRQIHDAFEKTGRHWLYNATVGAGLPINHTVRDLIDSGDTILSISGIFSGTLSWLFLQFDGSVPFTELVDQAWQQGLTEPDPRDDLSGKDVMRKLVILAREAGYNIEPDQVRVESLVPAHCEGGSIDHFFENGDELNEQMVQRLEAAREMGLVLRYVARFDANGKARVGVEAVREDHPLASLLPCDNVFAIESRWYRDNPLVIRGPGAGRDVTAGAIQSDINRLAQLL

SEQ ID NO: 14961 - DNA, 2460 bp, Vibrio vulnificus CMCP6; identical to SEQ ID NO: 675
  CDS (1)..(2460): transl_table=11

SEQ ID NO: 14962 - protein, 819 aa, Vibrio vulnificus CMCP6; identical to SEQ ID NO: 676

SEQ ID NO: 14963 - DNA, 2412 bp, Vibrio vulnificus CMCP6
  CDS (1)..(2412): transl_table=11
atgagtcaagttcgacaactgcacaaatttggtggaagcagccttgcggatccggattgctatcgtcgtgtggtgaacatcctcaaagagtactcgggtgataacgatttagtggtggtgtcggcagcgggcaaaaccaccaaccgcttgattgaatttagtgaggcgctggagaaggacggccgtttggcgcacgaagcattgcaagctttgcgtcaatatcaaaccggattggtggaagcactgatcgcgtcgaaccagcgtagcgagctgcttgatcaacttgctgatgagttcagcacgttggccgagttctccgcaccactcacaaccgcgcaaaaagcagcgatcttaggccatggagaagtgtggtcgtcacgtctactggcttcgttgttgaatcaacatgatctggccgcggtggctcaggacgcgcgtgcgtttttacgggccgaaaccggtacccaacctgaagtggatcgagctcgttcttatcctctgattaaagaagtgttggcgcagcactcacatcgccgtgtggtgatcaccggctttatggcgcaaaaccaagcaggcgaaacggtcttattagggcgcaatggctctgactactctgctaccgtgattggtgcgctggcggaagtggctaaagtgacgatttggagtgatgtggctggggtgtacagcgccgaccctcgtttggtcagtgacgcttgtttgctgccgttactgcgtttggatgaagccagtgaacttgcgcgcttagccgctccagtcctgcatagccgaacattacagccagtggcacaaagtgccaccgagcttaatctgcgctgcagttacacccctgagtcaggttctacccgtattgaacgcgtgttggcgtctgggcgcggtgccaaaatcatcacctcgcttgacgatgttatgttagtgcagttgaacttctctgccggtcatgactttgagcgccagcagcaagaggtattgcgtgcactcaaacgcgcgcagttggaaccattggcgtttgaagcacaaaaagatcaatttaagctgcgcttagcgtataccacagaaattgctggtggcgctttggcacatctgcaagagttgggtttggccgccgagatcaagctgaaagagggcttttcgctggtcgccgctgtcggggctggagtgacgaacaatgccagccattgttttggtttctatcagcagctgaaacactctcctgtggaattcatttctgaagctgaatcaggattgagtttggttgcggtgatgcgccgagtcgatcttccggtactggtgaaagcgatccatacccaattgtttcaagcccagaagcgcgtggcattggccctgtgtggtaaaggtaatatcggatccagttggttatctctgtttgcgcagcagaaaagtgagttggaaaaacgccatggtatgaactttgagttggtggccgtggtggatagccaaacttatctgttcaatgaacaaggtttagatgccgcagcagtacacgcgcattttgatgatgactcggtaccgaatgatggggccaattggttacaacgattgagttcaatccaagactatgacgaagtggtggtgttggatgtcacggccagccgcgagttggctgcgcaatatttggatattgcccatcaaggtatgcacctcatttccgcgaataaaattgcgggctcagcgagcagcgattattactaccaagtgcaagatgccttcagcaaaattggccgtcattggttgtataacgcaaccgtgggtgctggcttaccgattaatcacacggtgagagatttacgcgaaagtggtgatgaaatcgtggcactttctggcatcttctctggcacgctctcttggctgttccagcagtttgatggttcagtaccgtttgcagagctggttgatttagcttggcagcaaggcctcactgaaccggatcctcgcagcgatttagatggttcagatgtgatgcgtaagctggtgatcttggctcgcgaatcaggcttagacattgagcctgaaaacgtgaaagtggaatctttggtgcctgaagagcttaaagaactttctcttgacgatttctttgaccaagcccacttattgagtgagcgtttgcaagagcgtctaactaaggcgcagcgtcaagatcaggtgctacgctatgttgctcgtctagaaaaaaacggtaaagctcgtgtcagtgttgaagcactacaacgagagcatgctttggcaaacttgttgccgtgtgacaatatctttgccattgagagtaaatggtatcgtgataatcctttagtgattcgtggcccgggggctgggcgtgaagtgactgctggcgcaattcagtctgatctcaatcgcttagctggcttgttctaa

SEQ ID NO: 14964 - protein, 803 aa, Vibrio vulnificus CMCP6
MSQVRQLHKFGGSSLADPDCYRRVVNILKEYSGDNDLVVVSAAGKTTNRLIEFSEALEKDGRLAHEALQALRQYQTGLVEALIASNQRSELLDQLADEFSTLAEFSAPLTTAQKAAILGHGEVWSSRLLASLLNQHDLAAVAQDARAFLRAETGTQPEVDRARSYPLIKEVLAQHSHRRVVITGFMAQNQAGETVLLGRNGSDYSATVIGALAEVAKVTIWSDVAGVYSADPRLVSDACLLPLLRLDEASELARLAAPVLHSRTLQPVAQSATELNLRCSYTPESGSTRIERVLASGRGAKIITSLDDVMLVQLNFSAGHDFERQQQEVLRALKRAQLEPLAFEAQKDQFKLRLAYTTEIAGGALAHLQELGLAAEIKLKEGFSLVAAVGAGVTNNASHCFGFYQQLKHSPVEFISEAESGLSLVAVMRRVDLPVLVKAIHTQLFQAQKRVALALCGKGNIGSSWLSLFAQQKSELEKRHGMNFELVAVVDSQTYLFNEQGLDAAAVHAHFDDDSVPNDGANWLQRLSSIQDYDEVVVLDVTASRELAAQYLDIAHQGMHLISANKIAGSASSDYYYQVQDAFSKIGRHWLYNATVGAGLPINHTVRDLRESGDEIVALSGIFSGTLSWLFQQFDGSVPFAELVDLAWQQGLTEPDPRSDLDGSDVMRKLVILARESGLDIEPENVKVESLVPEELKELSLDDFFDQAHLLSERLQERLTKAQRQDQVLRYVARLEKNGKARVSVEALQREHALANLLPCDNIFAIESKWYRDNPLVIRGPGAGREVTAGAIQSDLNRLAGLF

SEQ ID NO: 14965 - DNA, 2487 bp, Xylella fastidiosa Temecula1; identical to SEQ ID NO: 677
  CDS (1)..(2487): transl_table=11

SEQ ID NO: 14966 - protein, 828 aa, Xylella fastidiosa Temecula1; identical to SEQ ID NO: 678

SEQ ID NO: 14967 - DNA, 1293 bp, Clostridium tetani E88; identical to SEQ ID NO: 6312
  CDS (1)..(1293): transl_table=11

SEQ ID NO: 14968 - protein, 430 aa, Clostridium tetani E88; identical to SEQ ID NO: 6313

SEQ ID NO: 14969 - DNA, 2460 bp, Vibrio parahaemolyticus RIMD 2210633
  CDS (1)..(2460): transl_table=11
atgcgagtattgaagtttggcggttcatcactagcggatgcagatcgctttttaagagcggcagatatcattgccaataacgctcaacaagaagaagtggccgttgtactttcagcgccgggtaaaacgacgaataagttagtcgcagtcattgaaggtgcacttcgcaatggtgaagctgagctgcaaatcaatgagttggaagagtcgtttaaaacgctttttgctgatatccaagcggtattgcctaacctagaaggtgcggcgttcgataaccaagttaaaacctctctttctcaactgcgtcagtttgtgcacggcatcaacttacttggtatgtgtccaaacaacgtcaatgctcgcatcatcagtaaaggtgagcgagtttcgattcaattgatgaaggcggtactggaagccaaagggcaaaaagcgaacctcattgatcctgttgaatatctgtatgcgaaaggcgaccacctagaagccatggtggatgttgatgtatcgacacagaacttccgtcaaaatcctcttcctaaagatcatgtgaacatcatgccgggctttactgcgggtaatgaaaaaggcgaattggtgacgctgggtcgtaacggttctgactattcagcggcagtattagcggcttgtttacgtgctgattgttgtgaaatctggacggacgtggatggcgtttacaactgcgatcctcgattggttgaagatgctcgactgcttaagtctctcagctatcaagaagcaatggagctttcttacttcggtgcatccgttctgcatccgaagaccattgctcctatcgcgcaattccacattccatgtctgatcaaaaacagctttaaccctcaaggtgcgggtacgcttatcggccaagatactggtgaagataatcttgcgatcaaaggtattacaacgcttaacgacctaaccatggttaacgtatcaggcccaggtatgaaggggatggtaggcatggcgagccgagtatttggtgcgatgtcttctgctggtgtctctattgtattaattactcaatcatcgtctgagtacagcatcagcttctgtatcgaggccgatgataagctgaaagctcaacaagttctggcggatgcgtttgaacttgaactaaaagacggtctattggaaccggttgattttatcgatgatgtttctatcgttaccttggttggtgacggcatgcgtacatcccgtggtgttgcttcacgtttcttctcttctcttgcggaagtgaacgtcaatatcgtcgcgattgcgcagggttcttcagagcgtgctatctctgcggtaattccggaagacaaaatttctgaggcgatcaaagcgtgtcatgaaaacctatttaactcgaagtacttcctcgatgtgtttgttgttggtgttggcggtgttggcggtgagctggtggatcagatccaacgtcaacaatccaaactggcagaaaaaggtatcgtgattcgagtgtgtggtttagcaaatagcaaaggcttgctactcgatagtgaaggcttaccactagaacactggcgcgaccgcatgtctgcggcaacagaagaattcagtctagctcgtttaatcgcgttagttcagcgcaatcacatcatcaaccctgtacttgtggattgtacgtctagtgaagacattgcaaatcaatatgcagactttctagcagcaggtttccacgtggtcacgccaaacaaaaaagcaaacacagcaagcatggcgtactaccatcagcttcgagatgtcgctcgtagctcgcgtcgcaagttgatgtacgaaacaaccgtaggggcaggcctaccggttatcgaaaacttacaaaacctgattgcagcaggcgatgagcttgaacgatttagtggcattttgtcaggttcactgtcttacatcttcggtaaacttgacgagggtatgagcctgagcgaagcgacgaatattgcgaaagaaaatggcttcactgagccagatcctcgtgatgacctttctggtatggacgttgcgcgtaagctgctcatcctagctcgcgaagcaggtatgtcattagagcttgaagatgtggtcgttgaccaagcgctaccaccaggctttgatgattcaggcagtgttgatgaatttatggctcgtttgccagaagcggacgcgtacttcaaagagttatcagcgaaagcggcagaagaaggcaaagtgctacgttatgttggtgaaattaatgatggcaagtgcactgtgagcatggccgctgtcgatgaaaatgatccaatgttcaaaattaaagacggtgaaaacgcgttggcgttttatagtcgctactaccagccaattcctttagtgctgcgtggttacggtgccggtacagaagtgacggcagcaggcgtattctctgatgtaatgcgtactttaggttggaaactaggggtataa

SEQ ID NO: 14970 - protein, 819 aa, Vibrio parahaemolyticus RIMD 2210633
MRVLKFGGSSLADADRFLRAADIIANNAQQEEVAVVLSAPGKTTNKLVAVIEGALRNGEAELQINELEESFKTLFADIQAVLPNLEGAAFDNQVKTSLSQLRQFVHGINLLGMCPNNVNARIISKGERVSIQLMKAVLEAKGQKANLIDPVEYLYAKGDHLEAMVDVDVSTQNFRQNPLPKDHVNIMPGFTAGNEKGELVTLGRNGSDYSAAVLAACLRADCCEIWTDVDGVYNCDPRLVEDARLLKSLSYQEAMELSYFGASVLHPKTIAPIAQFHIPCLIKNSFNPQGAGTLIGQDTGEDNLAIKGITTLNDLTMVNVSGPGMKGMVGMASRVFGAMSSAGVSIVLITQSSSEYSISFCIEADDKLKAQQVLADAFELELKDGLLEPVDFIDDVSIVTLVGDGMRTSRGVASRFFSSLAEVNVNIVAIAQGSSERAISAVIPEDKISEAIKACHENLFNSKYFLDVFVVGVGGVGGELVDQIQRQQSKLAEKGIVIRVCGLANSKGLLLDSEGLPLEHWRDRMSAATEEFSLARLIALVQRNHIINPVLVDCTSSEDIANQYADFLAAGFHVVTPNKKANTASMAYYHQLRDVARSSRRKLMYETTVGAGLPVIENLQNLIAAGDELERFSGILSGSLSYIFGKLDEGMSLSEATNIAKENGFTEPDPRDDLSGMDVARKLLILAREAGMSLELEDVVVDQALPPGFDDSGSVDEFMARLPEADAYFKELSAKAAEEGKVLRYVGEINDGKCTVSMAAVDENDPMFKIKDGENALAFYSRYYQPIPLVLRGYGAGTEVTAAGVFSDVMRTLGWKLGV

SEQ ID NO: 14971 - DNA, 2433 bp, Salmonella enterica subsp. enterica serovar Typhi Ty2
  CDS (1)..(2433): transl_table=11
atgagtgtgattgcgcaggcaggggcgaaaggtcgtcaactgcataaatttggcggcagtagtctggcggatgtgaagtgttacctgcgtgtcgcaggcattatggcggagtattcgcagcctgacgatatgatggtagtgtccgccgcaggcagtaccaccaaccagttgattagctggctcaagttaagccagaccgatcgcctttctgcgcatcaggtattacagacgttacgccgctaccagtgcgatctgattagcgggctgcttcccgccgacgcggcagatgacttaaccagcgcttttatcagcgatctggaacgtcttgccgccttgctcgacggcggcgtaacggatgccgtctatgctgagatcgtcggacacggcgaaatttggtcggcgagattgatgtccgccgtcctgaatcagcaggggctggatgccgcctggctggacgcgcgcgcatttttacgcgccgaacgcgccgcacagccgcaggttgatgaaggactatcttatcctttattgcaacagctactggcgcagcatcctggcaaacgtctggtcgtgaccgggtttatcagccgcaatcacgacggcgaaacagtcctgttaggccgtaacggttccgactattccgccacgcaaatcggcgcgttggcgggcgtttcccgcgtgaccatctggagcgatgtcgcgggcgtttatagcgccgacccgcgcaaagtgaaagatgcctgcctgctgccgttgctgcgtctggacgaagccagcgagctggcgcgtctggcggcgcctgttctgcacgcccgcacgctacagccagtgtccggcagcgatatcgatttgcagttgcgctgtagctacacgccggatcaagggtcaacccgaattgaacgagtgctggcttccgggacgggcgcgcgtatcgtgaccagtcacgatgatatctgtctgattgagtttcaggtgcccgccagccaggatttcaggctggcgcacaaagagctcgaccaaattttaaaacgggcgcaggcgcgtccgctggcggtgggcgtgcatcgcgatcgccagctattgcagttctgctataccgccgaggtagcggatagcgtactgaaactcctcgacgatgtcggactgccgggcgaattgcgcctgcggcaggggctggcgctggtggcgatggtcggtgcgggcgtcactcgcaatccgctacactgccatcgcttctggcagcagttgaaaggtcagccagtggagtttacctggcagtcggaggagggcatcagtctggtggcggtgctgcgtaccggcccgactgagagcctgattcaggggctgcaccagtctgttttccgcgccgaaaaacgcattggcctgatgctgttcggtaaggggaacatcggctcccgttggctggaactatttgcccgtgaacaaagcacgctttccgcgcgtactggttttgaatttgtgctggcgggcgtggtggatagccgccgtagcctgttgaattatgaagggctggacgccagccgcgcgctggcattctttgatgatgaagccgttgagcaggacgaagagtcgctattcctgtggatgcgtgcgcatccgtatgatgatttagtggtgctggatgtgacagcaagcgagcaactggccgatcagtaccttgatttcgccagccacggttttcatgtgattagcgccaataaactggcgggcgcaagcgccagcgataagtatcgccagattcatgacgcgtttgaaaaaaccgggcgttactggctgtataacgccaccgtgggcgcggggttgccgatcaaccacacggtgcgggatctgattgacagcggcgatacgattctctcgatcagcgggatcttctccgggacgctatcctggctgttcctgcaatttgacggcacggtgccgtttaccgatctggtggatcaggcctggcagcaggggctgacggaacccgatccgcgcgtcgatctttccggaaaagatgtcatgcgtaagctggtgattctggcgcgcgaggcgggatacgacatcgagccggatcaggtgcgtgtagaatcgttggtgccggcgcactgtgaagaagggtctatcgatcactttttcgaaaacggcgacgcgctgaatgaacagatggtgcagcgtctggaggcagcccgcgaactggggctggtgttgcgttacgtggcgcgtttcgacgccaatggcaaagcgcgcgtcggcgttgaagcggtgcgtccggagcatccgctggcggcgctgctgccgtgcgataatgtctttgctattgaaagccgctggtatcgcgataacccgctggtgatccgtgggccgggcgcgggtcgcgatgtgaccgccggggcgattcagtcggatatcaaccgcctggcgcagctattgtaa

SEQ ID NO: 14972 - protein, 810 aa, Salmonella enterica subsp. enterica serovar Typhi Ty2
MSVIAQAGAKGRQLHKFGGSSLADVKCYLRVAGIMAEYSQPDDMMVVSAAGSTTNQLISWLKLSQTDRLSAHQVLQTLRRYQCDLISGLLPADAADDLTSAFISDLERLAALLDGGVTDAVYAEIVGHGEIWSARLMSAVLNQQGLDAAWLDARAFLRAERAAQPQVDEGLSYPLLQQLLAQHPGKRLVVTGFISRNHDGETVLLGRNGSDYSATQIGALAGVSRVTIWSDVAGVYSADPRKVKDACLLPLLRLDEASELARLAAPVLHARTLQPVSGSDIDLQLRCSYTPDQGSTRIERVLASGTGARIVTSHDDICLIEFQVPASQDFRLAHKELDQILKRAQARPLAVGVHRDRQLLQFCYTAEVADSVLKLLDDVGLPGELRLRQGLALVAMVGAGVTRNPLHCHRFWQQLKGQPVEFTWQSEEGISLVAVLRTGPTESLIQGLHQSVFRAEKRIGLMLFGKGNIGSRWLELFAREQSTLSARTGFEFVLAGVVDSRRSLLNYEGLDASRALAFFDDEAVEQDEESLFLWMRAHPYDDLVVLDVTASEQLADQYLDFASHGFHVISANKLAGASASDKYRQIHDAFEKTGRYWLYNATVGAGLPINHTVRDLIDSGDTILSISGIFSGTLSWLFLQFDGTVPFTDLVDQAWQQGLTEPDPRVDLSGKDVMRKLVILAREAGYDIEPDQVRVESLVPAHCEEGSIDHFFENGDALNEQMVQRLEAARELGLVLRYVARFDANGKARVGVEAVRPEHPLAALLPCDNVFAIESRWYRDNPLVIRGPGAGRDVTAGAIQSDINRLAQLL

SEQ ID NO: 14973 - DNA, 2436 bp, Bacteroides thetaiotaomicron VPI-5482; identical to SEQ ID NO: 681
  CDS (1)..(2436): transl_table=11

SEQ ID NO: 14974 - protein, 811 aa, Bacteroides thetaiotaomicron VPI-5482; identical to SEQ ID NO: 682

SEQ ID NO: 14975 - DNA, 1296 bp, Helicobacter hepaticus ATCC 51449
  CDS (1)..(1296): transl_table=11
atgtcaaaacttgtagtgggtatggttggctttggtgttgtaggaagtagcgtattaaaggcacttttggcaaatcggaatattattagcgcaagggctggaaaagaaattgagcttaagcgcattgtagtgcgtgatgaggcaaaagctcacgcaaagcttaagaatctaaacgccactgatgtaaaggtaagcacaaatatagatgatattttgcaagattgcgaaattgaagttgttattgaacttatgggcggtgtggaagttgcttatgagattgctaagagggcgttagaagtaaaaaaagcttttattactgcaaataaagcaatgcttgcttatcaccgttatgatatagcaccgcttgcaaatggtatgcctgtgggttttgaggcaagtgtgtgtggtggcatacccattattcgtgctttgaaagatggtttgagtgcaaatcatattcttgctattcgtgggatactcaatggcacgagtaattatattctcacacaaatgcagcaatacaatcaagattttcacacagcacttaatcaagcacagaatcttggctacgcagaagctgacccaacacttgatataagcggtggcgatgcaggacataagctacttatacttgcttctttagcgtatggcattaatgcgatgccagaggagattctcattgagggtattgagagtattatgcctgatgatatagagtttgcaaatgaatttggctatgcgattaaacttcttggtattgctaaaaagcaaggaaacgaagtagagctgcgtgtgcatccgagtatgattaagaaaggtgcgatgttaagcaaggtagataatgtaatgaatggcattagtgtcattggggattatgtgggggagagtatgtattatggagcaggagcaggaggtgatgcaactgcaagctctgtagtaagtgatattattgctattgcacgaggggagagtgcagcaatgcttggatttagccaaccgcttgaaggcaatgagcatttaaagcttaaaagtattgatgagatttactcacaatactacatacgactctatgtatgtgataaacccggtgtattggggcaagtatcgcagattctagggcagcataatatttctattggtgcatttttacaaaaagagacaaatgataaaaatatcgccaaaatgttactttccacacatcattgctatgaaagggatattaatgctgcactcttggagctagaaagattagattctatttcacaaaagccctataaaatgcgcattgaatgttga

SEQ ID NO: 14976 - protein, 431 aa, Helicobacter hepaticus ATCC 51449
MSKLVVGMVGFGVVGSSVLKALLANRNIISARAGKEIELKRIVVRDEAKAHAKLKNLNATDVKVSTNIDDILQDCEIEVVIELMGGVEVAYEIAKRALEVKKAFITANKAMLAYHRYDIAPLANGMPVGFEASVCGGIPIIRALKDGLSANHILAIRGILNGTSNYILTQMQQYNQDFHTALNQAQNLGYAEADPTLDISGGDAGHKLLILASLAYGINAMPEEILIEGIESIMPDDIEFANEFGYAIKLLGIAKKQGNEVELRVHPSMIKKGAMLSKVDNVMNGISVIGDYVGESMYYGAGAGGDATASSVVSDIIAIARGESAAMLGFSQPLEGNEHLKLKSIDEIYSQYYIRLYVCDKPGVLGQVSQILGQHNISIGAFLQKETNDKNIAKMLLSTHHCYERDINAALLELERLDSISQKPYKMRIEC

SEQ ID NO: 14977 - DNA, 2457 bp, Candidatus Blochmannia floridanus; identical to SEQ ID NO: 683
  CDS (1)..(2457): transl_table=11

SEQ ID NO: 14978 - protein, 818 aa, Candidatus Blochmannia floridanus; identical to SEQ ID NO: 684

SEQ ID NO: 14979 - DNA, 1311 bp, Chromobacterium violaceum ATCC 12472; identical to SEQ ID NO: 6336
  CDS (1)..(1311): transl_table=11

SEQ ID NO: 14980 - protein, 436 aa, Chromobacterium violaceum ATCC 12472; identical to SEQ ID NO: 6337

SEQ ID NO: 14981 - DNA, 2460 bp, Photorhabdus luminescens subsp. laumondii TTO1; identical to SEQ ID NO: 685
  CDS (1)..(2460): transl_table=11

SEQ ID NO: 14982 - protein, 819 aa, Photorhabdus luminescens subsp. laumondii TTO1; identical to SEQ ID NO: 686

SEQ ID NO: 14983 - DNA, 2436 bp, Photorhabdus luminescens subsp. laumondii TTO1; identical to SEQ ID NO: 687
  CDS (1)..(2436): transl_table=11

SEQ ID NO: 14984 - protein, 811 aa, Photorhabdus luminescens subsp. laumondii TTO1; identical to SEQ ID NO: 688

SEQ ID NO: 14985 - DNA, 1347 bp, Corynebacterium diphtheriae NCTC 13129; identical to SEQ ID NO: 6342
  CDS (1)..(1347): transl_table=11

SEQ ID NO: 14986 - protein, 448 aa, Corynebacterium diphtheriae NCTC 13129; identical to SEQ ID NO: 6343

SEQ ID NO: 14987 - DNA, 1311 bp, Geobacter sulfurreducens PCA
  CDS (1)..(1311): transl_table=11
atgaaagagatcaagatcggactcatcggtttcggcaccatcggcacgggtgtcgccaagctcctccaggccaacgccggcctcattgccgacaaggtcggcgctatggttactcttaaaaaaattgccgatctggacgtaaccaccgacaggggcatcgagctccctccgggaacgctcaccagcaatgtggccgacgtgctcgatgatccggagatcagcgtggtgattgagctgatcggcgggtatgagccggccaagagtttcgtgctgcgtgccatcaacaacggcaagcacgttgttaccgccaacaaggccctgctcgccctgcacggggaggagatctacccggcggccgctgccaagggggttcaggtacttttcgaggcggcggtaggcggcggcatcccggtcatctcggccatactgggtaacatggcggcaaacaacttcaccacggtgctcggcatcctcaacggaacctgcaactatatcctcacccgcatgactcaggaaggggccgattttggcgatgtcctcaagaccgcccaggaactgggctatgccgaggcggatccgaccttcgacatcgagggggtcgatactgcccacaaactggcgctgctggtttccctctgtttcgggacaaaggttgatttcaacgccatccacaccgaagggatcagttccatctcgtcagcggatattggttttgcccgggatttcgggtacaagatcaagctgctcgccattggcaagcgcaccggcgataccgtggaagcccgtgtccacccgaccatgatccctgtcaactacccacttgccgatgtggacggggttttcaatgccatccgcttcaccggcgattttatcggtccagtgatgttctatggccgcggcgccggcatggatcccaccgccagtgcggtagtgggcgatgtcattgaaatcgcccggaatatcattgccggcgtaagccgccggtgcgcgcccctcggctatcgggacgaggcagtcacgacgcttgccctcaagcccatgggtgagatcgagggcaagtactatcttcgcttcagtgccgtcgacaagcccggagtgctggcaaaaatctcgggggccctcggcaagtacgatatcagcattgaatcgatgattcagaaggggaggagcgccggtgaatcggtgcccatcgtgatcatgacccatgaggcccgtgaaaaggacattcgcgctgctcttgaggaaatcgacaccttcgagctcatcagcgagaagagcaggttcatcaggattgaggacaacttggaataa

SEQ ID NO: 14988 - protein, 436 aa, Geobacter sulfurreducens PCA
MKEIKIGLIGFGTIGTGVAKLLQANAGLIADKVGAMVTLKKIADLDVTTDRGIELPPGTLTSNVADVLDDPEISVVIELIGGYEPAKSFVLRAINNGKHVVTANKALLALHGEEIYPAAAAKGVQVLFEAAVGGGIPVISAILGNMAANNFTTVLGILNGTCNYILTRMTQEGADFGDVLKTAQELGYAEADPTFDIEGVDTAHKLALLVSLCFGTKVDFNAIHTEGISSISSADIGFARDFGYKIKLLAIGKRTGDTVEARVHPTMIPVNYPLADVDGVFNAIRFTGDFIGPVMFYGRGAGMDPTASAVVGDVIEIARNIIAGVSRRCAPLGYRDEAVTTLALKPMGEIEGKYYLRFSAVDKPGVLAKISGALGKYDISIESMIQKGRSAGESVPIVIMTHEAREKDIRAALEEIDTFELISEKSRFIRIEDNLE

SEQ ID NO: 14989 - DNA, 2454 bp, Yersinia pestis biovar Microtus str. 91001; identical to SEQ ID NO: 693
  CDS (1)..(2454): transl_table=11

SEQ ID NO: 14990 - protein, 817 aa, Yersinia pestis biovar Microtus str. 91001; identical to SEQ ID NO: 694

SEQ ID NO: 14991 - DNA, 1113 bp, Magnaporthe grisea 70-15
  CDS (1)..(1113)
atggcttccccgaaacaagttcatattgccatcatcggcgccggcggagttggaaaatgcttcctctctcagcttcaagccctggccaagcgccgaccttcccctcagctcagcctctgctacatctcgacaagcaaaaaggccctcttcaacgatgaccactccgaggtctacagcctgaccagcggtggcgccgacctggtctcgtctctggccgcctcgtctcgcgagccccccgccatccctcagctagtcgactacctcgcctcggctcccgccaaggtcgtcctggtcgacaacaccagctcccaggccgtggccgacagctacccccagttcctgcgccgcggcgtcagcgtggtcactcccaacaagaaggcattttctggctcctacgggttgtggcgcgatattttcgccgcggccgccgagtcgggcgcaaaggtctatcacgagtcgtcagtcggcgccggcctgcccgtcatctcgactctcaaggacctcgttgacacgggcgatgaggtcacccgcatcgagggcgtcttcagcggcaccatgtcgttcctgttcaactcgttcgccccgaccgaaggtcagggtggaaagtggtccgccgaggtcgccaaggccaagcagcttgggtacacggagcccgacccgcgtgacgacctcaacggaatcgatgttgcccgcaaactcaccatcctcgcccgcctggccgggcttgaggtcgagtcgcccacgtcgttccctgtccagagcttgatccccaaggcgctcgagtctgcagccagcggtgacgagttcctgcagaggctgcctgaattcgacagcgagatggaggaggttaagaccgctgcggagaaggagggcaaggtcgtgcgcttcgtcggcagcatcgatgtagcaaacaagcaggtcaaggtcggactggagaagtttgaccgctcgcaccccatcgctgcgctcaagggcagcgacaacatcatcagcttctacaccaagcgctatggaagcaacccgctcattatccagggcgctggtgctggtggtgacgttactgccatgggagttactggcgatttgatcaaggttttgggtcagattgcatag

SEQ ID NO: 14992 - protein, 370 aa, Magnaporthe grisea 70-15
MASPKQVHIAIIGAGGVGKCFLSQLQALAKRRPSPQLSLCYISTSKKALFNDDHSEVYSLTSGGADLVSSLAASSREPPAIPQLVDYLASAPAKVVLVDNTSSQAVADSYPQFLRRGVSVVTPNKKAFSGSYGLWRDIFAAAAESGAKVYHESSVGAGLPVISTLKDLVDTGDEVTRIEGVFSGTMSFLFNSFAPTEGQGGKWSAEVAKAKQLGYTEPDPRDDLNGIDVARKLTILARLAGLEVESPTSFPVQSLIPKALESAASGDEFLQRLPEFDSEMEEVKTAAEKEGKVVRFVGSIDVANKQVKVGLEKFDRSHPIAALKGSDNIISFYTKRYGSNPLIIQGAGAGGDVTAMGVTGDLIKVLGQIA

SEQ ID NO: 14993 - DNA, 1098 bp, Gibberella zeae PH-1
  CDS (1)..(1098)
atggccgctacaaagcaagtttttatcggaattatcggtgccggaggcgttggcaaggccttcatcgaccagctccattcccttgctgctcgaaagccatccccgaaactgaaccttgcctacattgccacgagccgcaaggccatctacaacgacgattactctcccattaacctcgagaatgtcgttgaaactctcggctcctcatccaaggccccgctcgctcttgcccaggtcgtcgagtacctatccaaagcccccgccaagaccgtcctcgtcgacaacaccagctctcaagatgtcgctgagctgtaccctcttgctctgagccgaggcatcagtatcgttacacccaacaagaaggccttctcaggatcatacaagctgtggcaagacatcttctcagctgccgagtcatcgggcgcccgtgtctaccacgagtcatccgtcggtgctggtcttcccgtcatctccaccttgaaggatctcgttgagactggcgacaaggttactaagatcgagggtgttttcagcggcaccatgtctttcctcttcaactcctttgctcctactgagggccagggaggtaagtggtctgaggaggtcaagaaggccaagtctctgggttacaccgagcctgatccccgagatgacctcaacggtctcgacgttgcccgtaagctgaccattcttgctcgtctggctggcatccccgttgagtctcccacctctttccccgtgcagagccttatccccaaggagctcgagtctgtttccagcggcgacgaattccttgagaagctccctgcctttgactcgcaaatggaggagaccaaggctgctgctgagaaggccggcaaggttgtccgattcgttggaagcatcgatgctgcctccaagcaggtcaaggttggcctagagcagtttgatcgctcgcaccccattgctgctctgaagggtagcgataacattatcagcttctataccgagagatacggaagcaaccccctgatcgtccagggtgcgggcgctggaggtgatgtgaccgccatgggagtcaccgctgatctgatcaaggttctgtcgcagattgcgtaa

SEQ ID NO: 14994 - protein, 365 aa, Gibberella zeae PH-1
MAATKQVFIGIIGAGGVGKAFIDQLHSLAARKPSPKLNLAYIATSRKAIYNDDYSPINLENVVETLGSSSKAPLALAQVVEYLSKAPAKTVLVDNTSSQDVAELYPLALSRGISIVTPNKKAFSGSYKLWQDIFSAAESSGARVYHESSVGAGLPVISTLKDLVETGDKVTKIEGVFSGTMSFLFNSFAPTEGQGGKWSEEVKKAKSLGYTEPDPRDDLNGLDVARKLTILARLAGIPVESPTSFPVQSLIPKELESVSSGDEFLEKLPAFDSQMEETKAAAEKAGKVVRFVGSIDAASKQVKVGLEQFDRSHPIAALKGSDNIISFYTERYGSNPLIVQGAGAGGDVTAMGVTADLIKVLSQIA

SEQ ID NO: 14995 - DNA, 1089 bp, Candida glabrata CBS 138
  CDS (1)..(1089)
atgtctaacaagagtgttaatgttgctattatcggtactggtgttgttggttcctctttcttggaccaaatcgtggctatgaagtccaacatcacctacaatatcatatatgttgcagaattgagcaaggctttgatatctgaagactacagcccattggcattgggttctgactgggctaaggctgttaacggtgcaaaccagggccctcttgctctggagaaactggttgatttcttgaaaaagtctccaattcctgtcattttggttgataacacatccagtgctgccattgcaagcttctatcccacctttgtagagaatggtatctctattgccactccaaacaagaaagctttctcttccgatctagctacttgggattctctattctcaggtaagccaactaacggtttggtgtaccatgaagccactgtcggtgctggtcttcctattttgggcttcttgagagaaattattcaaactggtgacgaaattgaaaagattgaaggtatcttttccggtactttgtcgtacattttcaatgaattttccacaaccactacaaatgatgttaagttctctgatgttgttaaagtggctaaacagttgggttacaccgaacctgatccaagagacgatttgaacggtctagacgttgccagaaaagtcaccatcgttgctagaatttctggtgttaaagttgaatctccaacttctttcccagttcaatctctaatcccaaagccattggaatctgtagaatctgtggatgaatttcttcaaaaattgccagagtacgacgatgaactaactcaattgaagaaagaggctgccgaggaaaacaaggttttgagattcattggtaaagtcgatgtggctactggtaagccatctgttggtattgaaaagtatgaccactcacacccatttgcttcattaaagggttctgataatgttatttctattaagactaaacgttacactaacccagttgttattcaaggtgctggtgctggtgctgccgttactgctgcgggtattttgggtgatgttattaaggctgctcaaagactggtcggtgcataa

SEQ ID NO: 14996 - protein, 362 aa, Candida glabrata CBS 138
MSNKSVNVAIIGTGVVGSSFLDQIVAMKSNITYNIIYVAELSKALISEDYSPLALGSDWAKAVNGANQGPLALEKLVDFLKKSPIPVILVDNTSSAAIASFYPTFVENGISIATPNKKAFSSDLATWDSLFSGKPTNGLVYHEATVGAGLPILGFLREIIQTGDEIEKIEGIFSGTLSYIFNEFSTTTTNDVKFSDVVKVAKQLGYTEPDPRDDLNGLDVARKVTIVARISGVKVESPTSFPVQSLIPKPLESVESVDEFLQKLPEYDDELTQLKKEAAEENKVLRFIGKVDVATGKPSVGIEKYDHSHPFASLKGSDNVISIKTKRYTNPVVIQGAGAGAAVTAAGILGDVIKAAQRLVGA

SEQ ID NO: 14997 - DNA, 1083 bp, Debaryomyces hansenii CBS767
  CDS (1)..(1083)
atggtcaaatctgtcaatgttgctattattggttcgggtgttgttggttcagcatttgttaatcaattaaaaaacttaaaaactgctattaacttcaatgttgtctactttgctagatcttctaaagaagcattattctcttctgactataaacctgttgacttagcttcttacaagaatgcttcggcgcaggctgttttatcattggacgagttgacgaagtttttgaaaggtgcttccaagccaactatcttaattgataacacctcaaatagtactatagctgattactaccctacatttgttaaagaaggtatctctattgctactccaaataagaaggctttttcgtctgatttatcagtctggaatgaaatcttcaagaactctgaggctccttccggtggtttggtttatcatgaagctaccgttggtgctggattgccaattatcggtcctttgagagatttgattactactggcgataaagttgaaaaaatcgaaggtatcttctctggtacattatcatatattttcaacgaattttctaccactgatccttctactaaggtaaagttctcagatgtagtcaaagttgccaaggacttgggttacactgagcctgatccaagagatgatttgaacggtttagatgttgctagaaaggtcaccattttagctagaatatcaggctttgatgttgaatctccaacttctttccctgttgagtctcttattccaaaggagttagaaagtgttcaaactgctgatgaatttttatcaaaattaccagattttgatgctgatatccaaaaggttaaagaagaagcgttagctgaaaataaggttttaaggttcgtcggtcaagttgattttaaggctaataaagtttctgtagaaatcggtaaatacgggttcgaccatccatttgcttccttgaagggtagcgataacgtcgtatcaattaaaaccgaaagatattcgaacccattaattatccaaggtgctggtgctggtgcagaagttacagcacacggtgttttggctgatgcgattaagatcgctgaaagaatagctatttaa

SEQ ID NO: 14998 - protein, 360 aa, Debaryomyces hansenii CBS767
MVKSVNVAIIGSGVVGSAFVNQLKNLKTAINFNVVYFARSSKEALFSSDYKPVDLASYKNASAQAVLSLDELTKFLKGASKPTILIDNTSNSTIADYYPTFVKEGISIATPNKKAFSSDLSVWNEIFKNSEAPSGGLVYHEATVGAGLPIIGPLRDLITTGDKVEKIEGIFSGTLSYIFNEFSTTDPSTKVKFSDVVKVAKDLGYTEPDPRDDLNGLDVARKVTILARISGFDVESPTSFPVESLIPKELESVQTADEFLSKLPDFDADIQKVKEEALAENKVLRFVGQVDFKANKVSVEIGKYGFDHPFASLKGSDNVVSIKTERYSNPLIIQGAGAGAEVTAHGVLADAIKIAERIAI

SEQ ID NO: 14999 - DNA, 1083 bp, Yarrowia lipolytica CLIB122
  CDS (1)..(1083)
atgtccaaggctgttaacattgctattatcggaaccggccttgtcggaaaggccttcatcaaccagcttgccgccgtcaaatcctccattgcctacaatgtcgttctcatcgctcgatcttctaagaccctcatctccaaggacttcaagcccctctccctgaccaactgggagtccgagctcaactcctcccccgtcggagccatgtctttcaccgagatcaacgacttcctcaagaagtctcctctgcccgtcattctggttgacaacacctccaacgaggccctggccaacgagtaccctacttttgtcaactctggtatctccattgccacccccaacaagaaggccttctcctccgatcttaagacctgggaggccatcttcggcggcgctgagaagtccggcgctcttgtctaccatgaggctactgtcggtgccggtctgcccgtcatctctaccctcaatgacctcattgccaccggtgacgaggtcgagaccgtcgagggtattgtttccggaactctgtcttacatcttcaacgagttctccaccctctctggctctgacgttaagttctccgacgttgtcaccaaggccaagcagctcggatacaccgagcccgatccccgagaggatctcaatggtctggatgtcgcccgaaaggtcaccattctggctcgactctctggcttcgacgtggagtctcccactgccttccctgttcagtccctgattcccaagcccctcgagactgcctcttccgccgatgagttcctccagaagctccccgagtatgacgccgaccttgctaagcttcgagacgaggctttcgccgagaagaaggttctccgattcgtcggttccatcaacaagggcaccggcaaggtcgaggttggtattcagaagtacgatgcctctcatccctttgcctccctcaagggctccgataacattatcgccttcaagaccaagcgataccccaaccctctggtcatccagggagctggtgctggagacgaggtcactgctgctggtgttcttgccgacgttttcaaggctgcccagcgacttgccaaatag

SEQ ID NO: 15000 - protein, 360 aa, Yarrowia lipolytica CLIB122
MSKAVNIAIIGTGLVGKAFINQLAAVKSSIAYNVVLIARSSKTLISKDFKPLSLTNWESELNSSPVGAMSFTEINDFLKKSPLPVILVDNTSNEALANEYPTFVNSGISIATPNKKAFSSDLKTWEAIFGGAEKSGALVYHEATVGAGLPVISTLNDLIATGDEVETVEGIVSGTLSYIFNEFSTLSGSDVKFSDVVTKAKQLGYTEPDPREDLNGLDVARKVTILARLSGFDVESPTAFPVQSLIPKPLETASSADEFLQKLPEYDADLAKLRDEAFAEKKVLRFVGSINKGTGKVEVGIQKYDASHPFASLKGSDNIIAFKTKRYPNPLVIQGAGAGDEVTAAGVLADVFKAAQRLAK

SEQ ID NO: 15001 - DNA, 1107 bp, Aspergillus nidulans FGSC A4
  CDS (1)..(1107)
atgtctgcccccatttacctcggtgtcatcggtgtcggcggcgtaggaaccgcttttctcaaccaactggcacgcctcccaaacgccccaaaactgatcctcctcgcccgttccagccaaaccctcctctcgcctaccccctcttactcccccaccatccccgccgcggaatggaagaccgccgtcgaaactccctctcttaccaaatccggcgcattgaccccagatgagattgccacgtaccttgcctctgcccccggtcgctctattcttgtcgacaacaccagcgatcccgccctggcatccaactatccggtatttctgcgcaagggtatcagtgtcgtcacgccaaacaagaagggattctcctcggacttgagcttgtggaaagagatcttcgctgcggctgctgaagggaaggcgcttgtttaccatgagagtacagttggtgccggtctgccggttatttcgacgttgaaggatctcgtcaacaccggtgacgaagtcacgcgcattgagggagttttctcaggaacgctctcgttcttgttcaacactttcgcgccggcgtccggatcttcgagcgcgaagtggagtgaagtcgttagccaggcgaaggaattaggatacacagagcctgatcctcgcgatgacttgaacggcatggacgtcgcccgcaaactgactattcttgcacgtattgctgggctggatgtgcagtctccggactcgttccccattgagtcgctgattcccgccgaactgacgagcctgccgtcgtctgcggacggaattgctcagttcatggcgcgtcttcccgagttcgatagccaaatggctgctatcaaagagggtgctgagaaggccggcaaggtcgtgcgatacgttggtagcgttgatgttgctaagaaggaggtccgtgttggactgcagcagtttgacaaggacagcgccattgccggactcaagggcagcgacaacattatctccttctacactcgtaggtacggcagcaacccactcattgtgcagggtgctggtgccggaggtgatgttacagctatgggcgttacggctgatctgctgaaggttattgagcgtctgtaa

SEQ ID NO: 15002 - protein, 368 aa, Aspergillus nidulans FGSC A4
MSAPIYLGVIGVGGVGTAFLNQLARLPNAPKLILLARSSQTLLSPTPSYSPTIPAAEWKTAVETPSLTKSGALTPDEIATYLASAPGRSILVDNTSDPALASNYPVFLRKGISVVTPNKKGFSSDLSLWKEIFAAAAEGKALVYHESTVGAGLPVISTLKDLVNTGDEVTRIEGVFSGTLSFLFNTFAPASGSSSAKWSEVVSQAKELGYTEPDPRDDLNGMDVARKLTILARIAGLDVQSPDSFPIESLIPAELTSLPSSADGIAQFMARLPEFDSQMAAIKEGAEKAGKVVRYVGSVDVAKKEVRVGLQQFDKDSAIAGLKGSDNIISFYTRRYGSNPLIVQGAGAGGDVTAMGVTADLLKVIERL

SEQ ID NO: 15003 - DNA, 1080 bp, Candida albicans SC5314
  CDS (1)..(1080): transl_table=12
atgtcaaagtcagttaatgttgcaattattggatccggtgttgttggttcatcatatcttagtcaattgaataacttgaaaagtaacatagctttcaatgtaatttatttggctaaaacttctgaagaagcattatacagtaaagactactcaccagttgatttgtcaacttatgaaacagctccaactcaacctacattgagcttagatgatttggttaaattcataaaaggtgcaaagaaaccaactgtgttagtcgataatacttcgagtcctgctattgcaaattattaccctactttcattaaggaaggtatctccattgctaccccaaacaaaaaggctttctcatctgacttaaaggaatggaaagaaattttacaaacagctgaattgccaggtgctggtttagtttaccatgagtgtactgttggtgctgcattgccaattatctccccattgaaagatttgatcgctactggtgataaagttgataaaattgaaggtattttttctggtactttgtcctatattttcaatgaattttctaaaactgaaaaatcagacgttaaattttctgatgttgttaaaaaggctaaagaattgggttacactgaacctgatccaagagatgatttgaatggtttggatgttgccagaaaagtcactattttggccagaatttccggtttagaggttgaaggtccaacttctttcccagttgaatctttaattccaaaagaattagaatgtgtcgagagtgttgctgaatttatggaaaaattaccaaattacgatgctgatattcaaaaagtcaaagatgaagcttttgctgaaaacaaggttttgagatttgttggtaaagttgatcttaacaccaacaaagtatcagttgaaataggtaaatatggttttgatcatccattcgcttctttgaaaggtagtgacaatgttgtttctatcaaaaccggaagatatccaaatccattgattgttcaaggtgctggtgctggtgctgaaatcactgcacatggtgttttggcagacactatcaaaattgctgaaagaattgccaattga

SEQ ID NO: 15004 - protein, 359 aa, Candida albicans SC5314
MSKSVNVAIIGSGVVGSSYLSQLNNLKSNIAFNVIYLAKTSEEALYSKDYSPVDLSTYETAPTQPTLSLDDLVKFIKGAKKPTVLVDNTSSPAIANYYPTFIKEGISIATPNKKAFSSDLKEWKEILQTAELPGAGLVYHECTVGAALPIISPLKDLIATGDKVDKIEGIFSGTLSYIFNEFSKTEKSDVKFSDVVKKAKELGYTEPDPRDDLNGLDVARKVTILARISGLEVEGPTSFPVESLIPKELECVESVAEFMEKLPNYDADIQKVKDEAFAENKVLRFVGKVDLNTNKVSVEIGKYGFDHPFASLKGSDNVVSIKTGRYPNPLIVQGAGAGAEITAHGVLADTIKIAERIAN

SEQ ID NO: 15005 - DNA, 1143 bp, Ustilago maydis 521
  CDS (1)..(1143)
atgtcagcaactcagggaatcaacgtagccatcatcggcgtcggcctcgtaggcacttcggtcatccagcagcttaccaccgtttcttctctcgcgtcgaaactgcacattgtagcgcttcaaaacagcaaaaagacacttctcagcacgcccacctctcccatctctctcaccggctctgctgactggaagactctgcttgccaacagcgctacttcggctcttgctcttcccgatctcgttctcgagcttcaaaagatcactcgcgactcgggacgccataccgccgtagtcgataacacatcggacgaaacggtggccgctttctaccctcattttcttgctgctggtctgagcgttgtcactcctaacaagaaagctttttcgggacctattgagctgtaccaagatatcctcaagtacaagacgaacgacctggttggctccaatggtgcactggtgtaccaggagtcgacggtgggtgctggtttgcccatcatctctacgctcagcgatctggtcaacaccggcgacgagatcacaaagattgagggtgtcttttcgggaacgctttcatacatctttaacgaattctcaactcccaagggtggagataagaagttttcggacattgtcaagtttgccaaggagaatggttacacggagccccacccgaacgatgacttgtcgggatcggacgtcgctcgtaaactcgccatcctctccaggctggtgcctgagctgaaagatgctcttcctcagggatacctgagcgtgcccacgcactcattgaccccgccaccgctagccgatgttgcttcgggcgaagaatatgtcaagcgccttccggagttcgacgttgactacgataagctgaacaaggaagccttcgatgcaggatcggtgctgcgctacgtcggtgtgatcgatgtccagaagaaggagatcaaggcatcattggaaacatacccagctacccatccgttcgcatcgtcgctcagcggttcggacaacatcatcgccttccacacaaagaggtactcggcccgtccactgttggtccaaggctccggtgctggtgctgatgttacggcgatgggtgttgttgccgacctcatcaagattgccgagcgtcgttcgtag

SEQ ID NO: 15006 - protein, 380 aa, Ustilago maydis 521
MSATQGINVAIIGVGLVGTSVIQQLTTVSSLASKLHIVALQNSKKTLLSTPTSPISLTGSADWKTLLANSATSALALPDLVLELQKITRDSGRHTAVVDNTSDETVAAFYPHFLAAGLSVVTPNKKAFSGPIELYQDILKYKTNDLVGSNGALVYQESTVGAGLPIISTLSDLVNTGDEITKIEGVFSGTLSYIFNEFSTPKGGDKKFSDIVKFAKENGYTEPHPNDDLSGSDVARKLAILSRLVPELKDALPQGYLSVPTHSLTPPPLADVASGEEYVKRLPEFDVDYDKLNKEAFDAGSVLRYVGVIDVQKKEIKASLETYPATHPFASSLSGSDNIIAFHTKRYSARPLLVQGSGAGADVTAMGVVADLIKIAERRS

SEQ ID NO: 15007 - DNA, 1128 bp, Cryptococcus neoformans var. neoformans B-3501A
  CDS (1)..(1128)
atgctctccgcttccattctccgtcccatccccgtcgcgcttcttggcctcggtggcgtcggcaaggctgtcctctcccagctcctctcccctcccctctccgcccaattccagctcgtcctcatcgccaactcccgtctgtccctctcgctccccctccccgctgcccccatcaccccggccaacttccagtccatcttggagaaacacggtgctcctctcgacgttacctccgtcatctccgtcctctcaacccaccccgatgcccctggtattttcatcgactgcaccggctctgatgcgatccccgccatgtatccccaaatcctctccatgggcgttcacatcgtcacccccaacaagaagggtctctcctcttccgaggctctctacaaggctatcgctgagaagagcttccccaatactccttctttactctacggcgagtctactgtcggtgcgggtttgccgatcatccagactttgaaggacttggtcgctaccggtgatgagattgagaagattgagggtgtcttcagtggcactttgagttatatcttcaatgagttcagcaagcctggaggtggcgacgtcaagttctccgaggttgtcaaggttgccaaggagaagggctatactgagcctgaccctcgagatgacctctccggtattgacgtcgcccgaaagctctccatcctcgcccgactcgttcccaccgttcccgctctccccgaaggctacgcttccatccctacccaatctctcgttcccgatgtcctctccgacgcttctaccaaggaggagtaccttgagcgactcgaggagggtgacgagttctttgccaacctcagggaggaggccaagaaggagggtcaggtggtgagatatgtcggtgttattgacatcaagtctggcaaggttgaggccaagttggacaagtaccccgcggaccacgctttggctaccggtctcaaggggtctgacaacatcgtctcttttaccaccaagagatactctccccggcctcttatcatccaaggtgccggtgccggtgctgatgttaccgctatgggtgttacttccgacatggtcaaaatctacgagaggctcgctgtttctcgtatctaa

SEQ ID NO: 15008 - protein, 375 aa, Cryptococcus neoformans var. neoformans B-3501A
MLSASILRPIPVALLGLGGVGKAVLSQLLSPPLSAQFQLVLIANSRLSLSLPLPAAPITPANFQSILEKHGAPLDVTSVISVLSTHPDAPGIFIDCTGSDAIPAMYPQILSMGVHIVTPNKKGLSSSEALYKAIAEKSFPNTPSLLYGESTVGAGLPIIQTLKDLVATGDEIEKIEGVFSGTLSYIFNEFSKPGGGDVKFSEVVKVAKEKGYTEPDPRDDLSGIDVARKLSILARLVPTVPALPEGYASIPTQSLVPDVLSDASTKEEYLERLEEGDEFFANLREEAKKEGQVVRYVGVIDIKSGKVEAKLDKYPADHALATGLKGSDNIVSFTTKRYSPRPLIIQGAGAGADVTAMGVTSDMVKIYERLAVSRI

SEQ ID NO: 15009 - DNA, 2460 bp, Erwinia carotovora subsp. atroseptica SCRI1043; identical to SEQ ID NO: 701
  CDS (1)..(2460): transl_table=11

SEQ ID NO: 15010 - protein, 819 aa, Erwinia carotovora subsp. atroseptica SCRI1043; identical to SEQ ID NO: 702

SEQ ID NO: 15011 - DNA, 2436 bp, Erwinia carotovora subsp. atroseptica SCRI1043; identical to SEQ ID NO: 703
  CDS (1)..(2436): transl_table=11

SEQ ID NO: 15012 - protein, 811 aa, Erwinia carotovora subsp. atroseptica SCRI1043; identical to SEQ ID NO: 704

SEQ ID NO: 15013 - DNA, 1356 bp, Leifsonia xyli subsp. xyli str. CTCB07; identical to SEQ ID NO: 6364
  CDS (1)..(1356): transl_table=11

SEQ ID NO: 15014 - protein, 451 aa, Leifsonia xyli subsp. xyli str. CTCB07; identical to SEQ ID NO: 6365

SEQ ID NO: 15015 - DNA, 1311 bp, Symbiobacterium thermophilum IAM 14863; identical to SEQ ID NO: 6368
  CDS (1)..(1311): transl_table=11

SEQ ID NO: 15016 - protein, 436 aa, Symbiobacterium thermophilum IAM 14863; identical to SEQ ID NO: 6369

SEQ ID NO: 15017 - DNA, 2451 bp, Mannheimia succiniciproducens MBEL55E; identical to SEQ ID NO: 705
  CDS (1)..(2451): transl_table=11

SEQ ID NO: 15018 - protein, 816 aa, Mannheimia succiniciproducens MBEL55E; identical to SEQ ID NO: 706

SEQ ID NO: 15019 - DNA, 2436 bp, Bacteroides fragilis NCTC 9343; identical to SEQ ID NO: 707
  CDS (1)..(2436): transl_table=11

SEQ ID NO: 15020 - protein, 811 aa, Bacteroides fragilis NCTC 9343; identical to SEQ ID NO: 708

SEQ ID NO: 15021 - DNA, 2448 bp, Haemophilus influenzae 86-028NP; identical to SEQ ID NO: 709
  CDS (1)..(2448): transl_table=11

SEQ ID NO: 15022 - protein, 815 aa, Haemophilus influenzae 86-028NP; identical to SEQ ID NO: 710

SEQ ID NO: 15023 - DNA, 2499 bp, Colwellia psychrerythraea 34H
  CDS (1)..(2499): transl_table=11
gtgtctagcaacgaaattgcagatattgattttattgctgaagtagctgcagaaaataaattggctaaacatgctattcaagtacataaatttggtggtagttcattagcaacgcccaaatgtattaaacgtgcgcttgaaattatccgtgaaaattgtcagttaaacgatatcgttgtggtctcagctaatggtaaaacaactgaccgtttatttgctctctattctctggtcgaacgaaccatcgcagaagatacaatacaaaaaagtgatgaattaactcaagcgattgatgagttagcgaaagagcaagcgcaacttattactgaattattgaatgctaataataccaagcaattattgcttaggttgcataaagacattgagcaattaacgacttggttaaccgcggatattgttcagcatcacaatgatgttttagccttaggtgaagtatggtcagcaagattgttgtcggcgttacttaatgagcaagtttgcccaagtaatagtatcgactctcgtgattttcttgttatcgataatgaacaaagttgcgtagttgatactgcgctaagtgctgcacaattaagacaaagacgtcagtttggtaagttagcggttattactggttatatcagtaaagattctcgtggtaaaagctgtaccttaggccgtaacggtagtgattactccgcgactattatcgcgtctttagttgccgctggaaatgtgactctatggacagatgttgatggtatttacagtgccgatcctcgtgttgttcctagcgctagaaaattacatcgtttacccaatggcgtcgcaaaagaactaggccgcttgggtaaccccgttttgcatgctaaaaccttattaccattgattaacccattaagtgagcatcatacccatctgcatgtcgctagtagttttgatgcccaagtcatcggcactgaaattggtaagtttggtcagattgctaagcaagagttatctgtaacctaccttaatgatttattgctagcgcaatcggtgagctttataggtgaagctgcaactagggcgaaggctgagttttcccctatctgtatagatgaccaaaagggctttatggtcatcacacaaggacaacaaaaagccttgagtgattggttggcgagtcatgatgttgaaattacttttaagccggttgctattatcgcaaccgttggccatcgcgtagctgaacgtggtgatatcagggcgcgctttaaacgctcattaaaagccgctaaaccattgaacttggttggtagtgataataatcatagcgtgattgctattttacctgaaccttgttcaattgagctcttaaatacagtgcaccatgagatgacaaaagatgctcgtcatattggcttagttgttgcgggtatgggcaatataggcgaacgttttttagaattattacccgcgcagcttaataaagtatacgcgttagagaatttacatttagttggtttgctttcatcgaaaaaagcgttaattaacaatgatggtattgatgtaaaccaagcaacttcattgtttgctcaagaagcccaaagctatgatcacgaacagcttatttcttggttgacccaaaatccatacgatgagttaattgtggtagacatcacgcctagcgaagattttagtttattgtatgaacagatgtttgctctaggtgtacatgtgattggtgccaataagtgggctgcttcaagcagtacagctcattataataatttagtcaatactgcggatagtcataatagtttatggttaggcaatactacggtaggtgcgggtttaccaatcaattatgctattgatgacttgcgtcaaagtggcgatagcatcagtgagttatcaggtatattttcaggtacgctctcgtggttatttgaaacctatgatggcagttcaaagttttcagagctgttattaaatgctttggcacaaggcattaccgagcctgatcctcgagaagatttatcaggtagagatgtacagcgtaagttactcattttagcgcgaaaagcgggttttgaattagcattagatgatattgattgtcaaaacttagtgccagaagcattacaagctttatcaactagtgaattcttagccagagctaatgagctagatgagtattttgctaccgcgttatctgaagcgaatcgtaaaggtgcgtgcattcgctatgttgctcgttttcagcataatccagaaacaggtattagtgcaaaagtcagtttagaagtgctgccgcaaagtgatgcttttgccaacctaaccccttgtgacaatatttttcaaatcagtagtcattggtatcaagataaccctttgattattcgtggtcccggtgctggacgtgacgtcacggctggcggtttacactcagatctcgttaagatttgtcagcagcttgctcataaacaaagtcaagtgaagataaagggcattaactag

SEQ ID NO: 15024 - protein, 832 aa, Colwellia psychrerythraea 34H
MSSNEIADIDFIAEVAAENKLAKHAIQVHKFGGSSLATPKCIKRALEIIRENCQLNDIVVVSANGKTTDRLFALYSLVERTIAEDTIQKSDELTQAIDELAKEQAQLITELLNANNTKQLLLRLHKDIEQLTTWLTADIVQHHNDVLALGEVWSARLLSALLNEQVCPSNSIDSRDFLVIDNEQSCVVDTALSAAQLRQRRQFGKLAVITGYISKDSRGKSCTLGRNGSDYSATIIASLVAAGNVTLWTDVDGIYSADPRVVPSARKLHRLPNGVAKELGRLGNPVLHAKTLLPLINPLSEHHTHLHVASSFDAQVIGTEIGKFGQIAKQELSVTYLNDLLLAQSVSFIGEAATRAKAEFSPICIDDQKGFMVITQGQQKALSDWLASHDVEITFKPVAIIATVGHRVAERGDIRARFKRSLKAAKPLNLVGSDNNHSVIAILPEPCSIELLNTVHHEMTKDARHIGLVVAGMGNIGERFLELLPAQLNKVYALENLHLVGLLSSKKALINNDGIDVNQATSLFAQEAQSYDHEQLISWLTQNPYDELIVVDITPSEDFSLLYEQMFALGVHVIGANKWAASSSTAHYNNLVNTADSHNSLWLGNTTVGAGLPINYAIDDLRQSGDSISELSGIFSGTLSWLFETYDGSSKFSELLLNALAQGITEPDPREDLSGRDVQRKLLILARKAGFELALDDIDCQNLVPEALQALSTSEFLARANELDEYFATALSEANRKGACIRYVARFQHNPETGISAKVSLEVLPQSDAFANLTPCDNIFQISSHWYQDNPLIIRGPGAGRDVTAGGLHSDLVKICQQLAHKQSQVKIKGIN

SEQ ID NO: 15025 - DNA, 2478 bp, Colwellia psychrerythraea 34H; identical to SEQ ID NO: 711
  CDS (1)..(2478): transl_table=11

SEQ ID NO: 15026 - protein, 825 aa, Colwellia psychrerythraea 34H; identical to SEQ ID NO: 712

SEQ ID NO: 15027 - DNA, 1296 bp, Thermobifida fusca YX
  CDS (1)..(1296): transl_table=11
atggcactgaaggtggcgctgctgggttgcggcgttgtgggttctcaggtggtccggctgctcaacgagcagtcgcgtgaacttgcggagcgcatcggaacgcccctggagatcggaggcatcgcggtgcgccgcctggaccgcgcccgggggacgggcgtggaccccgacctcctcaccaccgacgccatgggtcttgtgaccagagacgacatcgacctcgtggtggaggtcatcggcggcatcgagcccgcccggtcgctcatcctggccgcgatccagaagggcaagtctgtggtgaccgccaacaaggcgctgctcgccgaggacggcgcgaccatccacgccgctgcccgggaagcgggagttgacgtgtactacgaggccagcgtcgccggggccatcccgctgctgcggccgctgcgtgactccctggccggggaccgcgtcaaccgggtcttgggcatcgtcaacggcaccaccaactacatcctggaccggatggacagcctgggcgccggcttcaccgagtcactggaggaagcccaggccctgggatacgccgaagccgacccgaccgccgacgtggagggcttcgacgccgccgctaaagccgcgatcctggcccggctcgccttccacacaccggtgaccgctgccgatgtgcaccgcgaaggcatcaccgaggtctccgcggccgacatcgccagcgccaaggccatgggctgcgtggtgaaactcctcgcgatctgccagcgctccgacgacggctccagcatcggcgtgcgcgtccacccggtgatgctgccccgcgaacacccgctcgccagcgtcaaaggcgcctacaacgcggtgttcgtggaagccgagtccgccgggcagctcatgttctacggcgcgggcgcgggaggcgtccccaccgccagcgcagtcctcggcgacctggtcgcggtggcacggaaccgcctggcccgcactttcgtggccgacggccgggccgacgcgaaactgcccgtccaccccatgggggagaccatcaccagctaccacgtggcgctggacgttgccgaccggcccggcgtgctcgccggggtcgccaaagtcttcgcggccaacggcgtgtcgatcaagcacgtccgccaggaaggccgcggggacgacgcccagctcgtcctggtcagccacaccgcgccggatgccgccctggcccggaccgtggagcaactgcgcaaccacgaggacgtccgcgcggtcgccagcgtgatgcgggtcgaaaccttcgacaacgaacgatga

SEQ ID NO: 15028 - protein, 431 aa, Thermobifida fusca YX
MALKVALLGCGVVGSQVVRLLNEQSRELAERIGTPLEIGGIAVRRLDRARGTGVDPDLLTTDAMGLVTRDDIDLVVEVIGGIEPARSLILAAIQKGKSVVTANKALLAEDGATIHAAAREAGVDVYYEASVAGAIPLLRPLRDSLAGDRVNRVLGIVNGTTNYILDRMDSLGAGFTESLEEAQALGYAEADPTADVEGFDAAAKAAILARLAFHTPVTAADVHREGITEVSAADIASAKAMGCVVKLLAICQRSDDGSSIGVRVHPVMLPREHPLASVKGAYNAVFVEAESAGQLMFYGAGAGGVPTASAVLGDLVAVARNRLARTFVADGRADAKLPVHPMGETITSYHVALDVADRPGVLAGVAKVFAANGVSIKHVRQEGRGDDAQLVLVSHTAPDAALARTVEQLRNHEDVRAVASVMRVETFDNER

SEQ ID NO: 15029 - DNA, 996 bp, Methanosarcina barkeri str. Fusaro
  CDS (1)..(996): transl_table=11
atgaaaacagtgtgctgctccattctcgggttcggtgcaatcggacagggcgtggctgaagtattccttatgaaaaaagagtatctggaaagtatcgggctggaagtaaaagtagttgccgttgtggactcaaagggtgcaactgttaatcctgaaggggtggatcttgccgactgccttgtcaggaagaggagagacagaacggtagctcttgagaatatctctggagtcgaggttatccaatctgtagctcatgatcttgtaatcgagactaccccgacaaatatactaactggcggggcaggtatgcagaatatgtttgcggccttcaaaaccggaaaagatgttattacctccaataaaggccctcttacccttaagtacagagaactcatggaagccgcaaaggcagcaggctctcatttcaggttcgaagcgactgtcggtgggtcaatgcctattatcaacctggtaaacgaggtgcttgcaggcaataaggttaaaagtatcaaaggaattctaaatgggacctgtaattatatcctgacaagaatgctggaggaaagagcaagttacaacgacattcttgccgaatccatgcagctcggtattgctgaaaccgatcctacatatgacgtggaaggaattgatacagcctgcaaactcgttattcttgccaacgcaattttcggaattgatgctacttataacaacgttgaggtaacgggaatcacgaaagttacgcctgaagctcttgagatggcttatgaaaaagggcatgttatcaaacttataggtgaagttagcagggaaagaattcatgtagcccccaggctcgtacctatcaaccatccccttgcagtcggagggacgctgaatgtggcgtcagtagaaaccgaacttgcaggagaaattacggttacgggtaagggtgcaggcccgattgaaactgcgagtgcgattcttagcgatctgatcgcaatttatggagattaa

SEQ ID NO: 15030 - protein, 331 aa, Methanosarcina barkeri str. Fusaro
MKTVCCSILGFGAIGQGVAEVFLMKKEYLESIGLEVKVVAVVDSKGATVNPEGVDLADCLVRKRRDRTVALENISGVEVIQSVAHDLVIETTPTNILTGGAGMQNMFAAFKTGKDVITSNKGPLTLKYRELMEAAKAAGSHFRFEATVGGSMPIINLVNEVLAGNKVKSIKGILNGTCNYILTRMLEERASYNDILAESMQLGIAETDPTYDVEGIDTACKLVILANAIFGIDATYNNVEVTGITKVTPEALEMAYEKGHVIKLIGEVSRERIHVAPRLVPINHPLAVGGTLNVASVETELAGEITVTGKGAGPIETASAILSDLIAIYGD

SEQ ID NO: 15031 - DNA, 1314 bp, Thiobacillus denitrificans ATCC 25259; identical to SEQ ID NO: 6398
  CDS (1)..(1314): transl_table=11

SEQ ID NO: 15032 - protein, 437 aa, Thiobacillus denitrificans ATCC 25259; identical to SEQ ID NO: 6399

SEQ ID NO: 15033 - DNA, 1299 bp, Moorella thermoacetica ATCC 39073; identical to SEQ ID NO: 6416
  CDS (1)..(1299): transl_table=11

SEQ ID NO: 15034 - protein, 432 aa, Moorella thermoacetica ATCC 39073; identical to SEQ ID NO: 6417

SEQ ID NO: 15035 - DNA, 1353 bp, Saccharophagus degradans 2-40; identical to SEQ ID NO: 6424
  CDS (1)..(1353): transl_table=11

SEQ ID NO: 15036 - protein, 450 aa, Saccharophagus degradans 2-40; identical to SEQ ID NO: 6425

SEQ ID NO: 15037 - DNA, 1314 bp, Methylobacillus flagellatus KT; identical to SEQ ID NO: 6426
  CDS (1)..(1314): transl_table=11

SEQ ID NO: 15038 - protein, 437 aa, Methylobacillus flagellatus KT; identical to SEQ ID NO: 6427

SEQ ID NO: 15039 - DNA, 996 bp, Methanococcoides burtonii DSM 6242
  CDS (1)..(996): transl_table=11
atgagaaaagtacgtgcatccattattggatttggttcggttggacagggtgttgcagaggtccttctgagaaaggatggttatttaaagtctcttggtatcgacctcgatgttgtggccatcgctgattccaaaggcgctgaggtgaatcctgctggtatagaccttaaagctacacttggcagaaagcgggaatccggtactgttgcaatcgatgatctgactggcgaagatattatcaaaaatattgaccatgatgttgttattgagaccactccaactgatatagagaccggtggctgtggtcttgtgaacatgcttgctgcttttgaatgtggcaggcatgtggtgacctccaataaaggtcctcttgcattgaaatatagggagcttgccgaagctgcgaaggaagctgaccgtaagttgctttttgaggccactgtcggcggtgcgatgcctatcatcaatcttgtgagggatacacttgccggaaatgaaatactcagtgtggaaggcatccttaacggcacatgtaattacattctgacacgtatgatggaagagcatgcttcttatgaccagatgcttgcagagtcccaggagcttggtattgctgagaccgatcctacctatgatgtggaaggtattgacacggcatgtaaacttgtcattcttgcaaattccatattcgatcagaatgccacttatcaggatgtggacgttaccggaattaccaaggtaactctggaatctctttctcttgcttatgatgaaggctatgtcatcaaacttataggagaggtcaagaaggaccgtcttcgcgtttcaccacgccttgtaccatcatcccatccgctggctgtcggtgggacactgaacgttgcatcggtgtgtaccgatcttgcaggaaccattacggttacaggaagaggcgcaggttctattgaaactgcaagtgctgtcttgagtgacattgtgtctatctataaggactga

SEQ ID NO: 15040 - protein, 331 aa, Methanococcoides burtonii DSM 6242
MRKVRASIIGFGSVGQGVAEVLLRKDGYLKSLGIDLDVVAIADSKGAEVNPAGIDLKATLGRKRESGTVAIDDLTGEDIIKNIDHDVVIETTPTDIETGGCGLVNMLAAFECGRHVVTSNKGPLALKYRELAEAAKEADRKLLFEATVGGAMPIINLVRDTLAGNEILSVEGILNGTCNYILTRMMEEHASYDQMLAESQELGIAETDPTYDVEGIDTACKLVILANSIFDQNATYQDVDVTGITKVTLESLSLAYDEGYVIKLIGEVKKDRLRVSPRLVPSSHPLAVGGTLNVASVCTDLAGTITVTGRGAGSIETASAVLSDIVSIYKD

SEQ ID NO: 15041 - DNA, 1296 bp, Acidobacteria bacterium Ellin345
  CDS (1)..(1296): transl_table=11
atggcttcgactttgaaagtgacacgcctcccagagaacgcttcggcgaaagtttgcaaggtcgcactggtgggctttggcaccgtcggcagttcggtggcgcgtctgctggcctcgcgtaatggagagcttcccttccagttgacgcatgtgtacaaccgcgatgtcgcacgcaagaaggtggattgggtctcgagcgatgtgcagtggaccgatacgttcgatgatctgatcaaatcggacgcggaagtgatcgtcgagctggttggtggactcgatcctgcataccagtgggtgaaaagcgcactgctggcgggtaaggccatcgtgacggcaaacaagcagctgattgctcaccatggcagcgagctgttcgcgctggcgcgggaacgcgatctgcaccttggttttggcgcctgcgttgcgggcggagtgccggtgatcgccgcactgcaagatggtctggcgggcgatcggctgcacaaggtgcgcgggatattgaatggaacgtgcaattacatcctgacgcggattgaacagagcggggcatcgttcgccgatgcgttggtcgaggctcagaaggcgggacttgccgaggctgatccgaccgatgacattgaaggttacgatgcgcgcgcgaagctggtcatcctctcgcgcgtaggcttgaacgccgacgtgcgtgcggatgaagtgcagtgtcgcgcgatctccggcgtgcagcaaattgacttcgactacgcgcaccagcttggctgcacgattcggcagatttcgcgcgccgagaagcacggcaataagctgtatgcgtccgtcgaaccggctttggtgccgcaaaccgaacctctggcgcgtgtggcaggaagccagaatttgctggtgagcaccggcgaatttggcggcgaaaccgtgtttgcgggcttcggggcgggcggcaatccgacggcggtcgcggtggtttccgatctgttgcacatcgcacgccacaagccgcgcgaatatgacgctgccgatccggcgcgtttcgcggtgagcaacgacttcgagacgccgcactatgtgcgcttcgtcattcaggacaaaccgggaatcatcgcggcgatcgcgaacgtgctttcgaagaacgggattaacattgactccgtgttgcagaagccgggttgtccgaaaacagagctgccgttcgtgatgacgctggaaacatgcagcgcggcgaagctcgacaatgcgctcgccgaaattgcgaaactcgacttccacaagcaggcgccgttctgcatgccgattttgaaatag

SEQ ID NO: 15042 - protein, 431 aa, Acidobacteria bacterium Ellin345
MASTLKVTRLPENASAKVCKVALVGFGTVGSSVARLLASRNGELPFQLTHVYNRDVARKKVDWVSSDVQWTDTFDDLIKSDAEVIVELVGGLDPAYQWVKSALLAGKAIVTANKQLIAHHGSELFALARERDLHLGFGACVAGGVPVIAALQDGLAGDRLHKVRGILNGTCNYILTRIEQSGASFADALVEAQKAGLAEADPTDDIEGYDARAKLVILSRVGLNADVRADEVQCRAISGVQQIDFDYAHQLGCTIRQISRAEKHGNKLYASVEPALVPQTEPLARVAGSQNLLVSTGEFGGETVFAGFGAGGNPTAVAVVSDLLHIARHKPREYDAADPARFAVSNDFETPHYVRFVIQDKPGIIAAIANVLSKNGINIDSVLQKPGCPKTELPFVMTLETCSAAKLDNALAEIAKLDFHKQAPFCMPILK

SEQ ID NO: 15043 - DNA, 2475 bp, Myxococcus xanthus DK 1622; identical to SEQ ID NO: 713
  CDS (1)..(2475): transl_table=11

SEQ ID NO: 15044 - protein, 824 aa, Myxococcus xanthus DK 1622; identical to SEQ ID NO: 714

SEQ ID NO: 15045 - DNA, 2460 bp, Myxococcus xanthus DK 1622; identical to SEQ ID NO: 715
  CDS (1)..(2460): transl_table=11

SEQ ID NO: 15046 - protein, 819 aa, Myxococcus xanthus DK 1622; identical to SEQ ID NO: 716

SEQ ID NO: 15047 - DNA, 1083 bp, Rubrobacter xylanophilus DSM 9941
  CDS (1)..(1083): transl_table=11
gtgaagcgggtggagctggtccagctcggcatagggcacgtggggcgggcggtggcccagatcgtgctggaggagcgcaagcgctggcgggagaggtacgggctggacatctcctaccgggcggtcgccgacacctccggggcgctcgcgggggaggacctgctgccgcaggccataaggctcaaagaggccggggggcggctctccgagctcggcgccgagccgctggaggaggtgctcgccgaaggccccgggcccaagacggcgcgggtgctcgtcgacgcggccgcgggcgaggggacctacgacctcgacgtgcgcggggtgcgcaggggctcctcgctcgtgctgtgcaacaagggacccatctccgggagcaccgagcgctacgaggggctcgtcggcgaggggccggagaggctccggtacgaggccaccgtgggggccggtgttcccgtcctctccaccatagaggcgctgcaggcctccggggacgacatcctggagatacaggccagcccgagcgggacgctggggttcatcatgagcggggtggaggaggggaggcccttctccgaggtcgtgcgcgaggcggcggagctccactacaccgagccggacccccgcgacgacctctccggcctcgacgtggcccgcaaggccctcatcctggcccgcaagatcgggcgccgcctggagcccgaggaggtgccctacgagtcgctggtcccggaggagctgcgggaggtctccgtcgaggagttcatggagcggctctcggagttcgacgagggtttcgccgcccggctctcggccgtgcggcccggccacgtgctgcgctacctggcccgcatcccgaaggaggggccggtggaggtggggctgcgcgaggtcccggccgcgggttgcttcggcgctaggagcggcgtggagaacgtgttcaacttccgtacgcggcgctactcggatgttacccttaccgtctccgggccgggggcggggccggagcgcaccgcgagcggcgtcgtctgcgacctgctggacctggcccgcagggcggcggagagcgacggaggttggtga

SEQ ID NO: 15048 - protein, 360 aa, Rubrobacter xylanophilus DSM 9941
MKRVELVQLGIGHVGRAVAQIVLEERKRWRERYGLDISYRAVADTSGALAGEDLLPQAIRLKEAGGRLSELGAEPLEEVLAEGPGPKTARVLVDAAAGEGTYDLDVRGVRRGSSLVLCNKGPISGSTERYEGLVGEGPERLRYEATVGAGVPVLSTIEALQASGDDILEIQASPSGTLGFIMSGVEEGRPFSEVVREAAELHYTEPDPRDDLSGLDVARKALILARKIGRRLEPEEVPYESLVPEELREVSVEEFMERLSEFDEGFAARLSAVRPGHVLRYLARIPKEGPVEVGLREVPAAGCFGARSGVENVFNFRTRRYSDVTLTVSGPGAGPERTASGVVCDLLDLARRAAESDGGW

SEQ ID NO: 15049 - DNA, 2454 bp, Cytophaga hutchinsonii ATCC 33406; identical to SEQ ID NO: 717
  CDS (1)..(2454): transl_table=11

SEQ ID NO: 15050 - protein, 817 aa, Cytophaga hutchinsonii ATCC 33406; identical to SEQ ID NO: 718

SEQ ID NO: 15051 - DNA, 2451 bp, Haemophilus somnus 129PT; identical to SEQ ID NO: 719
  CDS (1)..(2451): transl_table=11

SEQ ID NO: 15052 - protein, 816 aa, Haemophilus somnus 129PT; identical to SEQ ID NO: 720

SEQ ID NO: 15053 - DNA, 2394 bp, Shewanella sp. MR-4; identical to SEQ ID NO: 723
  CDS (1)..(2394): transl_table=11

SEQ ID NO: 15054 - protein, 797 aa, Shewanella sp. MR-4; identical to SEQ ID NO: 724

SEQ ID NO: 15055 - DNA, 2469 bp, Shewanella sp. MR-7
  CDS (1)..(2469): transl_table=11
atgaaagtaatgaagtttggtggtacctcgcttgcaaattggcagcgattttcaatggcggcggatatcgtggccaaagcggcgaaagtagagccagtagccactgtgctgtccgcgcccgcaactgtgacaaacgccctgctcgaaatggtggatgtagcggtgaaaggggaagattattcgccagtcattcaacacgttgagcgggtgtttacttcgctctatcaggatgcggtcagttctggactctcgagtagccagagtgaagtgttgttcgccggactgagtgcacagcttgtgcgttggcaggacagattgcgcggtattacgctgctgcaggaatgccctgatggagtgcgtgccgaaatcgtcgttgcgggtgagcgtttgtctgccgctttgatggaacaagtgatgctggcaaaaggcattacttcatcgcagcttgacccgcgagagctgtttttaggccgtggtcgtccgcttgaatccgtggtggatattgccgtcagtaaaccgcgatttaaaaatcttgccctcgatgagaagcgggtttgggtgatgcccggctttaccgccgccgatgaagacggaaaggtcgtgaccttaggccgtaacggctctgactattccgctgccgtgctggccgcttgtttagatgcttcgagttgtgagatctggaccgacgttgacggcgtatacaacaccgatcctcgggttgtcaccgatgctaagttgttgtcacagctcagttatcaagaggcgatggagctgtcttactttggcgctaaggtgctgcatcctaaaaccattgcgcctatcgcccagttccacatcccctgttatatcaagaacagctttaatcccgatgcgcctggcactctagtatcgaatcaggctgatgagagcggtttgcaggtgaaggccatttctaatctggataatcaaaccatgtttgatgtttcaggccccggcatgaagggcatggtcggcatggcgagccgcacactggcggcaatttcccgtagtggcgtttccgtgtcactcatcacccagagttcttgcgaatacagcatcagcttttgtgtggcgaccagcgagtccgccaaagtgaagtcggcgctggagcaggaatttgagttagaaatcaaaagtgacttactcgagccgattgaaatgcgccatgacttagcaatcgtctccttgattggtgatggcatgcgaacccataaaggtgtggcggcgcggttcttccaagcgttagcgcaggcgagtgtgaatatcatcgcgattgcgcaaggctcctccgagcgttctatttcaacggtaatcgaacagcgaaagactaagcatgcggttgccgcctgtcatcagggctttttcgatgtgcagcagtatttggatgtgtttttagtgggttgcggcaacgtcggtgcaggcttactcgagcaaatcaaacatcaggcgagcgtgttaaaagagcagcacattagcattcgtgtctgcggcatcgtgaattcaagcaagatgttactcgatagtgcgggtatcgatttaaacaattggcaaaacctgcttgccgacagtcagcagccaagcgatctgcctgcgctattggcttgggtgaaagagcaacagttattaaaccctgtgctggtggattgtacttcaagcgatcaagtgtcgaaccagtatttagaggtaatgaatgcgggcatgcacgtggtgacacctaataaaaaggccaatactcgagactacgcttactaccaagcactgcgtcaaacagccttgaaacaacgtcgtcagttcctgtatgagaccaacgttggcgccggattgcccgttatcgacaacttgaaaaaactgttatttgctggcgataagttgcacaagtttaacggtattttatcaggctccttatcctttatcttcggtaaactcgatgagggcatgacactgtcagaagcgactaaactggcgcgggaaaaatgctttaccgagcccgatccccgtgatgatttaagtggtatggatgtggcgcgtaaagtgctgatcttggcccgtgaagtgggtttgaaacttgagctaagcgatatcgttgtcgactcagttctgcctgacgattttgatgattcaggcgatgtggaaagttttatggcgcgtttacccgaggccgatgctgcgattgcggcgcgagtggcagaggcgaaagcgcagggtaaagtgctgcgttatgtggggcagattgaagaaggcgcgtgttatgtgcgtatcaccgaagtcgatgccaccgatccgctctacagtgtaaaaggcggtgaaaacgcgctggcattctacagccgttattatcagccgattccttttgtattacgtggatacggtgcgggtacagaagtgacagcggccggcgcctttgccgatgtattaagaaccttaaattggactcgtgaggtgagtgtatga

SEQ ID NO: 15056 - protein, 822 aa, Shewanella sp. MR-7
MKVMKFGGTSLANWQRFSMAADIVAKAAKVEPVATVLSAPATVTNALLEMVDVAVKGEDYSPVIQHVERVFTSLYQDAVSSGLSSSQSEVLFAGLSAQLVRWQDRLRGITLLQECPDGVRAEIVVAGERLSAALMEQVMLAKGITSSQLDPRELFLGRGRPLESVVDIAVSKPRFKNLALDEKRVWVMPGFTAADEDGKVVTLGRNGSDYSAAVLAACLDASSCEIWTDVDGVYNTDPRVVTDAKLLSQLSYQEAMELSYFGAKVLHPKTIAPIAQFHIPCYIKNSFNPDAPGTLVSNQADESGLQVKAISNLDNQTMFDVSGPGMKGMVGMASRTLAAISRSGVSVSLITQSSCEYSISFCVATSESAKVKSALEQEFELEIKSDLLEPIEMRHDLAIVSLIGDGMRTHKGVAARFFQALAQASVNIIAIAQGSSERSISTVIEQRKTKHAVAACHQGFFDVQQYLDVFLVGCGNVGAGLLEQIKHQASVLKEQHISIRVCGIVNSSKMLLDSAGIDLNNWQNLLADSQQPSDLPALLAWVKEQQLLNPVLVDCTSSDQVSNQYLEVMNAGMHVVTPNKKANTRDYAYYQALRQTALKQRRQFLYETNVGAGLPVIDNLKKLLFAGDKLHKFNGILSGSLSFIFGKLDEGMTLSEATKLAREKCFTEPDPRDDLSGMDVARKVLILAREVGLKLELSDIVVDSVLPDDFDDSGDVESFMARLPEADAAIAARVAEAKAQGKVLRYVGQIEEGACYVRITEVDATDPLYSVKGGENALAFYSRYYQPIPFVLRGYGAGTEVTAAGAFADVLRTLNWTREVSV

SEQ ID NO: 15057 - DNA, 1062 bp, Rhizobium leguminosarum bv. viciae 3841
  CDS (1)..(1062): transl_table=11
atgacaatttacaatatcgctctgatcggatttggcggcgtcaatcgcgccctgactgaactcatcgccgccaagaaccagctctgggaacgcgaccttggcttccgcctgaatattgtcgctgtgagcgacctctatttgggttcggtaatctcgccaaatggtcttgatgcaaaaactctggtcgacgcgaagttcgaaaagggtggcttcggacaactttcgggtggaagtgctgaagctgacaacgagaccatcatcaagacggcgccggcagacatcgtagtcgaggcaacgtacaccaatcccaaggatggcgaacccgccgtctcgcattgcaggtgggcacttgagaccggcaaacacgtggtaaccaccaacaaaggccctgtagccatcgctgccccagcgctcaaggcgttcgcaaaaaccaacggcgtgcgcttcgagtacgaaggcgccgtgatgagcggcacacctgttattcgcatggcggaaagaacccttgccggcgccgaattgaagggcttcgaggggatcctcaacggcacatccaacttcgtcctcggtcgcatggaaagcggtctggatttcgcctccgccgtcaaggaagcacagaaactcggttatgccgaagccgacccgaccgcagatgtggaaggtttcgacgttcgtctgaaggttgtcatcctggcaaacgaactgcttggcgcgaatctcaagcctgaggatataagctgcaagggcgtctccggtctttcactctccgacatcgaggaagccgccaaggcaaacagccgctggaagctcatcggggctgcggtccgcaatgacgacggcagtgtgaccggcagtgtttcccccaaacggcttggcctcgatcatccgctggcaggcgtcaacggcgccactaatgcagtctcactcgacaccgaactgctgggcgccgtgacgatcaccggacctggcgctggccgcatcgaaactgcatatgctcttctttccgatatcgtcgccattcattccgcgggcgcttcttccaccgctaaggaagctgcatga

SEQ ID NO: 15058 - protein, 353 aa, Rhizobium leguminosarum bv. viciae 3841
MTIYNIALIGFGGVNRALTELIAAKNQLWERDLGFRLNIVAVSDLYLGSVISPNGLDAKTLVDAKFEKGGFGQLSGGSAEADNETIIKTAPADIVVEATYTNPKDGEPAVSHCRWALETGKHVVTTNKGPVAIAAPALKAFAKTNGVRFEYEGAVMSGTPVIRMAERTLAGAELKGFEGILNGTSNFVLGRMESGLDFASAVKEAQKLGYAEADPTADVEGFDVRLKVVILANELLGANLKPEDISCKGVSGLSLSDIEEAAKANSRWKLIGAAVRNDDGSVTGSVSPKRLGLDHPLAGVNGATNAVSLDTELLGAVTITGPGAGRIETAYALLSDIVAIHSAGASSTAKEAA

SEQ ID NO: 15059 - DNA, 2469 bp, Shewanella sp. ANA-3; identical to SEQ ID NO: 725
  CDS (1)..(2469): transl_table=11

SEQ ID NO: 15060 - protein, 822 aa, Shewanella sp. ANA-3; identical to SEQ ID NO: 726

SEQ ID NO: 15061 - DNA, 2394 bp, Shewanella sp. ANA-3
  CDS (1)..(2394): transl_table=11
atggcacgttgtcacttacataaatttggtggttccagcttagccgatgccgattgttatcgccgagtcgcccatattctgttaacccatggtcatagtgatgatctggtggtggtgtctgccgcgggtaaaaccacgaactttttatataaattattgtccctgcgcgatagcaaccaattatggcaggaagagttgcaagtccttatcagctatcagcaaggcttgattgagcagctgttatccaatgagcaagcgcgggatctgcgtgagcgtttaactacggataaagcccagttaatcagtctattatctttagattcccgtaacgattaccaaattagccatgtagtgagctttggtgagcgttggtcggctcgcctgatggcagcgctgctgcgtgaatcgggtgtggccgcaagtcatgtggatgcctgttcgattctcgtggccgacgaggccgccgtgccgcaaattcgtgtgcaagaatcccgtaccaaagtgcaaaccttactggccgcgcatcctaacgagcgtttagtgatcaccggttttatctgcgccaacgagcgtggcgataccttgctattgggtcgcaatggctctgactttagcgccagcttaatagctagccttgccgacattgaacgcgtgaccatttggaccgacgttgaaggggtatttaacgccgatccgaataagatcaacgatgcgaaattactcaagagcatgtccctcgccgaagccgaccgcttggcgcgtttaggctcgcccgtgttgcattcacgcaccttgcagccgctatttaacacagaggtgagcctagccgtgcgttcaagctacgcctcccataccgactttaccctgatagcgccgcacagctcctcggcgagtgcgcccgtggtgaccaacctgaatgccgtggtgttatttggctttaagatcgcgggcgatgtggccagcctgctcgagcaattagtcgaggcagggttaacgccgctggcccattggttatcggcgcatcaacgactcgaacttgcctacaccgctgaaaaccaaaaacaagtacaaaagttattggatgcacaggccgaagccctcggcattaaagatctgcaaattaataccgagcttggtttagttgcgcttgtgagtgccgatgccgagcattatcgccgcagctttgcccgtttactgagccgcgacgctaagcctttgttcagtggtgacttaagtctggtgaccttagtgccacagtcgcaggttaatctgctgacgcaaaaagtgcatcgccgctgcgctggtccacgtaaacgcattggcgtattgctgctgggcgttggcaatattggtgaggcgtgggtgaagctgtttaagtcagtttctccctcgctgaatcaagaacttgaagcacgtgtcgaactcgtcggtttagtgagttccagcaaagccctgatcaagtctacggctgtggatctggaaaactggcagcaggaattcgatgccgaggcaacaccttggcaatatgagcacttattcgaacaattagaacaacttaactgtgacgaactgattgcattagatatcagtgccagcgccagtttaaccctgcaatacccagagtttttcgagcgcggcatccatatggtcagcgcgaacaagcttgcgggttcaggcccgctgccgttctaccgcgagctgaaggaacaactcggttatcgccgtctattctggcgttataacgctagctgtggcgcgggcttacctattcagcacgccttaaacgatttgcgtaacagtggcgatagcgttgaagctgtcggcgggattttctctggcaccctgtgttggttattcgagaaatacgataccagcaaacctttctcggaattagtgattgaagcgcgtggtctagggattaccgaacccgatccccgcgacgatctttctggccgcgatatgcaacgtaagctgctgattttagcccgtgaaatcggtttggaaatcgagcttgaggatattgagctgcgctccttagtgccagcccatttagcggatattccactggagcaattccttgcccgtatcggtgagttggatgatgaattgcagcaacaatacggcgcggcggcggagcaaaacaaggtactgagatatgtcgcctccttggacaatagtggcgcgacactgaaagccgaggtgggattacagtggattgatgcgaatcatccctacgccaacctcacgcccggggacaatgtgtttgtgatccgctctgctttctaccaaggtaatccgctgattatccgtgggccgggtgcgggtcgtgaggtaacagccgcggcggtgcaatcggatctgacgcagatctgtcgcgatcttctgcaagaatag

SEQ ID NO: 15062 - protein, 797 aa, Shewanella sp. ANA-3
MARCHLHKFGGSSLADADCYRRVAHILLTHGHSDDLVVVSAAGKTTNFLYKLLSLRDSNQLWQEELQVLISYQQGLIEQLLSNEQARDLRERLTTDKAQLISLLSLDSRNDYQISHVVSFGERWSARLMAALLRESGVAASHVDACSILVADEAAVPQIRVQESRTKVQTLLAAHPNERLVITGFICANERGDTLLLGRNGSDFSASLIASLADIERVTIWTDVEGVFNADPNKINDAKLLKSMSLAEADRLARLGSPVLHSRTLQPLFNTEVSLAVRSSYASHTDFTLIAPHSSSASAPVVTNLNAVVLFGFKIAGDVASLLEQLVEAGLTPLAHWLSAHQRLELAYTAENQKQVQKLLDAQAEALGIKDLQINTELGLVALVSADAEHYRRSFARLLSRDAKPLFSGDLSLVTLVPQSQVNLLTQKVHRRCAGPRKRIGVLLLGVGNIGEAWVKLFKSVSPSLNQELEARVELVGLVSSSKALIKSTAVDLENWQQEFDAEATPWQYEHLFEQLEQLNCDELIALDISASASLTLQYPEFFERGIHMVSANKLAGSGPLPFYRELKEQLGYRRLFWRYNASCGAGLPIQHALNDLRNSGDSVEAVGGIFSGTLCWLFEKYDTSKPFSELVIEARGLGITEPDPRDDLSGRDMQRKLLILAREIGLEIELEDIELRSLVPAHLADIPLEQFLARIGELDDELQQQYGAAAEQNKVLRYVASLDNSGATLKAEVGLQWIDANHPYANLTPGDNVFVIRSAFYQGNPLIIRGPGAGREVTAAAVQSDLTQICRDLLQE

SEQ ID NO: 15063 - DNA, 1326 bp, Nocardioides sp. JS614; identical to SEQ ID NO: 6450
  CDS (1)..(1326): transl_table=11

SEQ ID NO: 15064 - protein, 441 aa, Nocardioides sp. JS614; identical to SEQ ID NO: 6451

SEQ ID NO: 15065 - DNA, 1290 bp, Magnetospirillum magnetotacticum MS-1; identical to SEQ ID NO: 6460
  CDS (1)..(1290): transl_table=11

SEQ ID NO: 15066 - protein, 429 aa, Magnetospirillum magnetotacticum MS-1; identical to SEQ ID NO: 6461

SEQ ID NO: 15067 - DNA, 1317 bp, Bifidobacterium longum DJO10A
  CDS (1)..(1317): transl_table=11
ttggctcacaacagcgaaaccccgattcgcgtaggcctgcttggtgccggcaccgtcggctcccagaccgcccgcctgattgtcgagcagaaggacgaactgtccgctcgtatcggccgcccggtcgaactgaccggcgtcgcctgcctcgacccgaaggaaactgagaagttcccgtggatcgaccagtccatcgtcaccaccgatactttgagcgtggccaccaactcggacatcgtcatcgagctcatcggcggcaccaccgtggcccgcaagttcgtgcttgccgccatcgaatccggtgcttccgtggtcaccgccaacaaggcgctgctggccaagtacggcccggagatctactccgccgccgaggcccagggcgtcgacatctacttcgaggccgctgtaggtggtgcgattccgttcctgcgcccgctgcgcgagtccttggtcggcgacaaggtgaccagcatgctcggcatcgtcaacggcaccaccaactacatcctcgacgagatgaccaccaagggtctccagtttgacgacgtgctcaaggacgcccaggccaagggctacgccgaagccgacccgaccggcgacatcgaaggctacgatgctgccaacaaggccgccatcatggccaccctcggcttccacacctccgtgaccatcgacgatgtgtccgttgagggcatcaccaagatcaccgccgacgacatcgccgcagccaccgccgaacacaaggtcatcaagctgctcgccgtggtcgagaacggcgaggccggcgtctccgcccgcgtctacccggccctgatcgacgagaaccacccgctggcctccgtgcatggctccttcaacgccgtgttcgtcaaggccgaggccgccgacgacctcatgttctacggccgtggcgccggcggcgctccgaccgcctccgccgtcgtgggcgacgtggtgaccgaagcccgccacattgctgctggctgcaccggcccgtccatcccgctgtacaagaatctgccgaaggctccgattaccgcctccaaggctgcattcgccgtgcgcttcctgattcacgacaagccgggcgtgctggccgccatcgccgctgagttcgccaagaacggtgtctccatcaacggtgtgaaccaggacctgaagcccaccatgaccgatcccggctacgacggcgagattcagcagttgcgcgtcgtgacccacctgaccgacgaggaaaccctgcgcaacaccgtcaaggccgtgcaggcgctcgacttcgtcaccggcgacccgtccatcctgcgcgtgctggactga

SEQ ID NO: 15068 - protein, 438 aa, Bifidobacterium longum DJO10A
MAHNSETPIRVGLLGAGTVGSQTARLIVEQKDELSARIGRPVELTGVACLDPKETEKFPWIDQSIVTTDTLSVATNSDIVIELIGGTTVARKFVLAAIESGASVVTANKALLAKYGPEIYSAAEAQGVDIYFEAAVGGAIPFLRPLRESLVGDKVTSMLGIVNGTTNYILDEMTTKGLQFDDVLKDAQAKGYAEADPTGDIEGYDAANKAAIMATLGFHTSVTIDDVSVEGITKITADDIAAATAEHKVIKLLAVVENGEAGVSARVYPALIDENHPLASVHGSFNAVFVKAEAADDLMFYGRGAGGAPTASAVVGDVVTEARHIAAGCTGPSIPLYKNLPKAPITASKAAFAVRFLIHDKPGVLAAIAAEFAKNGVSINGVNQDLKPTMTDPGYDGEIQQLRVVTHLTDEETLRNTVKAVQALDFVTGDPSILRVLD

SEQ ID NO: 15069 - DNA, 2451 bp, Haemophilus somnus 2336; identical to SEQ ID NO: 727
  CDS (1)..(2451): transl_table=11

SEQ ID NO: 15070 - protein, 816 aa, Haemophilus somnus 2336; identical to SEQ ID NO: 728

SEQ ID NO: 15071 - DNA, 2448 bp, Haemophilus influenzae R2846
  CDS (1)..(2448): transl_table=11
atgcgcgtacttaaatttggcggcacttcgcttgcaaatccggaacgtttttcccaagcggcgaaattgatcgagcaagctcatttagaagagcaggctgcaggtgttttatcagcaccagccaaaataaccaaccatctcgtcgccctttctgaaaaagctgcattaaatcaatcaaccgatacgcatttcaacgaagcaatcgaaattttctataacatcattaatggcttacatgccgaaaataatcaattcgacttaaatggcaccaaggcacttattgatgctgaatttgctcaaatcaaaggattattagaagaaattcgtcaggcaggaaaagtagaagatgcagttaaagcgaccattgattgccgtggggaaaaactttctattgcaatgatgaaagcttggtttgaagcacgtggctatagcgtacatattgtggatccggtcaagcaattattagcaaaaggcggttatcttgagtcttcagttgaaattgaagaatcaacaaaacgtgttgatgcagcaagtattgcaaaagataaagtggtgctgatggcaggttttactgcgggtaatgaaaaaggcgagttggtattgctcggtcgtaatggctcagactattctgcagcctgtttagccgcttgtttaggcgcaagtgtatgcgaaatttggaccgatgtggacggcgtttatacttgcgatccgcgtttagtgcctgatgcacgtttattaccaacgctttcttatcgtgaagcgatggaactctcttatttcggtgcgaaagtgattcatcctcgtacgattgggccattgttgccacaaaatattccttgtgtcattaaaaatacaggaaatccttctgcgccaggttcgattattgatggcaatgtgaaatcagaaagtttgcaagttaaaggtatcactaacttagacaatttggcgatgtttaatgtgtcaggccctggtatgcaaggtatggtaggcatggcatctcgcgtattttcagccatgtcaggtgcaggcatttcagttattttaattactcagtcttcgtctgaatatagtattagtttctgtgtgcctgtgaaatctgcagaagtagcgaaaaccgtactagaaacggagtttgctaatgaattaaatgaacatcaattagaatcaattgaagtgattaaagatttatccattatttctgttgtgggcgatggaatgaagcaagcgaaaggcattgctgctcgtttcttctcggcattagcgcaggcaaacattagcattgtggcgattgcacaaggatctagcgaacgttcaatttctgcggttgtgccgcaaaataaagccattgaagcggtgaaggctacccatcaggcgcttttcaataataaaaaagtcgtggatatgtttttagtgggcgttggcggagtaggcggagaattaattgagcaggtaaagcgtcaaaaggagtatctagcaaagaagaatgttgaaattcgagtttgtgctattgcgaattccaaccgtatgttgcttgatgaaaatggattaaatttagaggattggaaaaacgatttagaaaatgcgactcagccatcagattttgatgtattgctttctttcattaaattacatcatgtggtgaatccagtatttgtagattgtacttcagccgaatctgtagcagggctttatgctcgtgcgttaaaagaaggtttccatgtggttacgccaaacaaaaaagcgaatacacgagaattagtttattacaatgagttacgccaaaatgcccaagcaagccagcataaatttttatatgaaaccaatgtaggtgcgggcttgccagttattgaaaatctccaaaacttacttgcagcaggtgatgagcttgaatattttgaagggattttatctggctcgctttcctttatttttggtaagttggaagaaggactttctctttcagaagtaaccgcacttgcgcgtgaaaaaggctttactgagccagatcctcgagatgatctttctggacaagatgtagcacgcaaattattaattcttgctcgtgaagcgggaattgaacttgaactttcagatgttgaagttgaaggtgtattgccgaaaggcttctccgatggaaaatctgcagatgagtttatggcaatgttgccacagcttgacgaggagtttaaaactcgcgttgccacagctaaagcagaaggcaaagtattgcgttatgttggaaaaattagtgaaggaaaatgcaaagtatccatcgttgcggtagatctgaataatccactttataaagtgaaagatggtgaaaatgccttggcattttatactcgttattatcaaccgattccacttttattacgtggttatggcgcaggtaatgcagttactgcggcaggtatctttgcagatattttaagaacattacaacattaa

SEQ ID NO: 15072 - protein, 815 aa, Haemophilus influenzae R2846
MRVLKFGGTSLANPERFSQAAKLIEQAHLEEQAAGVLSAPAKITNHLVALSEKAALNQSTDTHFNEAIEIFYNIINGLHAENNQFDLNGTKALIDAEFAQIKGLLEEIRQAGKVEDAVKATIDCRGEKLSIAMMKAWFEARGYSVHIVDPVKQLLAKGGYLESSVEIEESTKRVDAASIAKDKVVLMAGFTAGNEKGELVLLGRNGSDYSAACLAACLGASVCEIWTDVDGVYTCDPRLVPDARLLPTLSYREAMELSYFGAKVIHPRTIGPLLPQNIPCVIKNTGNPSAPGSIIDGNVKSESLQVKGITNLDNLAMFNVSGPGMQGMVGMASRVFSAMSGAGISVILITQSSSEYSISFCVPVKSAEVAKTVLETEFANELNEHQLESIEVIKDLSIISVVGDGMKQAKGIAARFFSALAQANISIVAIAQGSSERSISAVVPQNKAIEAVKATHQALFNNKKVVDMFLVGVGGVGGELIEQVKRQKEYLAKKNVEIRVCAIANSNRMLLDENGLNLEDWKNDLENATQPSDFDVLLSFIKLHHVVNPVFVDCTSAESVAGLYARALKEGFHVVTPNKKANTRELVYYNELRQNAQASQHKFLYETNVGAGLPVIENLQNLLAAGDELEYFEGILSGSLSFIFGKLEEGLSLSEVTALAREKGFTEPDPRDDLSGQDVARKLLILAREAGIELELSDVEVEGVLPKGFSDGKSADEFMAMLPQLDEEFKTRVATAKAEGKVLRYVGKISEGKCKVSIVAVDLNNPLYKVKDGENALAFYTRYYQPIPLLLRGYGAGNAVTAAGIFADILRTLQH

SEQ ID NO: 15073 - DNA, 2460 bp, Prosthecochloris aestuarii DSM 271; identical to SEQ ID NO: 731
  CDS (1)..(2460): transl_table=11

SEQ ID NO: 15074 - protein, 819 aa, Prosthecochloris aestuarii DSM 271; identical to SEQ ID NO: 732

SEQ ID NO: 15075 - DNA, 2508 bp, Xylella fastidiosa Dixon; identical to SEQ ID NO: 735
  CDS (1)..(2508): transl_table=11

SEQ ID NO: 15076 - protein, 835 aa, Xylella fastidiosa Dixon; identical to SEQ ID NO: 736

SEQ ID NO: 15077 - DNA, 2508 bp, Xylella fastidiosa Ann-1; identical to SEQ ID NO: 733
  CDS (1)..(2508): transl_table=11

SEQ ID NO: 15078 - protein, 835 aa, Xylella fastidiosa Ann-1; identical to SEQ ID NO: 734

SEQ ID NO: 15079 - DNA, 1098 bp, Croceibacter atlanticus HTCC2559
  CDS (1)..(1098): transl_table=11
atgaacacaaccataaacatcatattgtttggaataggtaatgttggtagcactttaattaagcaagttctagctacaaacgctacgatatctttaaagcaaggattaaatttagagattccaattatagcaaactctaccacagctttttttaaaacaaatggcattaaaaacaattggcaaaccgattttgagatttttggttttccttataaaataaatgatattatacgctatatccaaaaagaggagcttggtaatattataattgtagatgctacagcaagcagaaaatttgtaaaacattacaaagcattttttcaacaaggctaccatattgtaacagcaaataaaattgctaatacattatcattagactattacaattctcttaggacaacaatcttaaataattggacacattttaactatgaaactaatgttggtgcaggtttgccaataatcgaaaccttaagaaggctttcagacagtggcgagcaaatccataaaataagaggtgtgttttctggatcgttaagttatatattcaatacattttcagagaagcaactgttgttttctgaggtgctgcaaagcgcacagcaaaaaggttttacagaaccagacattagggaagatctttctggaaaagatgtagccagaaaattactaatcttagctagggaaataggactacaaaaggaactttcagacatagctgttgagtctctgataccttcttcattagaagaaattcactatttgaatgacttcaatttaaagctgaatgaattagatcgttactattcagatttaaaagtaaaaaaatcagcaaaccatgtctttagatatattggagagttagatgttttaaatggcaccttgcaaaccaaacttgtattagagccaaaaacaagtgcaattgggcaactaagaggagcagatgcagccatcgaaattttttctgaatcttataaagaacaaccattagttatacaaggtgctggcgctggaagtgcggttacagctagaggtatcttaacagatatattaaaaatagctaagcagcttaacacttttaaattggttgaagcttag

SEQ ID NO: 15080 - protein, 365 aa, Croceibacter atlanticus HTCC2559
MNTTINIILFGIGNVGSTLIKQVLATNATISLKQGLNLEIPIIANSTTAFFKTNGIKNNWQTDFEIFGFPYKINDIIRYIQKEELGNIIIVDATASRKFVKHYKAFFQQGYHIVTANKIANTLSLDYYNSLRTTILNNWTHFNYETNVGAGLPIIETLRRLSDSGEQIHKIRGVFSGSLSYIFNTFSEKQLLFSEVLQSAQQKGFTEPDIREDLSGKDVARKLLILAREIGLQKELSDIAVESLIPSSLEEIHYLNDFNLKLNELDRYYSDLKVKKSANHVFRYIGELDVLNGTLQTKLVLEPKTSAIGQLRGADAAIEIFSESYKEQPLVIQGAGAGSAVTARGILTDILKIAKQLNTFKLVEA

SEQ ID NO: 15081 - DNA, 2445 bp, Croceibacter atlanticus HTCC2559; identical to SEQ ID NO: 737
  CDS (1)..(2445): transl_table=11

SEQ ID NO: 15082 - protein, 814 aa, Croceibacter atlanticus HTCC2559; identical to SEQ ID NO: 738

SEQ ID NO: 15083 - DNA, 2418 bp, Pseudoalteromonas tunicata D2; identical to SEQ ID NO: 739
  CDS (1)..(2418): transl_table=11

SEQ ID NO: 15084 - protein, 805 aa, Pseudoalteromonas tunicata D2; identical to SEQ ID NO: 740

SEQ ID NO: 15085 - DNA, 2346 bp, Pseudoalteromonas tunicata D2; identical to SEQ ID NO: 741
  CDS (1)..(2346): transl_table=11

SEQ ID NO: 15086 - protein, 781 aa, Pseudoalteromonas tunicata D2; identical to SEQ ID NO: 742

SEQ ID NO: 15087 - DNA, 2460 bp, Photobacterium sp. SKA34; identical to SEQ ID NO: 743
  CDS (1)..(2460): transl_table=11

SEQ ID NO: 15088 - protein, 819 aa, Photobacterium sp. SKA34; identical to SEQ ID NO: 744

SEQ ID NO: 15089 - DNA, 2415 bp, Photobacterium sp. SKA34; identical to SEQ ID NO: 745
  CDS (1)..(2415): transl_table=11

SEQ ID NO: 15090 - protein, 804 aa, Photobacterium sp. SKA34; identical to SEQ ID NO: 746

SEQ ID NO: 15091 - DNA, 1083 bp, Flavobacteria bacterium BBFL7
  CDS (1)..(1083): transl_table=11
atgaataacatacatatatatttatttggtttaggaaatgtaggaagtacattgattaaacagatattagaaagtcaacgatttttcaaagtcagtcaagggttagatttaaaaatagttggattggcaaatagccggaaagtattgactgtaaccgatggaattgatgaggattgggaacaggtttttgttgaacaatctgttactagacgacctgatgctttttatgagtttgcaacgattgatgatgaggtacgtattgcggtagacgcaacagctagcaaagagctctcacacttctatccagagcttatagaacaaggttttcatgtagtaactgcaaataaaattgctaatacattatcacaagaattttatgatgacttaagaagattattaaagcaaaaagaactgtcttttgaatatgagaccaatgtaggtgccggattacctatactagatacaattcgtaatttgcataaaagtggagaagaaatttttgctgtaaatggtgtcttctctggatcgctaggttatatttttaataggttttctatagaaaatcaaccttttagtcagattgtaaaagacgctttaaagaatggttttacagagcccgatcctagagaagatctgagcggtaatgatgtggctagaaagttattagtactggctagagaagcaggtctaaaaatagaattttcagatattagtatagagaatttagtgatacctgatttacaaactgcatcagcaaatcattttttagaacggattggagaattggatgccgcgttacagaaatgtaaaaatgcgcttcaggaagatgaagttttaagacacttagggaaattagatgtggtcaataggagcttaaaagtgactttacaagccgtgaaaaaagatagtcctgctggacagctacaaggaagcgatggtttttttgagatatactcagaatcttatgctaccaatccattaattataaaaggtgctggtgcaggtagagaagtgacagctcgcggacttttagctgacattattaaaattgcaaaatcttgtcccatcgttatttacagataa

SEQ ID NO: 15092 - protein, 360 aa, Flavobacteria bacterium BBFL7
MNNIHIYLFGLGNVGSTLIKQILESQRFFKVSQGLDLKIVGLANSRKVLTVTDGIDEDWEQVFVEQSVTRRPDAFYEFATIDDEVRIAVDATASKELSHFYPELIEQGFHVVTANKIANTLSQEFYDDLRRLLKQKELSFEYETNVGAGLPILDTIRNLHKSGEEIFAVNGVFSGSLGYIFNRFSIENQPFSQIVKDALKNGFTEPDPREDLSGNDVARKLLVLAREAGLKIEFSDISIENLVIPDLQTASANHFLERIGELDAALQKCKNALQEDEVLRHLGKLDVVNRSLKVTLQAVKKDSPAGQLQGSDGFFEIYSESYATNPLIIKGAGAGREVTARGLLADIIKIAKSCPIVIYR

SEQ ID NO: 15093 - DNA, 1281 bp, Oceanobacter sp. RED65; identical to SEQ ID NO: 6476
  CDS (1)..(1281): transl_table=11

SEQ ID NO: 15094 - protein, 426 aa, Oceanobacter sp. RED65; identical to SEQ ID NO: 6477

SEQ ID NO: 15095 - DNA, 2460 bp, Vibrio sp. Ex25; identical to SEQ ID NO: 747
  CDS (1)..(2460): transl_table=11

SEQ ID NO: 15096 - protein, 819 aa, Vibrio sp. Ex25; identical to SEQ ID NO: 748

SEQ ID NO: 15097 - DNA, 2346 bp, Alteromonadales bacterium TW-7; identical to SEQ ID NO: 751
  CDS (1)..(2346): transl_table=11

SEQ ID NO: 15098 - protein, 781 aa, Alteromonadales bacterium TW-7; identical to SEQ ID NO: 752

SEQ ID NO: 15099 - DNA, 2418 bp, Alteromonadales bacterium TW-7; identical to SEQ ID NO: 753
  CDS (1)..(2418): transl_table=11

SEQ ID NO: 15100 - protein, 805 aa, Alteromonadales bacterium TW-7; identical to SEQ ID NO: 754

SEQ ID NO: 15101 - DNA, 1317 bp, Candidatus Desulfococcus oleovorans Hxd3; identical to SEQ ID NO: 6482
  CDS (1)..(1317): transl_table=11

SEQ ID NO: 15102 - protein, 438 aa, Candidatus Desulfococcus oleovorans Hxd3; identical to SEQ ID NO: 6483

SEQ ID NO: 15103 - DNA, 2433 bp, Escherichia coli B; identical to SEQ ID NO: 755
  CDS (1)..(2433): transl_table=11

SEQ ID NO: 15104 - protein, 810 aa, Escherichia coli B; identical to SEQ ID NO: 756

SEQ ID NO: 15105 - DNA, 2463 bp, Escherichia coli B; identical to SEQ ID NO: 757
  CDS (1)..(2463): transl_table=11

SEQ ID NO: 15106 - protein, 820 aa, Escherichia coli B; identical to SEQ ID NO: 758

SEQ ID NO: 15107 - DNA, 1080 bp, Saccharomyces cerevisiae
  CDS (1)..(1080)
atgagcactaaagttgttaatgttgccgttatcggtgccggtgttgttggttcagctttcttggatcaattgttagccatgaagtctaccattacttacaatctagttcttttggctgaagctgagcgttctttaatctccaaggacttttctccattaagtgttggttctgattggaaggctgctttagcagcctccactactaaaacgttgcctttggatgatttaattgctcatttgaagacttcacctaagccagtcattttggttgataacacttccagcgcttacattgctggtttttacactaagtttgtcgaaaatggtatttccattgctactccaaacaagaaggccttttcctctgatttggctacctggaaggctcttttctcaaataagccaactaacggttttgtctatcatgaagctaccgtcggtgctggtttgcctatcatcagtttcttaagagaaattattcaaaccggtgacgaagttgaaaaaattgaaggtatcttctctggtactctatcttatattttcaacgagttctccactagtcaagctaacgacgtcaaattctctgatgttgtcaaagttgctaaaaaattgggttatactgaaccagatccaagagatgatttgaatgggttggatgttgctagaaaggttaccattgttggtaggatatctggtgtggaagttgaatctccaacttccttccctgtccagtctttgattccaaaaccattggaatctgtcaagtctgctgatgaattcttggaaaaattatctgattacgataaagatttgactcaattgaagaaggaagctgccactgaaaataaggtattgagattcattggtaaagtcgatgttgccaccaaatctgtgtctgtaggaattgaaaagtacgattactcacacccattcgcatcattgaagggatcagataacgttatttccatcaagactaagcgttacaccaatcctgttgtcattcaaggtgccggtgccggtgctgccgttactgccgctggtgttttgggtgatgttatcaagattgctcaaagactttag

SEQ ID NO: 15108 - protein, 359 aa, Saccharomyces cerevisiae
MSTKVVNVAVIGAGVVGSAFLDQLLAMKSTITYNLVLLAEAERSLISKDFSPLSVGSDWKAALAASTTKTLPLDDLIAHLKTSPKPVILVDNTSSAYIAGFYTKFVENGISIATPNKKAFSSDLATWKALFSNKPTNGFVYHEATVGAGLPIISFLREIIQTGDEVEKIEGIFSGTLSYIFNEFSTSQANDVKFSDVVKVAKKLGYTEPDPRDDLNGLDVARKVTIVGRISGVEVESPTSFPVQSLIPKPLESVKSADEFLEKLSDYDKDLTQLKKEAATENKVLRFIGKVDVATKSVSVGIEKYDYSHPFASLKGSDNVISIKTKRYTNPVVIQGAGAGAAVTAAGVLGDVIKIAQRL

SEQ ID NO: 15109 - DNA, 3166 bp, Glycine max
  CDS (29)..(2779)
ttttactctgcagcagcagccaccacccatggcgtcgttttccgccgccgtcgctcagttctcccgcgtttcaccttctcacacttcgctccactctcactctcacggcacgctcttccaatctcaatgccgccctttcttcctctcgcgcacttcccattcactccggaagggtcttactttaccacggggaagagaggcaccgagtacatctgtacgtgcttcatttacagatgtttcaccgaatgtgtccttggaggaaaaacaactacccaaaggagaaacttggtctgttcacaaatttggtggaacctgtgtgggaacctctcagagaataaaaaatgttgcggacataattcttaaggatgattcggagaggaaattggtggttgtttctgcaatgtcaaaggtgacagatatgatgtatgaccttatccacaaggctcaatcacgcgatgagtcttatacagctgcattaaatgctgttttggagaagcacagtgcaactgcacatgacatacttgatggagataatcttgctactttcttgtctaaattgcatcatgatattagtaaccttaaggcgatgcttcgtgcaatatacatagctggtcatgcaacagagtcctttacagattttgttgtgggacatggagaattatggtctgctcagatgttgtctctagttattaggaagaatgggactgattgcaaatggatggatacaagggatgtccttatcgtaaatcctactggttctaatcaagttgatcctgactatttggaatctgagcaaagacttgaaaaatggtactctttgaatccatgtaaggtaatcattgccactggattcattgcaagcacacctcaaaacattcctaccacactgaagagagatggaagtgacttctcggcagcaattatgggtgctctatttaaggcccgtcaggtcacaatttggacagatgttgatggtgtgtatagtgcagatcctagaaaagttagtgaggctgtgattttgaagacactgtcttatcaagaggcttgggaaatgtcttattttggtgccaatgtcttgcatccccgcacaattattcctgtgatgcgatatggcatacccattatgataaggaacattttcaacctttctgctcctggaacaaagatctgccatccttctgttaatgatcatgaagatagccagaacctgcaaaattttgtcaaaggatttgcaaccatagacaacttggcacttgtaaacgtcgagggaactggaatggctggtgttccaggtactgccagtgctatttttggtgcagtaaaagatgttggagctaatgttatcatgatatctcaggctagtagtgagcattctgtatgctttgctgtgcccgagaaagaagtaaaagctgttgctgaggcattgcaatctagatttcgtcaagctttggataatgggcgtctttctcaggttgcagtcattccaaattgtagcattctggctgcagttggccagaaaatggcaagcactcctggtgttagtgcctcccttttcaatgcattggctaaggccaatataaatgtccgtgctatagcccaaggttgttctgagtacaatattactgttgttgttaagcgagaggattgtataaaggctttacgagctgtccattccagattttatctctcaagaaccaccatagcaatgggcattattggacctggattaattgggagcacactacttgagcagctaagggatcaggcctcaaccctaaaagaagaattcaacatcgatttgcgtgtaatgggcatacttggttcaaagtcaatgcttcttagtgatgtgggcattgacttagctagatggagagaacttcgagaggaaagaggagaagtggctaatatggaaaaatttgttcaacatgtacatggaaatcattttataccaaacacggcattagtggactgcacagctgactctgtcattgctggctattactatgattggttgcgcaaaggaatacatgtagttactcctaacaagaaggcaaattcaggaccacttgatcagtatttgaagttaagagctcttcaaaggcaatcctatacacattacttctatgaagcaactgtcggagctggtcttccaattgttagcactttacgtggcctccttgaaactggagacaaaatattacaaatcgaaggcatctttagtgggactttgagttacatatttaataactttaaagatggccgggcttttagtgaggtagtttctgaagcaaaggaagcaggttatactgagccagatccaagagatgatctgtctggaacagatgttgccagaaaggttataattcttgctagggagtcgggtttaaagctagaactgtctaatattccagttgaaagccctgtgccagaaccactacgagcttgtgcatcagctcaggagtttatgcaagagctaccaaaatttgatcaggagttcacaaagaaacaagaagatgctgagaatgctggggaagtcttgagatacgttggagtggtggacgtgactaataaaaaaggagtggtagagctgcgaagatacaagaaggatcatccctttgcgcaattgtctgggtcagataacattattgcatttacaacacgaaggtataaggatcagcctctgatagttcgtgggccaggagctggtgctcaagtcaccgctggtggaatatttagtgatattttacgacttgcctcatatcttggtgctccatcgtaagtgtcattctgcaagcataattttctgcatgtatggttttgcatcctctgctccacgacacgcattatctgaagcgacgaagaattgcttttatgtccaaaacgtgaattttgatcgaaatgaatgatgtcgatggatatccgaacacatgcaaatttgtaccatctatttatttatcttgattttcttcgtaggttatttgcttcttataacgttgtagtaatgtaagcttgtttctcttatcttttgtctggaagaataataagggaatggaacagaactccattaaccttgattgtgagttacattgtaaaggaacggaagtaaacagaatttattataatttttaacttcgctaactgtctttttaataaaaaaaaaaaaaaa

SEQ ID NO: 15110 - protein, 916 aa, Glycine max; identical to SEQ ID NO: 770

SEQ ID NO: 15111 - DNA, 1131 bp, Medicago truncatula
  CDS (1)..(1131)
atgaagactattcctttgattctaatgggttgtggaggagttggttctcaccttctccaacacattgtctcatcccgttctctccactcttcacagggactttgcttgagagttgtgggaattggtgatagtaaatctctggtggtcgttgatgatttgttgaataaggggttcgatgatagttttttgttagaactttgtcggctcaagcatggtggcgagtctttatcaaaacttggtgatcttggacaatgtcaagtatttgtgcatccggaatcggaaggaaagattttggagattgcatctcaacttggtaaaaagacaggtttggcctttgtcgattgcactgctagctctgacacaatagtggtactaaaacaagtggtggatttgggttgttgtgttgttatggcaaacaaaaagcctcttacatctacaatgggggattttgaaaaacttctgacatatccacgtcgtatccgacatgagtcaactgtaggtgctggtcttcctgtgatatcatccctgaatcgcataatctcgtctggcgatccagttaatcgcattattggaagtttgagtgggacattggggtacgtgatgagtgaggttgaagacggaaagccattgagccaagttgttagagctgctaaaagtctggggtacactgaaccagatccgcgtgacgaccttggtggaatggatgttgctagaaaggctttgattctggctcgaatacttggtcgtcggattaacatggatagcattcagattgaaagcttgtatcccaaagaaatggggcctgatgtaatgactgatgatgactttttgagttgtggactcttgttgctagacaaagatattcaagagagagttgagaaggcagcttcaaacggaaatgttctgcgatatgtctgtgtcattgagggcccaaggtgtgaagttggtattcaggagctcccgaagaattctgctttaggaagattaagaggaagtgataatgtgttggaagtatacactcggtgctatagtaaccaaccgctggttattcaaggtgctggagctggaaatgacacgactgcagctggtgtccttgctgatatcgtggatattcaggatttatttccttga

SEQ ID NO: 15112 - protein, 376 aa, Medicago truncatula
MKTIPLILMGCGGVGSHLLQHIVSSRSLHSSQGLCLRVVGIGDSKSLVVVDDLLNKGFDDSFLLELCRLKHGGESLSKLGDLGQCQVFVHPESEGKILEIASQLGKKTGLAFVDCTASSDTIVVLKQVVDLGCCVVMANKKPLTSTMGDFEKLLTYPRRIRHESTVGAGLPVISSLNRIISSGDPVNRIIGSLSGTLGYVMSEVEDGKPLSQVVRAAKSLGYTEPDPRDDLGGMDVARKALILARILGRRINMDSIQIESLYPKEMGPDVMTDDDFLSCGLLLLDKDIQERVEKAASNGNVLRYVCVIEGPRCEVGIQELPKNSALGRLRGSDNVLEVYTRCYSNQPLVIQGAGAGNDTTAAGVLADIVDIQDLFP

SEQ ID NO: 15113 - DNA, 2754 bp, Medicago truncatula
  CDS (1)..(2754)
atggcgtcgtcgctttcttcatccctctctcacttctctcgcatttcagtcacttctctccaacacgactataacaacaagatccccgccgattctcaatgtcgccacttcctcctctcccgccgtttccactctctccgtaagggtattactttacctcgacgacgagagtcaccgagctctgggatatgtgcttcacttacagatgtttcggtgaatgtggcagtggaggaaaaagagctttcgaaaggagactcttggtctgttcacaaatttggtggaacttgtatgggaagctcacaaagaataaagaatgttggagacatagttttgaatgatgattccgagaggaaattggtggttgtttctgcaatgtctaaggtgacggatatgatgtatgatcttatcaataaggctcaatcgcgtgatgagtcttatatatcttccttggatgctgttttggagaagcatagtgcaactgcacatgacatacttgatggagaaactcttgctattttcttgtctaagttgcatgaagacatcagcaaccttaaggcgatgcttcgggctatatacataggtcctggtcatgtgacagaatcctttacagattttgttgtaggacatggggaattatggtctgcccagatgttgtctctagttattaggaagaatggaatagattgcaaatggatggatacaagggaagtcttgattgtaaatcctactagttctaatcaagttgatcccgactatttggaatctgagcgaagacttgagaaatggtactctctgaatccatgtaaggtaatcattgctactgggttcattgcaagcacacctgaaaatattcctactacattgaagcgagatggaagtgatttctcggcagcaattatgggttcgctatttagagctcgtcaggtcacaatttggacagatgttgatggtgtgtatagtgcagatcctagaaaagttagtgaggctgtgattttgaagacattgtcttatcaagaggcttgggaaatgtcttattttggagctaatgttttgcatcctcgcacaataattcctgtgatgagatatggcatacccattttgataaggaatattttcaacctttctgctcctgggacaaagatatgtcatcctgttgttagtgattatgaagataagtcgaacctgcaaaattatgtcaaaggattcgcaacaatagacaacttagcacttgtaaatgttgagggaactggaatggctggtgttccaggtacagctagtgctatttttgctgcagtaaaagatgttggagctaatgttattatgatatctcaggctagtagtgagcattctgtatgctttgctgtgcccgagaaggaagtaaaagctgtagctgaggcattgcaatcaaggtttcgtcaagctttggataatgggcgtctttctcaggttgctgttatcccaaattgtagcattttggctgctgttggccagaaaatggcaagcactcctggagttagtgccacccttttcaacgcattggctaaggccaatataaatgtccgtgccatagcacaaggttgttctgagtataatattactgttgttattaagcgagaggatagtataaaagctttacgggctgtccattccagattttatctctcaagaaccaccatagcaatgggaattattggaccaggattaattgggagcacgctacttgatcaactaagggatcaggcttcaattctgaaagaagaatttaacattgatctgcgtgtaatgggcataattggctcaaagtcaatgcttctcagtgatgtgggtattgacttagcaaagtggaaagaacttcgggaggaaagaggagaagtggctaatttggaaaaatttgctcagcacgtgcatggaaataattttataccaaacacggcattagtagactgcacggctgattctatcattgctggccattactatgagtggttgtgcaaaggaatacatgtaattacccccaataagaaggcaaattcgggaccacttgagcagtatttgaggttaagagctctccagaggcaatcctatactcactacttctatgaagctactgttggagctggtcttcctatagtcagcactttgcgtggcctccttgaaactggagacaaaattttgcaaattgaaggcatattcagtgggacattgagttacatctttaataacttcaaagatggccgggcttttagtgaggtagttggtgaagcaaaggaagcaggttatactgagcctgatccaagagatgatctgtctggaacagatgttgctagaaaggtgataatcctcgcaagggaatctggtttaaagctagagctgtctaatattccaattgaaagtctagtgccagaaccactacgggcgtgtgcatcagctcaggagtttatgcaacagctaccaaaatttgaccaggagtttgcaaagaaacaagaagatgctgacaatgctggggaagtattgagatacgtgggagtggtggatgtgacaaataaaaaaggagttgtagagctgcgaaaatacaagaaggatcatccatttgcacaattgtctgggtcagataatataattgcattcacaacaagaaggtataagaatcaacctctgatagttcgcgggccaggagctggtgctcaagtcacagcgggtggaatatttagtgatattttacgacttgcctcatatctaggcgctccatcatag

SEQ ID NO: 15114 - protein, 917 aa, Medicago truncatula
MASSLSSSLSHFSRISVTSLQHDYNNKIPADSQCRHFLLSRRFHSLRKGITLPRRRESPSSGICASLTDVSVNVAVEEKELSKGDSWSVHKFGGTCMGSSQRIKNVGDIVLNDDSERKLVVVSAMSKVTDMMYDLINKAQSRDESYISSLDAVLEKHSATAHDILDGETLAIFLSKLHEDISNLKAMLRAIYIGPGHVTESFTDFVVGHGELWSAQMLSLVIRKNGIDCKWMDTREVLIVNPTSSNQVDPDYLESERRLEKWYSLNPCKVIIATGFIASTPENIPTTLKRDGSDFSAAIMGSLFRARQVTIWTDVDGVYSADPRKVSEAVILKTLSYQEAWEMSYFGANVLHPRTIIPVMRYGIPILIRNIFNLSAPGTKICHPVVSDYEDKSNLQNYVKGFATIDNLALVNVEGTGMAGVPGTASAIFAAVKDVGANVIMISQASSEHSVCFAVPEKEVKAVAEALQSRFRQALDNGRLSQVAVIPNCSILAAVGQKMASTPGVSATLFNALAKANINVRAIAQGCSEYNITVVIKREDSIKALRAVHSRFYLSRTTIAMGIIGPGLIGSTLLDQLRDQASILKEEFNIDLRVMGIIGSKSMLLSDVGIDLAKWKELREERGEVANLEKFAQHVHGNNFIPNTALVDCTADSIIAGHYYEWLCKGIHVITPNKKANSGPLEQYLRLRALQRQSYTHYFYEATVGAGLPIVSTLRGLLETGDKILQIEGIFSGTLSYIFNNFKDGRAFSEVVGEAKEAGYTEPDPRDDLSGTDVARKVIILARESGLKLELSNIPIESLVPEPLRACASAQEFMQQLPKFDQEFAKKQEDADNAGEVLRYVGVVDVTNKKGVVELRKYKKDHPFAQLSGSDNIIAFTTRRYKNQPLIVRGPGAGAQVTAGGIFSDILRLASYLGAPS

SEQ ID NO: 15115 - DNA, 1131 bp, Glycine max
  CDS (1)..(1131)
atgaagaatattcctctgattctaatgggttgtggaggagttggtcgtcaacttctccaacacattgtctcgtgtcgttctcttcactttacacaggggctgtgcttgagagttgtaggagtcggtgatagtaaatctttggtggttacggaggatttgctgcatgaggggttgaatgatggcttcttgttagaactttgccgggtcaagagtgtcggcgaatctctattaaaacttcttgattttgggaaatgccaggcatttgtgcatccggagtcacaaggaaagattctagagattgcatttcaacttggtaaaaagacaggtttggtatttgtagattgctctgctagctctgacactgttgcggtgctaaagcaagcgattgatatgggttgttgtgctgttatggcaaataagaagcctcttacatctacaatggaggattttaaaaaacttttcatctatccacgtcgtattcggcatgagtcaactgtaggcgctggtcttcctgtgatagcatcactgaatcgcataatctcttctggtgatcccgttcatcaaattattgggagtttgagcgggacattgggttatgtaatgagtgaggttgaagatggaaagccattgagccaagttgttagagatgctaaaagtttggggtatactgaaccagatccacgtgatgaccttggtggaatggacgtcgctagaaaggctttaatacttgctcgaatacttggccatcaaattaatctggatagcattcagattgagagcttgtatcccaaagaaatggggcctggcgtaatgactgttgaagacttcttgaaccgtggactcttgttgcttgataaagatattcaagatagagttgagaaggcagcttcaaatggaaatgtgttgcgctatgtctgtgtgatcatgggttcaaggtgtgaagttggtattcaggagcttccaaagaattctcccttgggaagactaagaggaagtgataatgtgttggaaatatatactcgatgctatagtaaacaaccactggttattcaaggtgctggagctggaaatgacactactgctgctggggttcttgctgatatcgtagatattcaagacttatttccttga

SEQ ID NO: 15116 - protein, 376 aa, Glycine max
MKNIPLILMGCGGVGRQLLQHIVSCRSLHFTQGLCLRVVGVGDSKSLVVTEDLLHEGLNDGFLLELCRVKSVGESLLKLLDFGKCQAFVHPESQGKILEIAFQLGKKTGLVFVDCSASSDTVAVLKQAIDMGCCAVMANKKPLTSTMEDFKKLFIYPRRIRHESTVGAGLPVIASLNRIISSGDPVHQIIGSLSGTLGYVMSEVEDGKPLSQVVRDAKSLGYTEPDPRDDLGGMDVARKALILARILGHQINLDSIQIESLYPKEMGPGVMTVEDFLNRGLLLLDKDIQDRVEKAASNGNVLRYVCVIMGSRCEVGIQELPKNSPLGRLRGSDNVLEIYTRCYSKQPLVIQGAGAGNDTTAAGVLADIVDIQDLFP

SEQ ID NO: 15117 - DNA, 1008 bp, uncultured archaeon GZfos3D4
  CDS (1)..(1008): transl_table=11
gtgaagatgaagacaaaaccaaaaacggtaagaatatcaataattggatttggaaacgtaggtggcggtgtagcggaggtaataaagcggaaaagagaggagataatgagaaagtactgtctggatataaaaatcgtcggcatagcggacttgccgggtgtcgtggtggatgagaatggattgagtgaagatacgataacgaaattcaagttaggggaaacaacggaagatatgacaactctaaatctgataaaggatgtggagcacgaggttgcgatagaaacaacaccaaccaatgtcgagaatggcaagccaggattaacgcatataattgcggctttggagtcggacaggcatgtagtaacctcgaataaaggtccttttgcattacagtataaaaagttaatgaaactcgctgcgaatagagagaaggaactaagatttgaagcgacagtaggcggtgctatgccgataatttccttgatacaggataatctcgcaggtaacgggataatatccataaagggcattttaaatggcacctgcaactatattttaacgagaatggtagaggaagggttaccatacgagcatgtgttaaaggaagcgcaggagcgtggaatagcagaggcagaaccctctaaagatgttgagggagtagatactgcgttgaaactcgtgattttagctaattccgtttttgaccttgacgtgacttataaggatgtagaagtagcaggcatcacagacataacacccgaagctttgaaactggctaacgatgctggttacgtgataaaattaataggcgaagtggacaggggagagtgccttaaagttgcaccccggttagtcccaaaagatgacccgcttaatgtcgggggcacgctgaacgttgcaaccataaaaaccgacttggctggagacattactgttatcggtaaaggtgccggacctgtcgaagcagcaagtgctattttatctgatataattaggatttacacataa

SEQ ID NO: 15118 - protein, 335 aa, uncultured archaeon GZfos3D4
MKMKTKPKTVRISIIGFGNVGGGVAEVIKRKREEIMRKYCLDIKIVGIADLPGVVVDENGLSEDTITKFKLGETTEDMTTLNLIKDVEHEVAIETTPTNVENGKPGLTHIIAALESDRHVVTSNKGPFALQYKKLMKLAANREKELRFEATVGGAMPIISLIQDNLAGNGIISIKGILNGTCNYILTRMVEEGLPYEHVLKEAQERGIAEAEPSKDVEGVDTALKLVILANSVFDLDVTYKDVEVAGITDITPEALKLANDAGYVIKLIGEVDRGECLKVAPRLVPKDDPLNVGGTLNVATIKTDLAGDITVIGKGAGPVEAASAILSDIIRIYT

SEQ ID NO: 15119 - DNA, 2766 bp, Oryza sativa subsp; identical to SEQ ID NO: 793
  CDS (1)..(2766)

SEQ ID NO: 15120 - protein, 921 aa, Oryza sativa subsp; identical to SEQ ID NO: 794

SEQ ID NO: 15121 - DNA, 1131 bp, Arabidopsis thaliana
  CDS (1)..(1131)
atgaagaagatcccggtgcttctcatgggctgcggaggcgttggccgccaccttcttcaacacatcgtctcttgccgatcgcttcacgccaaaatgggagttcatatacgggtgattggagtatgtgatagtaaatccttagttgctccaatggatgtgctcaaagaggaactgaatgatgaactcttgtcagaagtttgccttatcaaatcaactggttctgcattatcgaagttgggtgctttgggtggatatcgagtcgtccatgattccgagttaagcacagaaacagaagagattgcaaaacttcttggtaaatctacaggcttagctgtggtggattgctcagccagcatggagacgattgaaatattgatgaaggcagttgacttgggttgctgtattgtccttgcaaataagaagcctgttacttcaacgctggaacattacgacaaattggctttgcatccgcgattcatccgccatgaatctactgttggtgctggtcttcctgtcatcgcatccttgaaccgcataatttcgtctggagatcctgttcataggattgtcggtagtttgagcgttaccttgggatatgtaatgagtgagcttgaagatggcaagcctctaagccaagttgttcaagctgccaaaaagctggggtacactgaaccagatccacgtgacgacctcggtggcatggatgttgctagaaagggtttgattcttgctcgacttcttgggaagaggataattatggacagcattaagatagagagcttgtatccagaagagatgggacctggactcatgtctgtggatgatttcctccataatggaatagtaaaacttgatcagaatatagaggagagagttaaaaaagcttcatcaaaagggtgtgtgcttcgttatgtctgtgtgattgagggttcaagcgttcaagttggcattcgagaagtttcaaaagattcaccattgggacggctaagaggcagtgacaatatagtagagatatatagccgttgctacaaggagcagcctttggtgattcaaggtgccggagccgggaacgacacaactgcagccggtgttcttgcagacatcatcgacttgcaggatctttttcactga

SEQ ID NO: 15122 - protein, 376 aa, Arabidopsis thaliana
MKKIPVLLMGCGGVGRHLLQHIVSCRSLHAKMGVHIRVIGVCDSKSLVAPMDVLKEELNDELLSEVCLIKSTGSALSKLGALGGYRVVHDSELSTETEEIAKLLGKSTGLAVVDCSASMETIEILMKAVDLGCCIVLANKKPVTSTLEHYDKLALHPRFIRHESTVGAGLPVIASLNRIISSGDPVHRIVGSLSVTLGYVMSELEDGKPLSQVVQAAKKLGYTEPDPRDDLGGMDVARKGLILARLLGKRIIMDSIKIESLYPEEMGPGLMSVDDFLHNGIVKLDQNIEERVKKASSKGCVLRYVCVIEGSSVQVGIREVSKDSPLGRLRGSDNIVEIYSRCYKEQPLVIQGAGAGNDTTAAGVLADIIDLQDLFH

SEQ ID NO: 15123 - DNA, 1089 bp, Xanthomonas campestris pv
  CDS (1)..(1089): transl_table=11
gtgagcaccgtgctgcctgtctcgcgccgtgcgccggtggctgccgtgacgcccacaccgcggctcgccctgttgggcaccggcacggtcgggcgtgccttcgtgacgcgctataccgccttgcagcagcgtcagttgcgcctgccgcgctttgactggctggccaactcgcgcattgcgcacgattgtggtgccggcgcggagcaggcgctgcagctggccaacgcagcgccgcgtggccgtgcggagctgcagccgtgggcagaaaccactgcgctgcgcgccggcgatgtgctggtggatgccaccgccagcgacgtggtggcggattggcacgtggaatggctgacccgcggcgtgcatgtggtgaccgccaacaagctgggccagggcacggcactgtcgcgtgcgcaggacctgtatgccgcgcgtcacgccagcggcgcgtattacggcgacagtgccaccgtgggtgctgggctgcccttgctcagcagcgtgcgtgcactggtggccggcggcgaccagattcattcgatcgaaggggtgttgtcggggtcgttggcatggctgtttcatcgctacgatggcagtacgccgttctcggcgtgcgtccgcgaagcgatggcggccgggtacaccgagcccgatccgcgcatcgatctctccggtgaggacgtgcgccgcaagttgctgatcctggcgcgtgcggccgggcaaccgctggaagccgagcaggtgcatgtcgaatcgctggtgcctgccgcgctggcgtccgtggcgccggaggcggtggacgcgcacctggaaacgctcgatgcgctggtgcagacgcgttggcagcaggcccgcgccgccggccgctgcttgcggttcgtcggccgcgtggacgggcatggggcaagcgtgggcttacgcgaattggccctggaccacccgctggcgggcggcgcgggcaccgataaccgtgtcgccatcagcagcgatcgctaccgcgaccagccgctgttgattcaagggccgggcgccggtgccgaagtgaccgcggcggcgttgctggacgatgtgttgcggatcgttgctggctga

SEQ ID NO: 15124 - protein, 362 aa, Xanthomonas campestris pv
MSTVLPVSRRAPVAAVTPTPRLALLGTGTVGRAFVTRYTALQQRQLRLPRFDWLANSRIAHDCGAGAEQALQLANAAPRGRAELQPWAETTALRAGDVLVDATASDVVADWHVEWLTRGVHVVTANKLGQGTALSRAQDLYAARHASGAYYGDSATVGAGLPLLSSVRALVAGGDQIHSIEGVLSGSLAWLFHRYDGSTPFSACVREAMAAGYTEPDPRIDLSGEDVRRKLLILARAAGQPLEAEQVHVESLVPAALASVAPEAVDAHLETLDALVQTRWQQARAAGRCLRFVGRVDGHGASVGLRELALDHPLAGGAGTDNRVAISSDRYRDQPLLIQGPGAGAEVTAAALLDDVLRIVAG

SEQ ID NO: 15125 - DNA, 1089 bp, Xanthomonas axonopodis pv
  CDS (1)..(1089): transl_table=11
gtgagcaatgtcctgcccgtttcgcgccgcgctccggtcgctgcagtgacgccgacgccgcggctggccttgctggggaccggcaccgtggggcgcgctttcgtgacgcgctacaccgcgctgcagcagcgccaactatgcttgccgcgcttcgattggctggccaattcacgtgttgcgcaggattgtggcgtcagcgccgagcaggccctgcagcacgccaatgcggcgccacgcgggcagacggtcttgcagccgtgggcagaaaccaccgcgctgcgtgccggcgatgtgctggtggatgcgactgccagcgatgtcgttgccgattggcatgtcgaatggttgcagcgcggcgtgcatgtggtgaccgccaacaaactgggccagggcaccgcgttgtcgcgtgcacaggcgctgcacgcggcccgccatgccagcggcgcgtattacggcgatagcgccactgtgggcgcgggactgccggtgctgagcagcgtgcgcgccttggtcgccggtggggaccgcattcattcgatcgaaggcgtgttgtccggatcgttggcgtggctgtttcatcgttacgacggcagtggcgcgttttccgcctgcgtgcgggaagcgatggtggctggttataccgagccggatccacgcatcgatctctctggagaggatgtgcggcgcaagctgctgatcctggcgcgtgccgcggggtggcagctggaggccgagcaggtgcatgtggaatcgctggtgcctgccactattgccaggctgccgcttgctgagctggatgcgcagttgggcgcgctggatgcggtggtggggacgcgttggcagcaggcgcgtgcggcagggcgttgcctgcgctttgtcggccgcgtggacgcgcatggagcgagcgtgggcttgcgcgaactggcgctggatcacccgttggcaggcggtgccgggaccgataatcgggtggcgatcagcagcgaccgctatcgcgcgcagccgctgctgatccagggaccaggcgccggggccgaagtgactgcagcggcgctgctggatgatgtgctgcggattgtggccggctga

SEQ ID NO: 15126 - protein, 362 aa, Xanthomonas axonopodis pv
MSNVLPVSRRAPVAAVTPTPRLALLGTGTVGRAFVTRYTALQQRQLCLPRFDWLANSRVAQDCGVSAEQALQHANAAPRGQTVLQPWAETTALRAGDVLVDATASDVVADWHVEWLQRGVHVVTANKLGQGTALSRAQALHAARHASGAYYGDSATVGAGLPVLSSVRALVAGGDRIHSIEGVLSGSLAWLFHRYDGSGAFSACVREAMVAGYTEPDPRIDLSGEDVRRKLLILARAAGWQLEAEQVHVESLVPATIARLPLAELDAQLGALDAVVGTRWQQARAAGRCLRFVGRVDAHGASVGLRELALDHPLAGGAGTDNRVAISSDRYRAQPLLIQGPGAGAEVTAAALLDDVLRIVAG

SEQ ID NO: 15127 - DNA, 1293 bp, Streptomyces sp
  CDS (1)..(1293): transl_table=11
atgatgcgtacgcgtccgctgaaggtggcgctgctgggctgtggagtggtcggctcagaagtggcgcgcatcatgacgacgcacgccgacgacctcgcggcgcgcatcggcgcacccgtggagctcgtcggcgtcgccgtccgccgcccctcgaaggtgcgtgagggcatcgaccccgcactgatcaccaccgacgcgaccgcgctcgtgcagcgcggcgacatcgacgtcgtgatcgaggtcatcgggggcatcgagccggcccgcacgctcatcaccaccgccttcgagaacggcgcgagcgtcgtctccgccaacaaggccctgctcgccgaggacggcgcggccctgcacgccgccgccgagaagtacggccgcgatctctattacgaggccgccgtcgcgggtgccatcccgctcgtacggccgctgcgcgagtcgctcgcgggcgacaaggtcaaccgggtgctcggcatcgtcaacggcacgaccaacttcatcctcgacaagatggacaccagcggcgccggctactccgaggcgctcgacgaggccaccgccctcggatacgccgaggccgacccgaccgccgacgtcgagggcttcgacgccgccgccaaggccgcgatcctcgccggaatcgccttccacacccgggtgaagatcggcgacgtccaccgcgagggcatcaccgaggtcaccgccgccgacatcgcctccgcccgcggcatgggctgcacggtcaagctcctcgccatctgcgagcgcgccgccgacggggcctccgtcaccgcccgcgtccaccccgcgatgatcccgctcagccacccgctggcctccgtccgcgaggcgtacaacgcggtgttcatcgaggccgaggccgccgggcagctcatgttctacgggcccggcgccggcggctccccgaccgcctcggccgtcctcggcgacctcgtcgcggtctgccgcaacaaactgggcgaggccaccggacccggtgagtccgcctacacgcgcctgccggtcagccccatgggcgaggtcgtcacgcgctaccacatcagcctcgacgtggccgacaagccgggtgtactcgcccaggtggcaacggtcttcgccgagcagggggtatcgatcgataccgtccgccagcagggaaaggacggcgaggcatccctcgtcgtcgtcacccaccgcgcgcccgacgccgccctctccgggaccgtcgaagcgctgcgcaagctcgacaccgtgcgcggtgtcgccagcatcatgcgtgttgaaggggagtaa

SEQ ID NO: 15128 - protein, 430 aa, Streptomyces sp
MMRTRPLKVALLGCGVVGSEVARIMTTHADDLAARIGAPVELVGVAVRRPSKVREGIDPALITTDATALVQRGDIDVVIEVIGGIEPARTLITTAFENGASVVSANKALLAEDGAALHAAAEKYGRDLYYEAAVAGAIPLVRPLRESLAGDKVNRVLGIVNGTTNFILDKMDTSGAGYSEALDEATALGYAEADPTADVEGFDAAAKAAILAGIAFHTRVKIGDVHREGITEVTAADIASARGMGCTVKLLAICERAADGASVTARVHPAMIPLSHPLASVREAYNAVFIEAEAAGQLMFYGPGAGGSPTASAVLGDLVAVCRNKLGEATGPGESAYTRLPVSPMGEVVTRYHISLDVADKPGVLAQVATVFAEQGVSIDTVRQQGKDGEASLVVVTHRAPDAALSGTVEALRKLDTVRGVASIMRVEGE

SEQ ID NO: 15129 - DNA, 1294 bp, Cryptococcus neoformans
  CDS (3)..(1130)
caatgtcctccgttgtcgttccccgtcccatccccgtcgcgctccttggtctcggtggcgtcggcaaggccatcctctcccagctcctctcccctcccctctctgcccaattccagctcgtcctcatcgccaactctcgtcagtccctctcgcttcccctccctgctgcccccatcacccccgccaacttccagtccatcctggagaaacacggtgcacctcttaaggtcacctccgtcatctccgtcctctcaacccaccccgacgctcccggtatctttatcgactctaccggctccgatgtaatccccgccatgtacccccaaatcctctccatgggcgttcacatcgtcaccccgaacaaaaagggtttctccgcttccgaggctctctacaaggccattgctgagaagagcttccccaacactccttctttagcctatggcgagtctactgtcggcgcgggtttgccgatcatccagactttgaaggacttggtcgctaccggcgatgagattgagaaaattgagggtgtcttcagtggcactttgagttatatcttcaacgagttcagcaagcctgaaggtggaaacgtcaagttctccgaggttgtcaaggttgccaaggagaagggctacactgagcctgatcctcgagatgatctctctggtaccgacgtcgcccgaaagctctccatcctctcccgactcgttcccaccgctcccgctctcccccaaggctacgcttccatccctacccaatctctcgttcctgatgtcctctccgacgcttctactaaggaggagtaccttgagcgactcgaggagggtgacgagttctttgccaacctcagggaggaggccaagaaggagggtcaggtggtgagatatgttggtgttattgacgtcaagtctggcaaggttgaagccaagttgggcaagtaccccgcggaccacgctttcgctaccgctctcaagggatctgacaacatcatctctttcaccaccaagagatactctcctcggccccttatcatccaaggcgccggcgccggtgctgatgttaccgctatgggcgttacttccgacatggtcaaaatctacgagaggctcgcagttcctcgtatctaaaagtatgaataagcagtagtaattgggggtttgagggtttcaagcatgcagaatcgttaaatagtcagttggagatgtatggtctgattggaagtccaaaaaaaaaaaaaaaaaaaaaaaaaaaaaaaaaaaaaaaaaaaaaaaaaaaaaaaaaaaaaaaaaaa

SEQ ID NO: 15130 - protein, 375 aa, Cryptococcus neoformans
MSSVVVPRPIPVALLGLGGVGKAILSQLLSPPLSAQFQLVLIANSRQSLSLPLPAAPITPANFQSILEKHGAPLKVTSVISVLSTHPDAPGIFIDSTGSDVIPAMYPQILSMGVHIVTPNKKGFSASEALYKAIAEKSFPNTPSLAYGESTVGAGLPIIQTLKDLVATGDEIEKIEGVFSGTLSYIFNEFSKPEGGNVKFSEVVKVAKEKGYTEPDPRDDLSGTDVARKLSILSRLVPTAPALPQGYASIPTQSLVPDVLSDASTKEEYLERLEEGDEFFANLREEAKKEGQVVRYVGVIDVKSGKVEAKLGKYPADHAFATALKGSDNIISFTTKRYSPRPLIIQGAGAGADVTAMGVTSDMVKIYERLAVPRI

SEQ ID NO: 15131 - DNA, 1314 bp, Methylobacillus flagellatum; identical to SEQ ID NO: 6492
  CDS (1)..(1314): transl_table=11

SEQ ID NO: 15132 - protein, 437 aa, Methylobacillus flagellatum; identical to SEQ ID NO: 6493

SEQ ID NO: 15133 - DNA, 2463 bp, Escherichia coli
  CDS (1)..(2463): transl_table=11
atgcgagtgttgaagttcggcggtacatcagtggcaaatgcagaacgttttctgcgtgttgccgatattctggaaagcaatgccaggcaggggcaggtggccaccgtcctctctgcccccgccaaaatcaccaaccacctggtggcgatgattgaaaaaaccattagcggccaggatgctttacccaatatcagcgatgccgaacgtatttttgccgaacttttgacgggactcgccgccgcccagccggggttcccgctggcgcaattgaaaactttcgtcgatcaggaatttgcccaaataaaacatgtcctgcatggcattagtttgttggggcagtgcccggatagcatcaacgctgcgctgatttgccgtggcgagaaaatgtcgatcgccattatggccggcgtattagaagcgcgcggtcacaacgttactgttatcgatccggtcgaaaaactgctggcagtggggcattacctcgaatctaccgtcgatattgctgagtccacccgccgtattgcggcaagccgcattccggctgatcacatggtgctgatggcaggtttcaccgccggtaatgaaaaaggcgaactggtggtgcttggacgcaacggttccgactactctgctgcggtgctggctgcctgtttacgcgccgattgttgcgagatttggacggacgttgacggggtctatacctgcgacccgcgtcaggtgcccgatgcgaggttgttgaagtcgatgtcctaccaggaagcgatggagctttcctacttcggcgctaaagttcttcacccccgcaccattacccccatcgcccagttccagatcccttgcctgattaaaaataccggaaatcctcaagcaccaggtacgctcattggtgccagccgtgatgaagacgaattaccggtcaagggcatttccaatctgaataacatggcaatgttcagcgtttctggtccggggatgaaagggatggtcggcatggcggcgcgcgtctttgcagcgatgtcacgcgcccgtatttccgtggtgctgattacgcaatcatcttccgaatacagcatcagtttctgcgttccacaaagcgactgtgtgcgagctgaacgggcaatgcaggaagagttctacctggaactgaaagaaggcttactggagccgctggcagtgacggaacggctggccattatctcggtggtaggtgatggtatgcgcaccttgcgtgggatctcggcgaaattctttgccgcactggcccgcgccaatatcaacattgtcgccattgctcagggatcttctgaacgctcaatctctgtcgtggtaaataacgatgatgcgaccactggcgtgcgcgttactcatcagatgctgttcaataccgatcaggttatcgaagtgtttgtgattggcgtcggtggcgttggcggtgcgctgctggagcaactgaagcgtcagcaaagctggctgaagaataaacatatcgacttacgtgtctgcggtgttgccaactcgaaggctctgctcaccaatgtacatggccttaatctggaaaactggcaggaagaactggcgcaagccaaagagccgtttaatctcgggcgcttaattcgcctcgtgaaagaatatcatctgctgaacccggtcattgttgactgcacttccagccaggcagtggcggatcaatatgccgacttcctgcgcgaaggtttccacgttgtcacgccgaacaaaaaggccaacacctcgtcgatggattactaccatcagttgcgttatgcggcggaaaaatcgcggcgtaaattcctctatgacaccaacgttggggctggattaccggttattgagaacctgcaaaatctgctcaatgcaggtgatgaattgatgaagttctccggcattctttctggttcgctttcttatatcttcggcaagttagacgaaggcatgagtttctccgaggcgaccacgctggcgcgggaaatgggttataccgaaccggacccgcgagatgatctttctggtatggatgtggcgcgtaaactattgattctcgctcgtgaaacgggacgtgaactggagctggcggatattgaaattgaacctgtgctgcccgcagagtttaacgccgagggtgatgttgccgcttttatggcgaatctgtcacaactcgacgatctctttgccgcgcgcgtggcgaaggcccgtgatgaaggaaaagttttgcgctatgttggcaatattgatgaagatggcgtctgccgcgtgaagattgccgaagtggatggtaatgatccgctgttcaaagtgaaaaatggcgaaaacgccctggccttctatagccactattatcagccgctgccgttggtactgcgcggatatggtgcgggcaatgacgttacagctgccggtgtctttgctgatctgctacgtaccctctcatggaagttaggagtctga

SEQ ID NO: 15134 - protein, 820 aa, Escherichia coli
MRVLKFGGTSVANAERFLRVADILESNARQGQVATVLSAPAKITNHLVAMIEKTISGQDALPNISDAERIFAELLTGLAAAQPGFPLAQLKTFVDQEFAQIKHVLHGISLLGQCPDSINAALICRGEKMSIAIMAGVLEARGHNVTVIDPVEKLLAVGHYLESTVDIAESTRRIAASRIPADHMVLMAGFTAGNEKGELVVLGRNGSDYSAAVLAACLRADCCEIWTDVDGVYTCDPRQVPDARLLKSMSYQEAMELSYFGAKVLHPRTITPIAQFQIPCLIKNTGNPQAPGTLIGASRDEDELPVKGISNLNNMAMFSVSGPGMKGMVGMAARVFAAMSRARISVVLITQSSSEYSISFCVPQSDCVRAERAMQEEFYLELKEGLLEPLAVTERLAIISVVGDGMRTLRGISAKFFAALARANINIVAIAQGSSERSISVVVNNDDATTGVRVTHQMLFNTDQVIEVFVIGVGGVGGALLEQLKRQQSWLKNKHIDLRVCGVANSKALLTNVHGLNLENWQEELAQAKEPFNLGRLIRLVKEYHLLNPVIVDCTSSQAVADQYADFLREGFHVVTPNKKANTSSMDYYHQLRYAAEKSRRKFLYDTNVGAGLPVIENLQNLLNAGDELMKFSGILSGSLSYIFGKLDEGMSFSEATTLAREMGYTEPDPRDDLSGMDVARKLLILARETGRELELADIEIEPVLPAEFNAEGDVAAFMANLSQLDDLFAARVAKARDEGKVLRYVGNIDEDGVCRVKIAEVDGNDPLFKVKNGENALAFYSHYYQPLPLVLRGYGAGNDVTAAGVFADLLRTLSWKLGV

SEQ ID NO: 15135 - DNA, 2460 bp, Serratia marcescens; identical to SEQ ID NO: 775
  CDS (1)..(2460): transl_table=11

SEQ ID NO: 15136 - protein, 819 aa, Serratia marcescens; identical to SEQ ID NO: 776

SEQ ID NO: 15137 - DNA, 2433 bp, Escherichia coli; identical to SEQ ID NO: 777
  CDS (1)..(2433): transl_table=11

SEQ ID NO: 15138 - protein, 810 aa, Escherichia coli; identical to SEQ ID NO: 778

SEQ ID NO: 15139 - DNA, 2736 bp, Arabidopsis thaliana; identical to SEQ ID NO: 627
  CDS (1)..(2736)

SEQ ID NO: 15140 - protein, 911 aa, Arabidopsis thaliana; identical to SEQ ID NO: 628

SEQ ID NO: 15141 - DNA, 3178 bp, Zea mays
  CDS (42)..(2804)
cgccgctacccctccgcttccgccctctcgctttcgttgtcatgaggagcctcaccgtggcaagccgccacccgggcgccgctttctctacccgccgccgcccccttcttcaccccgccgcagccggaagggactcgaccttccagcggtgctggcgatgggaaaaaactcaggacagctccttcgggagctcactaaggaccagccgccttccaagaactgtgcacggagatattttgaagaatttgctcgcaccaactgctggtgctgtttcagttgagcaagctgaagctattgctgacctcccaaaaggtgacatgtggtcggtgcacaagtttggtggcacatgcatggggacctctgagagaattcacaatgttgctgatatagtccttcgtgatccttctgagaggaaactggtagttgtatctgcaatgtctaaggttaccgacatgatgtataatcttgtaaacaaggctcaatcaagggatgattcttacattgctgtactggatgaagtttttgataagcatatgacaacagcaaaggatttgcttgctggagaagaccttgcaagattcctgtctcagttacatgcagacatcagtaacctaaaagcaatgcttcgggccatatatatagctgggcatgcaacagagtctttctctgattttgttgttggtcatggagagttatggtctgctcaaatgttatcatatgcaatacagaagtctggaacaccatgcagttggatggatacaagggaagttctagttgtgaatccgtcaggagccaaccaggtagatcctgactatttggaatctgaaaaacgacttgaaaaatggttttctcgatgtccggctgagacaataattgctactgggtttattgcgagtacacctgaaaacatcccaacaaccttaaaaagagatggaagtgatttctctgcagccataattggttcccttgttaaggctcgccaggtgaccatctggactgatgttgatggggtatttagtgcagatcccagaaaagttagtgaggctgtaatcttaagcacattgtcgtatcaggaggcctgggaaatgtcatattttggggcaaatgtcttgcatccacgtactattatacctgtgatgaaatataatatccctattgttataaggaacatattcaatacttctgcccctggaactatgatctgtcaacagcctgctaatgaaaacggtgatttggaggcttgtgtcaaagcttttgcaactatagataaattggctttggttaatgtcgaagggactggaatggctggtgtcccaggtacagcaaatgccatatttggtgctgtgaaggatgttggagcaaatgttatcatgatatcacaggctagcagtgaacactctgtatgctttgctgttccagaaaaggaagttgcattggtttctgcagccttgcatgctaggtttcgtgaagcattggcagcagggaggttatctaaggttgaagtcattcataattgtagcatccttgctactgtcggcctgaggatggcaagtacacctggagtcagcgcgaccctttttgatgcactagctaaggcaaatattaatgtaagggcgatagctcaaggttgcagtgagtacaacattactattgtactgaagcaagaagactgcgtgcgggctctgagagctgcccactcaaggttcttcctctccaaaaccacactggctgttggcatcattggacctgggttgattggtcgcacactacttaatcagctgaaggatcaggctgctgtcctcaaggaaaatatgaacattgatttgcgtgtcatgggaatagctggttctaggacaatgcttttaagtgatataggagtagatttgacccagtggaaagagaagctacaaactgaagcagaacctgccaatcttgataagtttgttcatcatttgtctgagaatcactttttccctaacagagttttggtagattgcacagcagatacaagtgttgcatctcactattatgattggctaaagaaaggaatccatgtcatcactccaaacaagaaagcaaattcagggccacttgacaggtatcttaaacttagaactcttcagcgtgcatcatatactcattacttctatgaagcaactgttggtgctggcctccctatcattagcactctgcgtggtctcctagagacaggtgacaagatattgcgcattgaagggattttcagtggaacgttaagttatatttttaacaacttcgaaggagcaagaacctttagtgatgttgttgctgaagcaaaaaaagcaggatacacagaaccagatccaagagatgatctgtctggtactgatgttgccaggaaggtcataattcttgcaagggaatctggtttggggcttgaactttctgatattcctgtacgaagtcttgtgccggaggcacttaagtcatgtacctcagccgacgaatacatgcagaagttaccatcttttgacgaggattgggcaagagagaggaaaaatgctgaagctgcgggagaagttctgcggtatgttggagtggtggatgtggtcagcaagaaggggcaggtggagctgcgagcctacaagagggaccacccgttcgcgcagctatctggttccgacaacatcatagccttcaccacctcgaggtacaaggatcagccactgatcgtgcgtggtccgggggctggtgcggaagtgactgcaggaggcgtcttctgcgacatactgcgcctgtcttcctaccttggtgccccctcgtagtctgtcaaggttttgcggtgccgtggtgttgtgttgctgctctactactggtttttttgttgttgttgttagtgcttggaatagctggagtaagtatggattaagtgagttctggggtgttaagggttgggtgtcttagttagaaggtcgtattggagggaatggaatccgttcaccgttcttgcgtgttgcaataatcttgtgtggagtctccaggtttgttcggttgctaatagtaagccaagccaatggcgagtctagtgaagaaccaaataaaaaaggctgggctgtaaggaatgtatccacacgttacttcattggtgtcaccataaatatatacctggatcatattggcttggtttggtttggttcgt

SEQ ID NO: 15142 - protein, 920 aa, Zea mays; identical to SEQ ID NO: 780

SEQ ID NO: 15143 - DNA, 2751 bp, Arabidopsis thaliana; identical to SEQ ID NO: 781
  CDS (1)..(2751)

SEQ ID NO: 15144 - protein, 916 aa, Arabidopsis thaliana; identical to SEQ ID NO: 782

SEQ ID NO: 15145 - DNA, 3045 bp, Zea mays; identical to SEQ ID NO: 633
  CDS (44)..(2797)

SEQ ID NO: 15146 - protein, 917 aa, Zea mays; identical to SEQ ID NO: 784

SEQ ID NO: 15147 - DNA, 2451 bp, Buchnera aphidicola subsp; identical to SEQ ID NO: 785
  CDS (1)..(2451): transl_table=11

SEQ ID NO: 15148 - protein, 816 aa, Buchnera aphidicola subsp; identical to SEQ ID NO: 786

SEQ ID NO: 15149 - DNA, 2448 bp, Haemophilus influenzae; identical to SEQ ID NO: 791
  CDS (1)..(2448): transl_table=11

SEQ ID NO: 15150 - protein, 815 aa, Haemophilus influenzae; identical to SEQ ID NO: 792

SEQ ID NO: 15151 - DNA, 1131 bp, Schizosaccharomyces pombe
  CDS (1)..(1131)
atgtcagctagcagaactaacgttaacgttgctattgttggtacaggaaacatcggcggtgaactcttaaaccaaattaagggttttaatgaaaacgcttctaccaatggcactacctcttttaacgttgttgccatttctagtatggaaggtcactacgtctccaaggattatcagcccattaatttgtctgaatggaagaaccttacttctcagaaccaaggtgcttattcattagatgctttggtagatttccttgccaagtccccccttcccgccattttggtcgataacactgcctctgaagcaatcgctcaatcttatcctaaatttttgagcaagaaaatcaacattgctactcccaacaagaaagcattctctgctagtaatgatgtctatcaaaacattatcaaggctagcaaggagagcggtgctttattgatgcacgaggcttctgttggtgctggtttgccaattatctccacattaaaagaacttatcgctactggtgatgaaatcataaagattgaaggtatcttttctggcactctgtcttacatcttcaacgtttggtctcctaacggcaagaaaggaactgcctcattctctgatatcgtcaaaattgccaaacaaaatggctataccgagcctgaccctcgtgatgacttgaatggcatggatgtcgctcgtaaagtcaccatcttgtctcgtattgctggtgttcatgtcgagtcagctagctcattccctgttaaatcgctcattcctgaacctttgaagagtgctgtaaatgctgaagagtttttagctggattacctaactttgattcagaatttgctagcatgcgcgaagaagctgagaaggaaggcaaggttgtccgttttgttggtgaggctgacgttgctaacaagaccactcttgtcaaacttgaaaagtacgacgcttctcatccgttcgctaaccttcaatcgtctgacaacattatatcctttaccactaaacgctaccatactcgtcctttggtagttattggtgccggtgctggagctgctgtgaccgctgccggtgttcttggagatatgatcaaaattatgtctcaggttcgcgcgtcagatgctccttccgcttaa

SEQ ID NO: 15152 - protein, 376 aa, Schizosaccharomyces pombe
MSASRTNVNVAIVGTGNIGGELLNQIKGFNENASTNGTTSFNVVAISSMEGHYVSKDYQPINLSEWKNLTSQNQGAYSLDALVDFLAKSPLPAILVDNTASEAIAQSYPKFLSKKINIATPNKKAFSASNDVYQNIIKASKESGALLMHEASVGAGLPIISTLKELIATGDEIIKIEGIFSGTLSYIFNVWSPNGKKGTASFSDIVKIAKQNGYTEPDPRDDLNGMDVARKVTILSRIAGVHVESASSFPVKSLIPEPLKSAVNAEEFLAGLPNFDSEFASMREEAEKEGKVVRFVGEADVANKTTLVKLEKYDASHPFANLQSSDNIISFTTKRYHTRPLVVIGAGAGAAVTAAGVLGDMIKIMSQVRASDAPSA

SEQ ID NO: 15153 - DNA, 1155 bp, Zea mays
  CDS (1)..(1155)
atgccgacaccagtgaagtcggtgctccccgtggtgctcttcggctgcggcggcgtcggccgctacctcctccgccacatcgtctcctgtcgtcccctccacgccaaccagggcgtggccatccgggtggtgggcgtcgccgatagctcctccctgctcgtcgccgaagatgtccactccaccggcctcgatgacgcgctcctcacccagctctgcgccgccaagtccgcaggctctcccctctcctccctgctcggccgagggcactgtcagctgttcaagaaccctgaggctaggggcaaagtcatagacgccgctaccacacttggaagtacaactggtctggtgctagttgactgttctgcaacttatgacactgttagcctgctgaaagatgctgtggatcatggatgctgtgtcgtattggcaaacaagaaacctcttaccggtgcttatgaggattttcagaagttggtctccaacttccgtcggataagatttgaatctactgttggagcaggtttgcctgtgatagcttctgtaacccgtattattgcatctggagaccctattactcgtattgttggcagtttgagtggtacacttgggtatgtgatgagtgagcttgaggatggaaagaaatttagtgaagttgtaaaaactgccaagtctcttggctatacagaaccagatccacgtgatgatcttggtggaatggatgtggctagaaaggcattgatcctagctaggcttcttgggcaacagataagcatggagagtatcaacgttgagagtttatatcctagtgaattaggacctgatgcagtgtccacaaaggacttccttgaaagtggtttagtgcaacttgacaagagcatggaagaaagaatcagagcagcatcttcgagaggaaacgttcttcgctatgtctgtgagattgaaagcgcagggtgccaagtaggccttaaagagctcccaaaggattctgcgctgggtagattgaagggaagtgacaatgtggtcgagatatacagcagatgttatcagagctcccctctggtgatccagggcgcaggagctggcaacgacaccactgccgccggcgtccttgctgacataatcgacctccaagacctgttccagacgatggcttga

SEQ ID NO: 15154 - protein, 384 aa, Zea mays
MPTPVKSVLPVVLFGCGGVGRYLLRHIVSCRPLHANQGVAIRVVGVADSSSLLVAEDVHSTGLDDALLTQLCAAKSAGSPLSSLLGRGHCQLFKNPEARGKVIDAATTLGSTTGLVLVDCSATYDTVSLLKDAVDHGCCVVLANKKPLTGAYEDFQKLVSNFRRIRFESTVGAGLPVIASVTRIIASGDPITRIVGSLSGTLGYVMSELEDGKKFSEVVKTAKSLGYTEPDPRDDLGGMDVARKALILARLLGQQISMESINVESLYPSELGPDAVSTKDFLESGLVQLDKSMEERIRAASSRGNVLRYVCEIESAGCQVGLKELPKDSALGRLKGSDNVVEIYSRCYQSSPLVIQGAGAGNDTTAAGVLADIIDLQDLFQTMA

SEQ ID NO: 15155 - DNA, 1137 bp, Brassica napus
  CDS (1)..(1137)
atgaagaagatctcggtgattctcatgggatgtggaggcgttggccgacaacttctccaacacattgtctctttccgatcgcttcacgccaaaatgggagttcatttacgggtggttggagtcagtgacagtaaatccttagctgttccagtggatgtgctcaaagaggaacttgatgatgaactcttgtctgaagtttgcagtatcaaatcggctggttctgctttgacgacgcttggtgctttaggaaaaggtgaatatcgcgtgttcaatggttctgagtcaagaagagaaacggaagaaattgcacaacttctcggtaaatctacaggcttagttgttgtggattgctcagccagcagtgaaacggttgaaatattgacaaaggcagttgacttgggttgctgtgctgtcctagcaaataagaagcctcttacttcaacactggaacattatgacaagttggttttggatcctcgacgtatccgccatgaatccactgttggtgctgggcttcctgtcattgcatccatgaaccgcattatttcatctggagatcctgttcatagtattgtcggtagtttgagcggtaccttgggatatgtaatgagtgagcttgaagatggaaggcctctaagtcaagttgttcgagctgccaaaacgctggggtacactgagccagatccacgtgacgacctcagtggcatggatgttgctagaaaggctttgattcttgctcgacttcttgggaagagaataattatggatagcataaagatagagagcttgtaccctgaagagatgggacctggagtcatgactgtggatgatttcctccaaaatggaatagcaaaattggatcagaacattgaggagagagttaaaagagcttcatcaaacggatgtgtgcttcgttatgtctgtatgattgagggctcaagcgttcaagttggcattcgagaagttccaaaagattcaccactgggacgactaagaggcagtgacaatatagtggagatacgtagccgttgctacaaggagcagcctttggtgattcaaggagccggagccgggaacgacacgactgcagccggtgttcttgcagacatcatcgacatgcaggatctttttccttga

SEQ ID NO: 15156 - protein, 378 aa, Brassica napus
MKKISVILMGCGGVGRQLLQHIVSFRSLHAKMGVHLRVVGVSDSKSLAVPVDVLKEELDDELLSEVCSIKSAGSALTTLGALGKGEYRVFNGSESRRETEEIAQLLGKSTGLVVVDCSASSETVEILTKAVDLGCCAVLANKKPLTSTLEHYDKLVLDPRRIRHESTVGAGLPVIASMNRIISSGDPVHSIVGSLSGTLGYVMSELEDGRPLSQVVRAAKTLGYTEPDPRDDLSGMDVARKALILARLLGKRIIMDSIKIESLYPEEMGPGVMTVDDFLQNGIAKLDQNIEERVKRASSNGCVLRYVCMIEGSSVQVGIREVPKDSPLGRLRGSDNIVEIRSRCYKEQPLVIQGAGAGNDTTAAGVLADIIDMQDLFP

SEQ ID NO: 15157 - DNA, 1137 bp, Brassica napus
  CDS (1)..(1137)
atgaagaagatctcggtgattctcatgggatgtggaggcgttggccgacaacttctccaacacattgtctctttccgatcgcttcacgccaaaatgggagttcatttacgggtggttggagtcagtgacagtaaatccttagctgttccagtggatgtgctcaaagagggacttgatgatgatctcttgtctgaagtttgcagtatcaaatcggctggttctgctttgacgacgcttggtgctttaggaaaaggtgaatatcgcgtgttcaatggttctgagtcaataagagaaacggaagaaattgcacaacttctcggtaaatctacaggcttagttgttgtggattgctcagccagcagtgaaacggttgaaatattgacaaaggcagttgacttgggttgctgtgctgtcctatcaaataagaagcctcttacttcaacactggaacattatgacaagttggttttggatcctcgacgtatccgccatgaatccactgttggtgctgggcttcctgtcattgcatccatgaaccgcattatttcatctggagatcctgttcatagtattgtcggtagtttgagcggtaccttgggatatgtaatgagtgagcttgaagatggaaggcctctaagtcaagttgttcgagctgccaaaacgctggggtacactgagccagatccacgtgacgacctcagtggcatggatgttgctagaaaggctttgattcttgctcgacttcttgggaagagaataattatggatagcataaagatagagagcttgtaccctgaagagatgggacctggagtcatgactgcggatgatttcctccaaaatggaatagcaaaattggatcagaacattgaggagagagttaaaaaagcttcatcaaacggatgtgtgcttcgttatgtctgtatgattgagggctcaagcgttcaagttggcattcgagaagttccaaaagattcaccactgggacgactaagaggcagtgacaatatagtggagatacgtagccgttgctacaaggagcagcctttggtgattcaaggagccggagccgggaacgacacgactgcagccggtgttcttgcagacatcatcgacatgcaggatctttttccttga

SEQ ID NO: 15158 - protein, 378 aa, Brassica napus
MKKISVILMGCGGVGRQLLQHIVSFRSLHAKMGVHLRVVGVSDSKSLAVPVDVLKEGLDDDLLSEVCSIKSAGSALTTLGALGKGEYRVFNGSESIRETEEIAQLLGKSTGLVVVDCSASSETVEILTKAVDLGCCAVLSNKKPLTSTLEHYDKLVLDPRRIRHESTVGAGLPVIASMNRIISSGDPVHSIVGSLSGTLGYVMSELEDGRPLSQVVRAAKTLGYTEPDPRDDLSGMDVARKALILARLLGKRIIMDSIKIESLYPEEMGPGVMTADDFLQNGIAKLDQNIEERVKKASSNGCVLRYVCMIEGSSVQVGIREVPKDSPLGRLRGSDNIVEIRSRCYKEQPLVIQGAGAGNDTTAAGVLADIIDMQDLFP

SEQ ID NO: 15159 - DNA, 1131 bp, Glycine max
  CDS (1)..(1131)
atgaagaatattcctctgattctaatgggttgtggaggagttggtcgtcaacttctccaacacattgtctcgtgtcgttctcttcactctacacaggggctgtgcttgagagttgtaggagtcggtgatagtaaatctttggtggttacggaggatttgctgcatgaggggttgaatgatggcttcttgttagaactttgccgggtcaagagtgtcggcgaatctctattaaaacttcttgattttgggaaatgccaggcatttgtgcatccggagtcacaaggaaagattctagagattgcatttcaacttggtaaaaagacaggtttggtatttgtagattgctctgctagctctgacactgttgcggtgctaaagcaagcgattgatatgggttgttgtgctgttatggcaaataagaagcctcttacatctacaatggaggattttaaaaaacttttcatctatccacgtcgtattcggcatgagtcaactgtaggcgctggtcttcctgtgatagcatcactgaatcgcataatctcttctggtgatcccgttcatcaaattattgggagtttgagcgggacattgggttatgtaatgagtgaggttgaagatggaaagccattgagccaagttgttagagatgctaaaagtttggggtatactgaaccagatccacgtgatgaccttggtggaatggacgtcgctagaaaggctttaatacttgctcgaatacttggccatcaaattaatctggatagcattcagattgagagcttgtatcccaaagaaatggggcctggcgtaatgactgttgaagacttcttgaaccgtggactcttgttgcttgataaagatattcaagatagagttgagaaggcagcttcaaatggaaatgtgttgcgctatgtctgtgtgatcatgggttcaaggtgtgaagttggtattcaggagcttccaaagaattctcccttgggaagactaagaggaagtgataatgtgttggaaatatatactcgatgctatagtaaacaaccactggttattcaaggtgctggagctggaaatgacactactgctgctggggttcttgctgatatcgtagatattcaagacttatttccttga

SEQ ID NO: 15160 - protein, 376 aa, Glycine max
MKNIPLILMGCGGVGRQLLQHIVSCRSLHSTQGLCLRVVGVGDSKSLVVTEDLLHEGLNDGFLLELCRVKSVGESLLKLLDFGKCQAFVHPESQGKILEIAFQLGKKTGLVFVDCSASSDTVAVLKQAIDMGCCAVMANKKPLTSTMEDFKKLFIYPRRIRHESTVGAGLPVIASLNRIISSGDPVHQIIGSLSGTLGYVMSEVEDGKPLSQVVRDAKSLGYTEPDPRDDLGGMDVARKALILARILGHQINLDSIQIESLYPKEMGPGVMTVEDFLNRGLLLLDKDIQDRVEKAASNGNVLRYVCVIMGSRCEVGIQELPKNSPLGRLRGSDNVLEIYTRCYSKQPLVIQGAGAGNDTTAAGVLADIVDIQDLFP

SEQ ID NO: 15161 - DNA, 2751 bp, Glycine max; identical to SEQ ID NO: 797
  CDS (1)..(2751)

SEQ ID NO: 15162 - protein, 916 aa, Glycine max; identical to SEQ ID NO: 798

SEQ ID NO: 15163 - DNA, 2757 bp, Zea mays
  CDS (1)..(2757)
atgcagggcctagccgtatcatgccagcttcctcctgctgcggccgcagctcggtggcggccgcgcgcttcttcctctaatagggaagcagttttacaatgttggaagtatgaattaagtcaagaccactatttgggaggccccctaaggataggtcagtctcaaggaagtttgcacagacatcgctctacaaattttctcagaccagctgctgcagctatttcagttgaacaagatgaagtcaatacttatcttccaaaaggtgatatgtggtctgtgcacaagttcggtggaacctgtatgggaactcccaaaagaatccagtgtgttgcaaatatagttcttggtgattcttctgagaggaagctgatcattgtttccgcaatgtccaaagtaactgacatgatgtacaaccttgtacaaaaggctcagtcacgggatgattcatatgcaatagcactggcagaagtttttgagaagcatatgactgcagcaaaggatcttcttgacggagaagatcttgcaagattcttgtctcagttgcattcagacgtcagcaacttgcgagccatgctccgtgctatttatatagctgggcatgcgacagaatctttctctgactttgttgttgggcatggagagttgtggtctgcgcagatgctgtcgtatgcaataaagaagtctggggcaccctgcagttggatggatacaagagaagttctagttgtaacacccagtggttgtaatcaagtagaccctgattacttggaatgtgagaagcgacttcagaaatggttttctcgacaaccagctgagataatagttgctacaggatttattgcaagtacagctggaaacattccaacaactctaaaaagggatggaagtgatttctcagcagccatagttggttctcttgtcagggcacgccaggtcactatttggactgatgttgacggggtatttagcgcagatcctagaaaagttagtgaggctgtgatcttaagcactctgtcttaccaggaggcctgggaaatgtcatattttggggcaaatgttttgcatccgcgcaccattatacctgtgatgaaagacaacattcccattgttattaggaacatgttcaacctctctgcccctggaaccatgatttgcaagcagcctgccaatgaaaatggtgatttagacgcatgtgtcaaatcatttgctactgtcgataatttagcacttgttaatgttgaaggaactggaatggctggcgttccaggtacagcaagtgctatatttagtgctgttaaggatgttggagctaatgttatcatgatatctcaggctagcagcgaacattcagtatgctttgctgttccagaaaaggaagttgctgtagtttctgctgagttacatgataggtttcgtgaggcattagctgcagggaggctgtctaaggttgaagttattaatggttgcagcattcttgctgctgttggtctgaggatggccagcactccaggagtcagtgcaatactttttgatgcattagcaaaggcaaacattaatgttcgagcaatagctcaaggttgcagtgaatacaatattactgttgtattgaagcaacaagattgtgtaagggctctgagagctgctcactcaaggttcttcctctccaaaaccacacttgctgttgggatcattggacctggtttaattggtggagcactccttaaccagttgaagaatcagactgctgttctcaaggaaaatatgaacattgatctgcgtgtcattggaataactggctcaagtacaatgcttctgagcgacacgggaatagacttaacccagtggaaacagcttctacaaaaggaagcagaaccagctgatattggtagttttgttcatcatttatctgataatcatgtatttccgaacaaagttttggtggactgcacagcggatacaagtgtggcatcccactattacgattggttaaagaagggtattcatgtcatcacgccaaataagaaagcaaattctgggccacttgatcagtacctgaaattacggactatgcagcgtgcctcatacactcattacttttatgaagcaactgttggtgctggcctcccaatcatcagcaccttgcgaggtcttctggagacgggtgacaagatactgcgtattgagggcattttcagtggaactttgagttatatatttaacaatttcgaaggaacaagggcgtttagtgatgttgttgccgaagcaagagaggcgggatacactgaacctgacccaagggatgacctatctggaactgacgttgcccgaaaggtcgttgtcctcgcgagggaatctggtctgaggcttgaactttctgacattcctgtgaagagccttgtgccagaaacactcgcagagtcatgctcgtcagcagatgaattcatgcagaagctaccgtccttcgacgaggactgggccaggcaacgcagtgatgctgaggctgcaggcgaagtcctgcgttacgttggagcgttggatgcggtgaacaggagcggacaggtggagctacgcaggtacaggagggaccacccgttcgcgcagctctccggctccgacaacatcatcgccttcaccacgtccaggtacaaggagcagccgctgatcgtgcggggtccgggtgccggcgcggaggtgacagccggtggcgtcttctgcgacattctgcggctggcgtcttacctcggtgctccttcttga

SEQ ID NO: 15164 - protein, 918 aa, Zea mays; identical to SEQ ID NO: 630

SEQ ID NO: 15165 - DNA, 1155 bp, Zea mays
  CDS (1)..(1155)
atgccgacaccagtgaagtcggtgctccccgtggtgctcttcggctgcggcggcgtcggccgctacctcctccgccacatcgtctcctgtcgtcccctccacgccaaccagggcgtggccatccgggtggtgggcgtcgccgatagctcctccctgctcgtcgccgaagatgtccactccaccggcctcgatgacgcgctcctcacccagctctgcgccgccaagtccgcaggctctcccctctcctccctgctcggccgagggcactgtcagctgttcaagaaccctgaggctaggggcaaagtcatagacgccgctaccacacttggaagtacaactggtctggtgctagttgactgttctgcaacttatgacactgttagcctgctgaaagatgctgtggatcatggatgctgtgtcgtattggcaaacaagaaacctcttaccggtgcttatgaggattttcagaagttggtctccaacttccgtcggataagatttgaatctactgttggagcaggtttgcctgtgatagcttctgtaacccgtattattgcatctggagaccctattactcgtattgttggcagtttgagtggtacacttgggtatgtgatgagtgagcttgaggatggaaagaaatttagtgaagttgtaaaaactgccaagtctcttggctatacagaaccagatccacgtgatgatcttggtggaatggatgtggctagaaaggcattgatcctggctaggcttcttgggcaacagataagcatggagagtatcaacgttgagagtttatatcctagtgaattaggacctgatgcagtgtccacaaaggacttccttgaaagtggtttagtgcaacttgacaagagcatggaagaaagaatcagagcagcatcttcgagaggaaacgttcttcgctatgtctgtgagattgaaagcgcagggtgccaagtaggccttaaagagctcccaaaggattctgcgctgggtagattgaggggaagtgacaatgtggtcgagatatacagcagatgttatcagagctcccctctggtgatccagggcgcaggagctggcaacgacaccactgccgccggcgtccttgctgacataatcgacctccaagacctgttccagacgatggcttga

SEQ ID NO: 15166 - protein, 384 aa, Zea mays
MPTPVKSVLPVVLFGCGGVGRYLLRHIVSCRPLHANQGVAIRVVGVADSSSLLVAEDVHSTGLDDALLTQLCAAKSAGSPLSSLLGRGHCQLFKNPEARGKVIDAATTLGSTTGLVLVDCSATYDTVSLLKDAVDHGCCVVLANKKPLTGAYEDFQKLVSNFRRIRFESTVGAGLPVIASVTRIIASGDPITRIVGSLSGTLGYVMSELEDGKKFSEVVKTAKSLGYTEPDPRDDLGGMDVARKALILARLLGQQISMESINVESLYPSELGPDAVSTKDFLESGLVQLDKSMEERIRAASSRGNVLRYVCEIESAGCQVGLKELPKDSALGRLRGSDNVVEIYSRCYQSSPLVIQGAGAGNDTTAAGVLADIIDLQDLFQTMA

SEQ ID NO: 15167 - DNA, 1155 bp, Zea mays
  CDS (1)..(1155)
atgccgacaccagtgaagtcggtgctgcccgtagtgctcctcggctgcggcggcgtcggccgctacctcctccgccacatcgtctcctgccgtcccctccacgccaaccagggcgtggccatccgggtggtgggcgtcgccgatagctcctccctgctcgtcgccgaagatgtccactccaccggcctcgatgacgcgctcctcacccagctctgcgccgccaagtccgcaggctctcccctctcctccctgctcggccgagggcactgtcagctgttcaagaaccctgaggctaggggcaaagtcatagacgccgctaccacactcggaagaacaactggtctggtgctagttgactgttctgcaacttatgacactgttagcctgctgaaagatgctgtggatcatggatgctgtgtcgtattggcaaacaagaaacctcttaccggtgcttatgaggattttcagaagttggtctccaacttccgtcggataagatttgaatctactgttggagcaggtttgcctgtgatagcttctgtaacccgtattattgcatctggagaccctattactcgtattgttggcagtttgagtggtacacttgggtatgtgatgagtgagcttgaggatggaaagaaatttagtgaagttgtaaaaactgccaagtcccttggctatacagaaccagatccacgtgatgatctaggtggaatggatgtcgctagaaaggcattgatcctggctaggcttcttgggcaacagataagcatggagagtatcaatgttgagagtttatatcctagtgaattaggacctgatgcagtgtccacaaaggacttccttgaaagtggtttagtgcaacttgacaagagcatggaagaaagaatcagagcagcatcttcgagaggaaacgttcttcgctacgtctgtgagattgaaagcgcagggtgccaggtaggccttaaagagctcccaaaggattctgcgctgggtagattgaggggaagtgacaatgtggtcgagatatacagcagatgttaccagagctcccctctggtgatccagggcgcaggagctggcaacgacaccactgccgccggcgtccttgctgacataatcgatctccaagacctgttccagacgatggcttga

SEQ ID NO: 15168 - protein, 384 aa, Zea mays
MPTPVKSVLPVVLLGCGGVGRYLLRHIVSCRPLHANQGVAIRVVGVADSSSLLVAEDVHSTGLDDALLTQLCAAKSAGSPLSSLLGRGHCQLFKNPEARGKVIDAATTLGRTTGLVLVDCSATYDTVSLLKDAVDHGCCVVLANKKPLTGAYEDFQKLVSNFRRIRFESTVGAGLPVIASVTRIIASGDPITRIVGSLSGTLGYVMSELEDGKKFSEVVKTAKSLGYTEPDPRDDLGGMDVARKALILARLLGQQISMESINVESLYPSELGPDAVSTKDFLESGLVQLDKSMEERIRAASSRGNVLRYVCEIESAGCQVGLKELPKDSALGRLRGSDNVVEIYSRCYQSSPLVIQGAGAGNDTTAAGVLADIIDLQDLFQTMA

SEQ ID NO: 15169 - DNA, 26 bp, Artificial sequence
  primer
atgagcactaaagttgttaatgttgc

SEQ ID NO: 15170 - DNA, 26 bp, Artificial sequence
  primer
ctaaagtctttgagcaatcttgataa

SEQ ID NO: 15171 - protein, 388 aa, Artificial sequence
  consensus sequence
  Variant (2)..(2): Xaa in position 2 is any amino acid
  Variant (4)..(5): Xaa in position 4 to 5 is any amino acid
  Variant (7)..(28): Xaa in position 7 to 28 is any amino acid
  Variant (29)..(124): Xaa in position 29 to 124 is any or no amino acid
  Variant (126)..(131): Xaa in position 126 to 131 is any amino acid
  Variant (134)..(157): Xaa in position 134 to 157 is any amino acid
  Variant (158)..(167): Xaa in position 158 to 167 is any or no amino acid
  Variant (170)..(170): Xaa in position 170 is any amino acid
  Variant (172)..(172): Xaa in position 172 is any amino acid
  Variant (174)..(183): Xaa in position 174 to 183 is any amino acid
  Variant (184)..(184): Xaa in position 184 is any or no amino acid
  Variant (187)..(192): Xaa in position 187 to 192 is any amino acid
  Variant (194)..(196): Xaa in position 194 to 196 is any amino acid
  Variant (198)..(218): Xaa in position 198 to 218 is any amino acid
  Variant (219)..(223): Xaa in position 219 to 223 is any or no amino acid
  Variant (225)..(227): Xaa in position 225 to 227 is any amino acid
  Variant (229)..(230): Xaa in position 229 to 230 is any amino acid
  Variant (232)..(232): Xaa in position 232 is any amino acid
  Variant (235)..(236): Xaa in position 235 to 236 is any amino acid
  Variant (238)..(239): Xaa in position 238 to 239 is any amino acid
  Variant (241)..(241): Xaa in position 241 is any amino acid
  Variant (243)..(245): Xaa in position 243 to 245 is any amino acid
  Variant (247)..(248): Xaa in position 247 to 248 is any amino acid
  Variant (252)..(272): Xaa in position 252 to 272 is any amino acid
  Variant (273)..(304): Xaa in position 273 to 304 is any or no amino acid
  Variant (306)..(320): Xaa in position 306 to 320 is any amino acid
  Variant (321)..(334): Xaa in position 321 to 334 is any or no amino acid
  Variant (336)..(348): Xaa in position 336 to 348 is any amino acid
  Variant (349)..(354): Xaa in position 349 to 354 is any or no amino acid
  Variant (356)..(369): Xaa in position 356 to 369 is any amino acid
  Variant (370)..(372): Xaa in position 370 to 372 is any or no amino acid
  Variant (374)..(374): Xaa in position 374 is any amino acid
  Variant (378)..(380): Xaa in position 378 to 380 is any amino acid
  Variant (383)..(387): Xaa in position 383 to 387 is any amino acid
GXGXXGXXXXXXXXXXXXXXXXXXXXXXXXXXXXXXXXXXXXXXXXXXXXXXXXXXXXXXXXXXXXXXXXXXXXXXXXXXXXXXXXXXXXXXXXXXXXXXXXXXXXXXXXXXXXXXXXXXXXXXGXXXXXXNKXXXXXXXXXXXXXXXXXXXXXXXXXXXXXXXXXXVGXGXPXXXXXXXXXXXGDXXXXXXGXXXGXXXXXXXXXXXXXXXXXXXXXXXXXXAXXXGXXEXDPXXDXXGXDXXXKXXILAXXXXXXXXXXXXXXXXXXXXXXXXXXXXXXXXXXXXXXXXXXXXXXXXXXXXXAXXXXXXXXXXXXXXXXXXXXXXXXXXXXXVXXXXXXXXXXXXXXXXXXXNXXXXXXXXXXXXXXXXXGXGAGXXXTAXXXXXD

SEQ ID NO: 15172 - protein, 28 aa, Artificial sequence
  protein pattern
  Variant (2)..(4): Xaa in position 2 to 4 is any or no amino acid
  Variant (6)..(6): Xaa in position 6 is any amino acid
  Variant (7)..(7): Xaa in position 7 is Ala or Thr
  Variant (9)..(9): Xaa in position 9 is Ala or Pro
  Variant (12)..(12): Xaa in position 12 is any amino acid
  Variant (13)..(13): Xaa in position 13 is any or no amino acid
  Variant (15)..(15): Xaa in position 15 is Ile, Leu or Val
  Variant (16)..(16): Xaa in position 16 is Glu, Gly, Asn or Ser
  Variant (18)..(18): Xaa in position 18 is any amino acid
  Variant (20)..(22): Xaa in position 20 to 22 is any amino acid
  Variant (24)..(24): Xaa in position 24 is Ala, Gly, Ile, Leu or Val
  Variant (25)..(25): Xaa in position 25 is any amino acid
  Variant (26)..(26): Xaa in position 26 is Ile, Leu or Val
  Variant (27)..(27): Xaa in position 27 is Ile, Leu, Met or Val
  Variant (28)..(28): Xaa in position 28 is Ala, Gly, Ser or Val
AXXXGXXEXDPXXDXXGXDXXXKXXXXX

SEQ ID NO: 15173 - protein, 20 aa, Artificial sequence
  protein pattern
  Variant (2)..(2): Xaa in position 2 is any amino acid
  Variant (3)..(4): Xaa in position 3 to 4 is any or no amino acid
  Variant (6)..(6): Xaa in position 6 is any amino acid
  Variant (10)..(11): Xaa in position 10 to 11 is any amino acid
  Variant (12)..(12): Xaa in position 12 is Pro, Thr or Val
  Variant (15)..(15): Xaa in position 15 is any amino acid
  Variant (16)..(16): Xaa in position 16 is Ala or Gly
  Variant (17)..(17): Xaa in position 17 is Ala, Ile, Leu or Val
  Variant (18)..(18): Xaa in position 18 is any amino acid
  Variant (19)..(19): Xaa in position 19 is Ala, Cys, Asp, Gly, Ser or Thr
LXXXGXGAGXXXTAXXXXXD

SEQ ID NO: 15174 - protein, 18 aa, Artificial sequence
  protein pattern
  Variant (2)..(3): Xaa in position 2 to 3 is Ala or Gly
  Variant (5)..(5): Xaa in position 5 is Ile, Leu or Val
  Variant (7)..(7): Xaa in position 7 is Ile, Leu or Val
  Variant (8)..(10): Xaa in position 8 to 10 is any amino acid
  Variant (11)..(11): Xaa in position 11 is Ile, Leu, Met or Val
  Variant (12)..(16): Xaa in position 12 to 16 is any amino acid
  Variant (17)..(17): Xaa in position 17 is Ala, Gly, Ser or Thr
  Variant (18)..(18): Xaa in position 18 is Gly or Asn
VXXGXPXXXXXXXXXXXX

SEQ ID NO: 15175 - DNA, 309 bp, Saccharomyces cerevisiae
  CDS (1)..(309)
atgtttttgttttgttttgttttgttttgtagtttagtttttcccttggctcgaggcgttttcgcgtggcataacccggccggaaactacggtgatattatcgtctggcacatatatatatatatatatgtaaactatacttatattaatagtttccgatcgtcttattactcacttactatcaatggaagcactatttcattacttaaaaaatactttctattgcaggatctgaaacagtcagttataatggaaaaagtatgcaattgtgttttcttaaagaaggatacagatatttatatatgttag

SEQ ID NO: 15176 - protein, 102 aa, Saccharomyces cerevisiae
MFLFCFVLFCSLVFPLARGVFAWHNPAGNYGDIIVWHIYIYIYVNYTYINSFRSSYYSLTINGSTISLLKKYFLLQDLKQSVIMEKVCNCVFLKKDTDIYIC

SEQ ID NO: 15177 - DNA, 29 bp, Artificial sequence
  primer
atgtttttgttttgttttgttttgttttg

SEQ ID NO: 15178 - DNA, 28 bp, Artificial sequence
  primer
ctaacatatataaatatctgtatccttc

SEQ ID NO: 15179 - DNA, 342 bp, Saccharomyces cerevisiae
  CDS (1)..(342)
atggaaaatatagcattcatttgtcttcagagctgcacaagaggtatatacggctgccaattttatagcgctacattggaaaattatcataacatatcatttccaatatttctattgcagaccaccttatttaatcactgtatctctttaaactggtctaaagctgtgtttaatcgtattaagaggcgaaagtacatgatggaactgaaaaagcactgttacaattaccaggtgagtaggataggaaatcggaaaaaaaatgggtgcttctttctaaaaatggccaacaacagagttttctcagtcaaaaatagcccaagattattgctcttctttatataa

SEQ ID NO: 15180 - protein, 113 aa, Saccharomyces cerevisiae
MENIAFICLQSCTRGIYGCQFYSATLENYHNISFPIFLLQTTLFNHCISLNWSKAVFNRIKRRKYMMELKKHCYNYQVSRIGNRKKNGCFFLKMANNRVFSVKNSPRLLLFFI

SEQ ID NO: 15181 - DNA, 27 bp, Artificial sequence
  primer
atggaaaatatagcattcatttgtctt

SEQ ID NO: 15182 - DNA, 27 bp, Artificial sequence
  primer
ttatataaagaagagcaataatcttgg

SEQ ID NO: 15183 - DNA, 444 bp, Saccharomyces cerevisiae
  CDS (1)..(444)
atgaaggagaaaagtgttctagaaatatgttttagttctaagtatcgttgtctggagcaagcaaagaaaagcagacctgtatgtgcaactttcctgttttccattaaaatctcaagaaccgaccccttgactgtgctcatatatcaagtatcggttttaaagtcccctaattgtgataattgcaagaacgacagtcagaaagatatttttttttttctttctctttacctatcctccataaaaatacctatgctgatactgaatatcttcatttgcagctatgcaatatttcagataccccattttacccaagagtttcttactggtggttggattttctttaagacgagaagattaccagtcctggatgttcgtgaatgtgcctattgcgtcatcagcgactccgcgccaagaaaagaaatactcgcatgctcggatttatag

SEQ ID NO: 15184 - protein, 147 aa, Saccharomyces cerevisiae
MKEKSVLEICFSSKYRCLEQAKKSRPVCATFLFSIKISRTDPLTVLIYQVSVLKSPNCDNCKNDSQKDIFFFLSLYLSSIKIPMLILNIFICSYAIFQIPHFTQEFLTGGWIFFKTRRLPVLDVRECAYCVISDSAPRKEILACSDL

SEQ ID NO: 15185 - DNA, 26 bp, Artificial sequence
  primer
atgaaggagaaaagtgttctagaaat

SEQ ID NO: 15186 - DNA, 25 bp, Artificial sequence
  primer
ctataaatccgagcatgcgagtatt

SEQ ID NO: 15187 - DNA, 666 bp, Glycine max
  CDS (1)..(666)
atggaaactcaacaccaacaacccaccatcaagtctaggttcagacgcatctgtgtctactgtggtagcagccctggcaaaaaccccagctaccagctcgctgctattcaactcggaaaacaactggtggagaggaacattgacttggtttatggaggaggaagcatagggttgatgggtctaatctcacaagttgtgtatgatggtggacgccacgtgttaggggtgattccagagacacttaatgcaagagagataactggagagagtgttggagaagtgagagctgtatcgggcatgcaccaacgcaaagccgaaatggcccgacaagccgatgcatttattgcactgccaggtggatatggcacccttgaagaactactggaaattatcacctgggctcaactaggcatccatgataaaccggtggggttgttgaacgtggatgggtactacaactcgctgctggcattcatggacaaagctgtggacgaaggtttcgtaacaccagctgcccgtcacattattgtttctgcccacactgcccaagaactcatgtgcaaacttgaggaatatgtccccgagcactgtggcgtggcccccaagctaagttgggagatggagcaacagttagttaacactgcaaagtcagatatttcccgttga

SEQ ID NO: 15188 - protein, 221 aa, Glycine max; identical to SEQ ID NO: 88

SEQ ID NO: 15189 - DNA, 1112 bp, Oryza sativa
  CDS (122)..(874)
gttgagcaaagccatgctgtagtgggatctctctccatccattcctgcagtgccgccactgctatagctgcgagagctatagctagaaaaatatcaacgtaggaagtgggaggagaagtagatgatggatacagatcacactgagataattaaggagggagaggcagtagtggaagccatggctctactccagtctcggttcaggaggatatgcgtcttctgcgggagcagccagggcaagaagaagagctaccaggacgcagccgttgagcttggcaaggagctggtagcaaggaacattgatctagtgtatggtggaggaggtgtggggctcatgggcctggtctctcaagctgtctacaatggagggaggcatgttattggggtgattcccaagactcttatgcctagagagattacgggtgagacagtaggggaggtgaaagcagtggcagatatgcatcagaggaaggctgagatggccaggcaatctgatgcgttcatagcactgcctggtgggtatggaacacttgaagagctcctggaagtaattgcctgggctcagctcggcattcacgacaagccggttggcctgctaaatgtggacggctactacaactctctgctgtcgttcatcgataaagctgtggaggaagagttcatcagcccctctgcgcgccatatcatcgtgttagctccaacaccaaaagaacttctcgagaagctagaggcgtactcccctcggcatgacaaggtcgtgccgaagatgcagtgggagatggagaagatgagctactgcaagagctgcgagatccctggcctgaaagaaggcaacaaggcgaccatccaagcacagcgaggaagcatgctctgaaatttactgtagcactagctagctatagcttagccaatgcgtgcagcaagaagattcaaaacttcttggtgcacatgaactgcaacttttaattcatgtaactcggttcattagaaggcaattgatcactgatcatgcaattagtcgtgtacgtagccctaagaatgaaatcatcagtaagatttgtaaatcacagagctccagagcagcagactgacataaaacgatatgtgggctt

SEQ ID NO: 15190 - protein, 250 aa, Oryza sativa
MMDTDHTEIIKEGEAVVEAMALLQSRFRRICVFCGSSQGKKKSYQDAAVELGKELVARNIDLVYGGGGVGLMGLVSQAVYNGGRHVIGVIPKTLMPREITGETVGEVKAVADMHQRKAEMARQSDAFIALPGGYGTLEELLEVIAWAQLGIHDKPVGLLNVDGYYNSLLSFIDKAVEEEFISPSARHIIVLAPTPKELLEKLEAYSPRHDKVVPKMQWEMEKMSYCKSCEIPGLKEGNKATIQAQRGSML

SEQ ID NO: 15191 - DNA, 1006 bp, Oryza sativa; identical to SEQ ID NO: 71
  CDS (84)..(719)

SEQ ID NO: 15192 - protein, 211 aa, Oryza sativa; identical to SEQ ID NO: 72

SEQ ID NO: 15193 - DNA, 1043 bp, Glycine max
  CDS (150)..(797)
accactccaattcttctacttaactagcataaaaatcacgtttgcaattctgcgtgttctttccccacccttcattatacgtacatattcatccacccaccctctagctaccaataaaattgttcactttcactaattaattttatagtatggaaattgaagagcaaacgatgaaaatgatgatgaagtcgtcgtctaggttcagacgtatctgtgttttctgtggcaccagccctggcaagaaccccagctaccaactcgctgccatccaactcgccaaacaacttgtggagaggaacatcgacttggtttatggaggagggagcattgggttgataggtttaatctcacaagttgtgtttgatggtggacgccacgtgttaggggtgattccaacaactcttatgccaagagagataacgggggaaagtgtcggagaagtgagagcagtgtcaggcatgcaccaacgcaaggcagaaatggcgagacaagccgatgcatttattgcgctgccaggtggatatggcaccctggaagaactgcttgaagtgatcacctgggctcaactaggaatccacgataaacccgtggggttgttgaacgtggatgggtactacaactcgttgctgtcatcccacgcgtccgctgtagacgaaggtttcattacacccgctgcccgtcacattattgtctctgcccaaactgcccaagatctcatgtgcaagcttgaggaatatgtcccgaagcactgtggcgtggcaccaaagcaaagttgggagatgaaccaacagttataaaaaagttaacactgcaaattaccaaattcagatacttgtcgttaaccaagtcgaatctacatattttctctaccccattagaaaatagctttctcaatacaaatcaagccttttttggctgacactgtgtaattgcggatcagaatctgatctgtatgatcaaagaacgtaacactagaaaacttccatcattaattgttggcgcccactagattctgtgttatatagtaaagcttgcttcagtgc

SEQ ID NO: 15194 - protein, 215 aa, Glycine max
MEIEEQTMKMMMKSSSRFRRICVFCGTSPGKNPSYQLAAIQLAKQLVERNIDLVYGGGSIGLIGLISQVVFDGGRHVLGVIPTTLMPREITGESVGEVRAVSGMHQRKAEMARQADAFIALPGGYGTLEELLEVITWAQLGIHDKPVGLLNVDGYYNSLLSSHASAVDEGFITPAARHIIVSAQTAQDLMCKLEEYVPKHCGVAPKQSWEMNQQL

SEQ ID NO: 15195 - DNA, 1109 bp, Glycine max; identical to SEQ ID NO: 73
  CDS (194)..(853)

SEQ ID NO: 15196 - protein, 219 aa, Glycine max; identical to SEQ ID NO: 74

SEQ ID NO: 15197 - DNA, 1234 bp, Glycine max
  CDS (283)..(942)
ctggtcccgtcgaggaagaacgagtgagtgtgtagttgaaagaatgctatgttgatgatgacacatggatgatggatcatggatcatggatcatggatggatgattaagatttttcttcaacacaagggaaggtagcaaatagaaaaaagcacctcaatttgtgaaagcattgcttgcagtacataagcactaacaacacagtgtgtggatatatctattacatataaactaggtagcgtagtagtactattattactaaacttgttacatcaaaaaaacaaatggagacacacgctgagataagggtgtcaaagttcaagagggtttgtgtcttctgtggtagtagccctggcaaaaagagaagctaccaagatgctgccattgaacttggcaatgaattggtctcaaggaacattgatctggtctatggaggaggaagcattggtttgatgggtttggtttcccaagctgttcatgatggtggtaggcatgtcataggagttattcccaagacactcatgcctcgagagctaactggtgaaacagtgggagaagtaaaagctgtagctgatatgcaccaaaggaaggcagagatggctaagcattcagatgcctttattgccttaccaggtggttatgggactctagaggagcttcttgaagtcataacctgggctcaacttgggatccatgacaaaccggtgggattggtaaatgttgatggatacttcaattcattgctatcatttattgacaaagctgtagaggagggatttattagtcctaatgcccgccacattattgtgtcagcaccaacatcaaaagagttagtaaagaaattggaggattacgttccgtgtcatgaaagtgttgcttctaagttgagctggcagatagaacaacaactcacttaccctgaagagtatgacatctcgaggtagctgaatttgcttcaagggcacggaagatgacactagatagaattttggaggtggaagaagctaggctggaatatcagtattctgtttttgtttttacttttaaagaaaaaaaaagaaaagaaatttcttttgtaaagtactgggattgatctggatatgtgaaattactttgttcccttgtgaaactgatttccttttaagttgtaagtattaggggcttctcaacttattactctacctacctcaactaattttaattttaaatgatatttaatgtactttgactttaaaa

SEQ ID NO: 15198 - protein, 219 aa, Glycine max
METHAEIRVSKFKRVCVFCGSSPGKKRSYQDAAIELGNELVSRNIDLVYGGGSIGLMGLVSQAVHDGGRHVIGVIPKTLMPRELTGETVGEVKAVADMHQRKAEMAKHSDAFIALPGGYGTLEELLEVITWAQLGIHDKPVGLVNVDGYFNSLLSFIDKAVEEGFISPNARHIIVSAPTSKELVKKLEDYVPCHESVASKLSWQIEQQLTYPEEYDISR

SEQ ID NO: 15199 - DNA, 1484 bp, Oryza sativa
  CDS (1)..(1143)
atgaggcagtcgaggttcaagaggatctgcgtcttctgcggcagcagccaggggaagaagaggagctaccatgacgccgccattgagctcggcaacgagctggtggcgaggagcatagacctggtgtacggcggcggcagcatcggcctcatggggctcgtctctcaggcggtcttcgacggcggccgccacgtcatcggggtcattcccaagactctcatgacgccagaggacggagggagtatattatgtaggaataatgtattgttggttctcatcggcatgatgattgctgattgcaaaaaccaaatcatggttcattgtttctggcagataagtggtgagacagtgggggaggtgaggccagttgctgatatgcaccaaaggaaggcagagatggcaaggcagtctgatgccttcatagccctacctggagggtacgggactctggaggagctgctcgaggtgattacatgggcacagcttggcatccatcataagccggttgggctgctcaacgtcgacgggtactacaactcgctgctgacgttcatcgacaaggcggtggaggaagggttcatcaacaccagcgcgcggcggatcatcgtcatggcgccgacggcggaggagctgatggacaagctagaggagtacgtgccttaccacgacagggtggcatcgaagctgaactgggagatgggccacctagaagtagagacccgtggatgggtggatgctgaggccggattcgattggcttgattcggggctcctcgatgggcgacacgccgcctgtgcagggaagcttattgcaaacttgattgtcatgggctctgggattataggaagagctatgctccaagcataccggaaagcacttgataatgcaaataaaactggtgtggcccatgaaacaattaataacattcgtagagccagcaaaacaatgactgagcaagaagctaggcagatactcggtgtatctgagcagtcaacttgggaagagattgcacagcgctatgataatttatttgaaagaaatgcaaaatctgggagcttttatcttcagtcgaaggtccaccgagcaaaggaatgcctagagaatgtgtaccaaaagaataagcaagatggaacaccaccttgaaatttgcagtccttgaaaaatcatcttttcagatatattctttcccactcataagagaagtgtacataccagaattggtcgctgctgttgtatcattacacgtaggggaatcaataagaatcaaagtgcagcgagaccttgggaattgtggaaaactgttttatgaggtttcaataaactctagcatgaagtacggttttggtccttttgatttgaccttgggaaacaatgcaaattttgtcatcttggtggctgctagttaggtttaaacatttgaacatgtactgtccctcatcaaagtttggcattgcagttaggctgccagatggaccaatgttgaa

SEQ ID NO: 15200 - protein, 380 aa, Oryza sativa
MRQSRFKRICVFCGSSQGKKRSYHDAAIELGNELVARSIDLVYGGGSIGLMGLVSQAVFDGGRHVIGVIPKTLMTPEDGGSILCRNNVLLVLIGMMIADCKNQIMVHCFWQISGETVGEVRPVADMHQRKAEMARQSDAFIALPGGYGTLEELLEVITWAQLGIHHKPVGLLNVDGYYNSLLTFIDKAVEEGFINTSARRIIVMAPTAEELMDKLEEYVPYHDRVASKLNWEMGHLEVETRGWVDAEAGFDWLDSGLLDGRHAACAGKLIANLIVMGSGIIGRAMLQAYRKALDNANKTGVAHETINNIRRASKTMTEQEARQILGVSEQSTWEEIAQRYDNLFERNAKSGSFYLQSKVHRAKECLENVYQKNKQDGTPP

SEQ ID NO: 15201 - DNA, 1385 bp, Sorghum bicolor; identical to SEQ ID NO: 75
  CDS (250)..(957)

SEQ ID NO: 15202 - protein, 235 aa, Sorghum bicolor; identical to SEQ ID NO: 76

SEQ ID NO: 15203 - DNA, 1172 bp, Zea mays; identical to SEQ ID NO: 77
  CDS (221)..(847)

SEQ ID NO: 15204 - protein, 208 aa, Zea mays; identical to SEQ ID NO: 78

SEQ ID NO: 15205 - DNA, 957 bp, Brassica napus; identical to SEQ ID NO: 81
  CDS (68)..(742)

SEQ ID NO: 15206 - protein, 224 aa, Brassica napus; identical to SEQ ID NO: 82

SEQ ID NO: 15207 - DNA, 969 bp, Brassica napus; identical to SEQ ID NO: 83
  CDS (49)..(696)

SEQ ID NO: 15208 - protein, 215 aa, Brassica napus; identical to SEQ ID NO: 84

SEQ ID NO: 15209 - DNA, 941 bp, Glycine max
  CDS (29)..(730)
ctcaaactcaagctagcctttgggggatatgatagagaagaagacacagtgtgagaaaaaggaaaaaatggaaggtgaagaaactgagatgaaacaacaatccaggttcaaaaggatttgtgtgttctgtggcagcagccctgggaacaagagtagctataaggacgctgctattgagcttgggaaagagttggtgtcaagaaatattgatctggtttatggaggaggaagcattggtttgatggggttggtttcccaggctgtttatgaaggaggtcgccatgtaattggagttattcccaagacactgatgccaagagagattactggagagacagtgggggaagtgatggcagtagcagacatgcatcaaagaaaagcagagatggctaagcactctgatgcctttattgccttgcccggtggctatgggactcttgaggagcttctagaggtgataacttgggctcagcttggcatccatgataaaccggtggggttgctgaatgtagatggatactacaattccttgttgtgtttcattgacaaagctgtggaagaaggcttcattagccccaaagctcgccacataattgtatctgccccatcaacaaaagagcttgtcaaaaagatggaggaatattttccacaacatgaaagagttgcctctaagctaagctgggaaactgagcagatagattactcctcaaattgtggcatgtctaggtgattagatgattatggaagaatcgtgtagagacatttgttagtttaatggtttaagagactactactactattatggccacaatttcctttcttttattatgctattgcatttacttgttagtgtaaactacagagctgacttcaatctagctgtgaagcctaactactcttctgctcaatgtgaattctggttttttcaaaaaaaaaaaaaa

SEQ ID NO: 15210 - protein, 233 aa, Glycine max; identical to SEQ ID NO: 70

SEQ ID NO: 15211 - DNA, 849 bp, Brassica napus; identical to SEQ ID NO: 89
  CDS (64)..(705)

SEQ ID NO: 15212 - protein, 213 aa, Brassica napus; identical to SEQ ID NO: 90

SEQ ID NO: 15213 - DNA, 1176 bp, Glycine max; identical to SEQ ID NO: 91
  CDS (106)..(747)

SEQ ID NO: 15214 - protein, 213 aa, Glycine max; identical to SEQ ID NO: 92

SEQ ID NO: 15215 - DNA, 873 bp, Triticum aestivum; identical to SEQ ID NO: 95
  CDS (25)..(645)

SEQ ID NO: 15216 - protein, 206 aa, Triticum aestivum; identical to SEQ ID NO: 96

SEQ ID NO: 15217 - DNA, 930 bp, Hordeum vulgare; identical to SEQ ID NO: 97
  CDS (34)..(708)

SEQ ID NO: 15218 - protein, 224 aa, Hordeum vulgare; identical to SEQ ID NO: 98

SEQ ID NO: 15219 - DNA, 570 bp, Glycine max; identical to SEQ ID NO: 99
  CDS (1)..(570)

SEQ ID NO: 15220 - protein, 189 aa, Glycine max; identical to SEQ ID NO: 100

SEQ ID NO: 15221 - DNA, 675 bp, Hordeum vulgare; identical to SEQ ID NO: 101
  CDS (1)..(675)

SEQ ID NO: 15222 - protein, 224 aa, Hordeum vulgare; identical to SEQ ID NO: 102

SEQ ID NO: 15223 - DNA, 579 bp, Klebsiella pneumoniae subsp. pneumoniae MGH 78578; identical to SEQ ID NO: 105
  CDS (1)..(579): transl_table=11

SEQ ID NO: 15224 - protein, 192 aa, Klebsiella pneumoniae subsp. pneumoniae MGH 78578; identical to SEQ ID NO: 106

SEQ ID NO: 15225 - DNA, 609 bp, Xanthobacter autotrophicus Py2
  CDS (1)..(609): transl_table=11
atggctagaatcgaaagtgtgtgcgtctattgcggctccgcatccggctcggatccgctgttcgccgaggaagcgcgccggttcggacagatcctcgcggccgaaggggtgcgcctcgtctatggcggcggcggcatcgggctgatgggcgaggtcgcgagcgccactgcgctggccggcggggcggtcaccggcatcatcccgcgcttcctcatgaaccgggagcgcgccttcgcccatgaggcggagatgatcgtggtggaggacatgcacgcccgcaagcggctcatgttcgagcgggcggacgccttcgtggccctgcccggcggggtcggcaccctagaggagctggtggaacagctgacctgggcgcagctgggccgtcaccgcaagcccatcctcatcgccaatacgtcaggcttctgggatccgttcctgagcctgatcgagcatatgcggtccacggccttcatccgcgacacgacgccggtggagatcctgtccgccgatcgggtggaagacatcctgccgcggctgcgggaagcggcggccgccgtgcccgagcgcgcgcttcacgcggcggacggcgaactggccgaccgcatgtga

SEQ ID NO: 15226 - protein, 202 aa, Xanthobacter autotrophicus Py2
MARIESVCVYCGSASGSDPLFAEEARRFGQILAAEGVRLVYGGGGIGLMGEVASATALAGGAVTGIIPRFLMNRERAFAHEAEMIVVEDMHARKRLMFERADAFVALPGGVGTLEELVEQLTWAQLGRHRKPILIANTSGFWDPFLSLIEHMRSTAFIRDTTPVEILSADRVEDILPRLREAAAAVPERALHAADGELADRM

SEQ ID NO: 15227 - DNA, 693 bp, Oryza sativa (japonica cultivar-group); identical to SEQ ID NO: 107
  CDS (1)..(693)

SEQ ID NO: 15228 - protein, 230 aa, Oryza sativa (japonica cultivar-group); identical to SEQ ID NO: 108

SEQ ID NO: 15229 - DNA, 1062 bp, Oryza sativa (japonica cultivar-group); identical to SEQ ID NO: 109
  CDS (1)..(1062)

SEQ ID NO: 15230 - protein, 353 aa, Oryza sativa (japonica cultivar-group); identical to SEQ ID NO: 110

SEQ ID NO: 15231 - DNA, 612 bp, Mesorhizobium loti MAFF303099
  CDS (1)..(612): transl_table=11
atgaacacgattcgatccgtctgcgtttattgcggctcgtctccgggccgcaatgaaatctatgcgaaggccgggcacctgcttggacgctcgattgccaaagcgggcctgcggctggtctatggcggcggcaccaaaggcattatgggcgccgtcgcagaaggcgcgctcaaggccggcggcaaggtgaccggcatcattccccgcttcctgatcaacagggaagcaaccgaaaccgcgctcgaccggctcgacgagttgctgatcaccgacaacatgcacgagcgcaagcacaagatgttcgagaaatccgacgcctttgtggcgctgcctggcggcatcggcacagtcgaggaaatcgtcgagatcatgacctgggcgcaactcggccatcaccgcaagccgatcgtcttcgccaatatcaacggattctgggatccgatgacggcgttgcttgatcatatgacggcggagggcttcatccacaccgcgcagcgggtcaagccgctggtcgtcaacgatccggaggccatcgtcgccgccatcatggtggcaggctcttccgtcgacgccccgaccgagggcgtgcagtcggtgatcgacaagatgtag

SEQ ID NO: 15232 - protein, 203 aa, Mesorhizobium loti MAFF303099
MNTIRSVCVYCGSSPGRNEIYAKAGHLLGRSIAKAGLRLVYGGGTKGIMGAVAEGALKAGGKVTGIIPRFLINREATETALDRLDELLITDNMHERKHKMFEKSDAFVALPGGIGTVEEIVEIMTWAQLGHHRKPIVFANINGFWDPMTALLDHMTAEGFIHTAQRVKPLVVNDPEAIVAAIMVAGSSVDAPTEGVQSVIDKM

SEQ ID NO: 15233 - DNA, 642 bp, Arabidopsis thaliana; identical to SEQ ID NO: 111
  CDS (1)..(642)

SEQ ID NO: 15234 - protein, 213 aa, Arabidopsis thaliana; identical to SEQ ID NO: 112

SEQ ID NO: 15235 - DNA, 648 bp, Arabidopsis thaliana; identical to SEQ ID NO: 113
  CDS (1)..(648)

SEQ ID NO: 15236 - protein, 215 aa, Arabidopsis thaliana; identical to SEQ ID NO: 114

SEQ ID NO: 15237 - DNA, 648 bp, Arabidopsis thaliana; identical to SEQ ID NO: 115
  CDS (1)..(648)

SEQ ID NO: 15238 - protein, 215 aa, Arabidopsis thaliana; identical to SEQ ID NO: 116

SEQ ID NO: 15239 - DNA, 654 bp, Arabidopsis thaliana; identical to SEQ ID NO: 117
  CDS (1)..(654)

SEQ ID NO: 15240 - protein, 217 aa, Arabidopsis thaliana; identical to SEQ ID NO: 118

SEQ ID NO: 15241 - DNA, 651 bp, Agrobacterium tumefaciens str. C58; identical to SEQ ID NO: 121
  CDS (1)..(651): transl_table=11

SEQ ID NO: 15242 - protein, 216 aa, Agrobacterium tumefaciens str. C58; identical to SEQ ID NO: 122

SEQ ID NO: 15243 - DNA, 618 bp, Sinorhizobium meliloti 1021
  CDS (1)..(618): transl_table=11
atgaacaaggaaaccacgccgattctatccgtttgcgtttattgcggttctcagcccgggcgtgacgacgcccacatccaggccggccgcaccctcggcaaatcgatcgccgatcatggcctgcgcctcgtctatggcggcggcacgcgcgggatcatgggcgccgtggcaagcggcgtgctttcatccggcggacacgtcaccggcatcattccggaattcctgatggacaaggaagcgacgcgtcactcgctgggccagctgaacgaactgatcgttaccgccgacatgcatgagcgcaagcacaagatgttcgagcgcgccgacgccttcgtcgcccttccgggcgggatcggcacgctcgaggagatcgtcgaaatcatgacctgggcgcagctcggccgccacaggaagccgatggtcttcggcaatgtcaacggcttctgggatccgatgctggagctgatcgaccacatgcgcgaccagggattcgtccacacggcgcatctcgtgcagccgctggtgatcgaccgggcggaagacatcgtccccggcatccttgcctcggttcgcgccaacgggcgcgagggcgaagccgagatcatctccaggctctga

SEQ ID NO: 15244 - protein, 205 aa, Sinorhizobium meliloti 1021
MNKETTPILSVCVYCGSQPGRDDAHIQAGRTLGKSIADHGLRLVYGGGTRGIMGAVASGVLSSGGHVTGIIPEFLMDKEATRHSLGQLNELIVTADMHERKHKMFERADAFVALPGGIGTLEEIVEIMTWAQLGRHRKPMVFGNVNGFWDPMLELIDHMRDQGFVHTAHLVQPLVIDRAEDIVPGILASVRANGREGEAEIISRL

SEQ ID NO: 15245 - DNA, 585 bp, Ralstonia solanacearum GMI1000; identical to SEQ ID NO: 123
  CDS (1)..(585): transl_table=11

SEQ ID NO: 15246 - protein, 194 aa, Ralstonia solanacearum GMI1000; identical to SEQ ID NO: 124

SEQ ID NO: 15247 - DNA, 666 bp, Brucella melitensis 16M
  CDS (1)..(666): transl_table=11
ttgatccaccgaagccgcaagccctgcttgacgcccggtgcacaaaggctcaaaaaaagccctatgtccgagattcgatccatttgtgtttattgcggctcttccataggccagaaccctctttatcgtgaagcggggctggcgcttggccgctccattgccgaacatggcatccgcctcgtctatggtggcggcacacgcggcatcatgggcgcggtggcgcagggcgtgatggaggccggcggcgaagtcaccggcatcatcccgaccttcctgctcgacaaggaagcaagctttgagcgcgcgaaagaactgagcgaacttattatcgtcgacgatatgcatgagcgcaagcacctgatgttccagcgctctgacgctttcgtgacacttcccggcggcatcggcacggtggaagagatcgtggaaatgatgacctgggcgcaacttggcaaacaccgcaagccgatggttttcgccaatatcaacaatttctggcagccgatgctggcacttctcgaccatatgcgtgcggaaggcttcatccataccgcccatcaggttcagccgctgatcgtggacaaggcggaagatatcgtccccgccatcatcgccgccaatggccgcaggaaagcaggcgatctggagattatcgggaagatgtga

SEQ ID NO: 15248 - protein, 221 aa, Brucella melitensis 16M
MIHRSRKPCLTPGAQRLKKSPMSEIRSICVYCGSSIGQNPLYREAGLALGRSIAEHGIRLVYGGGTRGIMGAVAQGVMEAGGEVTGIIPTFLLDKEASFERAKELSELIIVDDMHERKHLMFQRSDAFVTLPGGIGTVEEIVEMMTWAQLGKHRKPMVFANINNFWQPMLALLDHMRAEGFIHTAHQVQPLIVDKAEDIVPAIIAANGRRKAGDLEIIGKM

SEQ ID NO: 15249 - DNA, 642 bp, Arabidopsis thaliana; identical to SEQ ID NO: 127
  CDS (1)..(642)

SEQ ID NO: 15250 - protein, 213 aa, Arabidopsis thaliana; identical to SEQ ID NO: 128

SEQ ID NO: 15251 - DNA, 687 bp, Arabidopsis thaliana; identical to SEQ ID NO: 129
  CDS (1)..(687)

SEQ ID NO: 15252 - protein, 228 aa, Arabidopsis thaliana; identical to SEQ ID NO: 130

SEQ ID NO: 15253 - DNA, 588 bp, Corynebacterium glutamicum ATCC 13032; identical to SEQ ID NO: 131
  CDS (1)..(588): transl_table=11

SEQ ID NO: 15254 - protein, 195 aa, Corynebacterium glutamicum ATCC 13032; identical to SEQ ID NO: 132

SEQ ID NO: 15255 - DNA, 687 bp, Xanthomonas campestris pv. campestris str. ATCC 33913; identical to SEQ ID NO: 133
  CDS (1)..(687): transl_table=11

SEQ ID NO: 15256 - protein, 228 aa, Xanthomonas campestris pv. campestris str. ATCC 33913; identical to SEQ ID NO: 134

SEQ ID NO: 15257 - DNA, 570 bp, Oceanobacillus iheyensis HTE831; identical to SEQ ID NO: 137
  CDS (1)..(570): transl_table=11

SEQ ID NO: 15258 - protein, 189 aa, Oceanobacillus iheyensis HTE831; identical to SEQ ID NO: 138

SEQ ID NO: 15259 - DNA, 603 bp, Brucella suis 1330
  CDS (1)..(603): transl_table=11
atgtccgagattcgatccatttgtgtttattgcggctcttccacaggccagaactctctttatcgtgaagcggggctggcgcttggccgctccattgccgaacatggcatccgcctcgtctatggtggcggcacacgcggcatcatgggcgcggtggcgcagggcgtgatggaggccggcggcgaagtcaccggcatcatcccgaccttcctgctcgacaaggaagcaagccttgagcgcgcgaaagaactgagcgaacttattatcgtcgacgatatgcatgagcgcaagcacctgatgttccagcgctctgacgctttcgtgacacttcccggcggcatcggcacggtggaagagatcgtggaaatgatgacctgggcgcaacttggcaaacaccgcaagccgatggttttcgccaatatcaacaatttctggcagccgatgctggcacttctcgaccatatgcgtgcggaaggcttcatccataccgcccatcaggttcagccgctgattgtggacaaggcggaagatatcgtccccgccatcatcgccgccaatggccgcaggaaagcaggcgatctggagattatcgggaagatgtga

SEQ ID NO: 15260 - protein, 200 aa, Brucella suis 1330
MSEIRSICVYCGSSTGQNSLYREAGLALGRSIAEHGIRLVYGGGTRGIMGAVAQGVMEAGGEVTGIIPTFLLDKEASLERAKELSELIIVDDMHERKHLMFQRSDAFVTLPGGIGTVEEIVEMMTWAQLGKHRKPMVFANINNFWQPMLALLDHMRAEGFIHTAHQVQPLIVDKAEDIVPAIIAANGRRKAGDLEIIGKM

SEQ ID NO: 15261 - DNA, 588 bp, Pseudomonas putida KT2440; identical to SEQ ID NO: 139
  CDS (1)..(588): transl_table=11

SEQ ID NO: 15262 - protein, 195 aa, Pseudomonas putida KT2440; identical to SEQ ID NO: 140

SEQ ID NO: 15263 - DNA, 615 bp, Bradyrhizobium japonicum USDA 110; identical to SEQ ID NO: 141
  CDS (1)..(615): transl_table=11

SEQ ID NO: 15264 - protein, 204 aa, Bradyrhizobium japonicum USDA 110; identical to SEQ ID NO: 142

SEQ ID NO: 15265 - DNA, 576 bp, Enterococcus faecalis V583
  CDS (1)..(576): transl_table=11
atgtttgtgaaaaaaatggcagtatattgtggcgccagtctggggaatgagccaatctatcagcaagctgcagtagcgttagccgcttggatgaaagaaaatcactatgatctagtttatggcggtggcaatgttggtctaatgggtacggtggctgacacgcttttagcagaaggtggagaggtaattggtgtcatgcccacttttttaatggaacgagagattgcacataatggcattacaaagatgcatacagtcagtgatatgcatgcgcgtaagaaaaagatgattgaattggcagatgtgtatttagctttacccggtggtcccggcacgctagaagaaattagcgaggtgatctcttggggccgagtcggtgaacatatgaatccttgtattttatacaacgtgaatggttactatgatttactagctgctttttttgataaaatggtagaaactaatttcttaacagaagcggatcgagctaaaattttcatttcagattccttagaagaaattggtgcatttattgattcctatgaaccgccaatgattcgtcaatacaaaaaataa

SEQ ID NO: 15266 - protein, 191 aa, Enterococcus faecalis V583
MFVKKMAVYCGASLGNEPIYQQAAVALAAWMKENHYDLVYGGGNVGLMGTVADTLLAEGGEVIGVMPTFLMEREIAHNGITKMHTVSDMHARKKKMIELADVYLALPGGPGTLEEISEVISWGRVGEHMNPCILYNVNGYYDLLAAFFDKMVETNFLTEADRAKIFISDSLEEIGAFIDSYEPPMIRQYKK

SEQ ID NO: 15267 - DNA, 579 bp, Bacillus cereus ATCC 14579; identical to SEQ ID NO: 143
  CDS (1)..(579): transl_table=11

SEQ ID NO: 15268 - protein, 192 aa, Bacillus cereus ATCC 14579; identical to SEQ ID NO: 144

SEQ ID NO: 15269 - DNA, 588 bp, Bordetella pertussis Tohama I
  CDS (1)..(588): transl_table=11
atgaaaattcagaacatctgtgtgtactgcggctcgaacagcggccgccaacccgagtacatcgagcacgcgcaaggcttcgcacgcgagctggtcaagcgcggcctgggactggtgtacggcggcgccagcgtcggcatcatgggcgcggtggccgataccgtgatggccgaaggcggccgggtcatcggcatcattcccgaggcgctgatgaagaaggagctggcgcaccgcggcctgaccgaactgcatgtggtgcagtcgatgcacgagcgcaagacgctgatggcgcagaaggccgacggtttcgtcgccctgcccggcggcgcgggcacgctggaagagatcttcgaaatctggacctgggcgcaattgggcatgcaccagaagccatgcggcctgctcaatatcgccggctattacgacctgctgggtcagttcctgaatcacacggtggatgaagccttcatgcgcccgcaacatcgcgccatgctcgccatcgaccacgacccggcagccctgttggaccacttcgccagctacgtcgcgcccacggtttccaagtggatcgcgccgggcgaacactga

SEQ ID NO: 15270 - protein, 195 aa, Bordetella pertussis Tohama I
MKIQNICVYCGSNSGRQPEYIEHAQGFARELVKRGLGLVYGGASVGIMGAVADTVMAEGGRVIGIIPEALMKKELAHRGLTELHVVQSMHERKTLMAQKADGFVALPGGAGTLEEIFEIWTWAQLGMHQKPCGLLNIAGYYDLLGQFLNHTVDEAFMRPQHRAMLAIDHDPAALLDHFASYVAPTVSKWIAPGEH

SEQ ID NO: 15271 - DNA, 627 bp, Bordetella parapertussis 12822
  CDS (1)..(627): transl_table=11
atgcaactggtaacgagcgcatggactcttgaacgagttatgaaaattcagaacatctgtgtgtactgcggctcgaacagcggccgccaacccgagtacatcgagcacgcgcaaggcttcgcacgcgagctggtcaagcgcggcctgggactggtgtacggcggcgccagcgtcggcatcatgggcgcggtggccgataccgtgatggccgaaggcggccgggtcatcggcatcattcccgaggcgctgatgaagaaggagctggcgcaccgcggcctgaccgaactgcatgtggtgcagtcgatgcacgagcgcaagacgctgatggcgcagaaggccgacggtttcgtcgccctgcccggcggcgcgggcacgctggaagagatcttcgaaatctggacctgggcgcaattgggcatgcaccagaagccatgcggcctgctcaatatcgccggctattacgacctgctgggtcagttcctgaatcacacggtagatgaagccttcatgcgcccgcaacatcgcgccatgctcgccatcgaccacgacccggcagccctgttggaccacttcgccagctacgtcgcgcccacggtttccaagtggatcgcgccggacgaacactga

SEQ ID NO: 15272 - protein, 208 aa, Bordetella parapertussis 12822
MQLVTSAWTLERVMKIQNICVYCGSNSGRQPEYIEHAQGFARELVKRGLGLVYGGASVGIMGAVADTVMAEGGRVIGIIPEALMKKELAHRGLTELHVVQSMHERKTLMAQKADGFVALPGGAGTLEEIFEIWTWAQLGMHQKPCGLLNIAGYYDLLGQFLNHTVDEAFMRPQHRAMLAIDHDPAALLDHFASYVAPTVSKWIAPDEH

SEQ ID NO: 15273 - DNA, 627 bp, Bordetella bronchiseptica RB50
  CDS (1)..(627): transl_table=11
atgcaactggtaacgagcgcatggactcttgaacgagttatgaaaattcagaacatctgtgtgtactgcggctcgaacagcggccgccaacccgagtacatcgagcacgcgcaaggcttcgcacgcgagctggtcaagcgcggcctgggactggtgtacggcggcgccagcgtcggcatcatgggcgcggtggccgataccgtgatggccgaaggcggccgggtcatcggcatcattcccgaggcgctgatgaagaaggagctggcgcaccgcggcctgaccgaactgcatgtggtgcagtcgatgcacgagcgcaagacgctgatggcgcagaaggccgacggtttcgtcgccctgcccggcggcgcgggcacgctggaagagatcttcgaaatctggacctgggcgcaattgggcatgcaccagaagccatgcggcctgctcaatatcgccggctattacgacctgctgggtcagttcctgaatcacacggtggatgaagccttcatgcgcccgcaacatcgcgccatgctcgccatcgaccacgacccggcagccctgttggaccacttcgccagctacgtcgcgcccacggtttccaagtggatcgcgccgggcgaacactga

SEQ ID NO: 15274 - protein, 208 aa, Bordetella bronchiseptica RB50
MQLVTSAWTLERVMKIQNICVYCGSNSGRQPEYIEHAQGFARELVKRGLGLVYGGASVGIMGAVADTVMAEGGRVIGIIPEALMKKELAHRGLTELHVVQSMHERKTLMAQKADGFVALPGGAGTLEEIFEIWTWAQLGMHQKPCGLLNIAGYYDLLGQFLNHTVDEAFMRPQHRAMLAIDHDPAALLDHFASYVAPTVSKWIAPGEH

SEQ ID NO: 15275 - DNA, 570 bp, Synechococcus sp. WH 8102
  CDS (1)..(570): transl_table=11
atgaaaggcttctggcacgggcaagcgatgcgacgcctcgcggtctactgcggatccagatctggccacgcgccggagcatggtcaggtcgccacggcattgggccgcgccatggcccgtcgcggtgtggggttggtgtatggcgccgcccagattggtctgatgggcacgatcgccgatgcagtgctggctgctgatggggaggtgatcggcgtgatccccgaagcgttgatggatgccgaggttgctcaccatcagctcacgcgcctggaggtcgttgccgacatgcatgtccgcaaggcgcgcatgatcgaattggcagatgccacggtcgcgctgccgggggggcttggaaccctggaggagttgtttgaagcactcacctggttgcagctgcgctttcacggcaaaccctgtgccttgctcaatgtgtccggctactacgaccatcttctccagttcctggatggagcggtggccgatggtttcgtggctgaggagcaccgcgggctgctgaaggtgcatcaggacccggagcggctcctggatgagctgttgcaacacccctga

SEQ ID NO: 15276 - protein, 189 aa, Synechococcus sp. WH 8102
MKGFWHGQAMRRLAVYCGSRSGHAPEHGQVATALGRAMARRGVGLVYGAAQIGLMGTIADAVLAADGEVIGVIPEALMDAEVAHHQLTRLEVVADMHVRKARMIELADATVALPGGLGTLEELFEALTWLQLRFHGKPCALLNVSGYYDHLLQFLDGAVADGFVAEEHRGLLKVHQDPERLLDELLQHP

SEQ ID NO: 15277 - DNA, 639 bp, Chromobacterium violaceum ATCC 12472; identical to SEQ ID NO: 145
  CDS (1)..(639): transl_table=11

SEQ ID NO: 15278 - protein, 212 aa, Chromobacterium violaceum ATCC 12472; identical to SEQ ID NO: 146

SEQ ID NO: 15279 - DNA, 564 bp, Photorhabdus luminescens subsp. laumondii TTO1; identical to SEQ ID NO: 147
  CDS (1)..(564): transl_table=11

SEQ ID NO: 15280 - protein, 187 aa, Photorhabdus luminescens subsp. laumondii TTO1; identical to SEQ ID NO: 148

SEQ ID NO: 15281 - DNA, 591 bp, Geobacter sulfurreducens PCA; identical to SEQ ID NO: 151
  CDS (1)..(591): transl_table=11

SEQ ID NO: 15282 - protein, 196 aa, Geobacter sulfurreducens PCA; identical to SEQ ID NO: 152

SEQ ID NO: 15283 - DNA, 579 bp, Bacillus cereus ATCC 10987; identical to SEQ ID NO: 153
  CDS (1)..(579): transl_table=11

SEQ ID NO: 15284 - protein, 192 aa, Bacillus cereus ATCC 10987; identical to SEQ ID NO: 154

SEQ ID NO: 15285 - DNA, 798 bp, Magnaporthe grisea 70-15; identical to SEQ ID NO: 155
  CDS (1)..(798)

SEQ ID NO: 15286 - protein, 265 aa, Magnaporthe grisea 70-15; identical to SEQ ID NO: 156

SEQ ID NO: 15287 - DNA, 723 bp, Gibberella zeae PH-1; identical to SEQ ID NO: 157
  CDS (1)..(723)

SEQ ID NO: 15288 - protein, 240 aa, Gibberella zeae PH-1; identical to SEQ ID NO: 158

SEQ ID NO: 15289 - DNA, 669 bp, Candida glabrata CBS 138; identical to SEQ ID NO: 159
  CDS (1)..(669)

SEQ ID NO: 15290 - protein, 222 aa, Candida glabrata CBS 138; identical to SEQ ID NO: 160

SEQ ID NO: 15291 - DNA, 696 bp, Debaryomyces hansenii CBS767; identical to SEQ ID NO: 161
  CDS (1)..(696)

SEQ ID NO: 15292 - protein, 231 aa, Debaryomyces hansenii CBS767; identical to SEQ ID NO: 162

SEQ ID NO: 15293 - DNA, 636 bp, Yarrowia lipolytica CLIB122; identical to SEQ ID NO: 163
  CDS (1)..(636)

SEQ ID NO: 15294 - protein, 211 aa, Yarrowia lipolytica CLIB122; identical to SEQ ID NO: 164

SEQ ID NO: 15295 - DNA, 744 bp, Aspergillus nidulans FGSC A4; identical to SEQ ID NO: 165
  CDS (1)..(744)

SEQ ID NO: 15296 - protein, 247 aa, Aspergillus nidulans FGSC A4; identical to SEQ ID NO: 166

SEQ ID NO: 15297 - DNA, 711 bp, Aspergillus nidulans FGSC A4; identical to SEQ ID NO: 167
  CDS (1)..(711)

SEQ ID NO: 15298 - protein, 236 aa, Aspergillus nidulans FGSC A4; identical to SEQ ID NO: 168

SEQ ID NO: 15299 - DNA, 669 bp, Candida albicans SC5314; identical to SEQ ID NO: 169
  CDS (1)..(669): transl_table=12

SEQ ID NO: 15300 - protein, 222 aa, Candida albicans SC5314; identical to SEQ ID NO: 170

SEQ ID NO: 15301 - DNA, 1668 bp, Ustilago maydis 521
  CDS (1)..(1668)
atgcctggatacaccgactcgatatgtgtcttttgcggctcctcgcctggcgtcaagcccgaatacatggcggccgcagctagcgtcggccacgccattgccaggcacaactaccgtctcgtctatggaggtggttcgcgcggctgcatgagcggtgtctcccaagctgtccttgaagtaggcggtcacgtcctcggcgtcatcccccaagtcatggccgccaccgtccctgcgggtcatcctggacaaaatctggcggcccccaaggtcgtctccaaggaaggtgtcggccctaccgtgctcaatcccgacgcaggcacaggtcatatcgaaaccatcgtcgtccagtccatgcacgaaaggaagcagcgcatggctgccgaaagcaacctcggctttattggccttcctggtggatacggcactttcgaagaggtcatggagatggtcacttggacccagcttggtatccaccgaaagcccatggttctgctcaacgtcaacggcttctacacccccatcaagcagcaaatcgagcttgctgtcgaggacggcttcatcgccaaggatggaaagcagctcatcagctttgtcgagtgcgacgcttccaacattgatgcctgcggtgataaggtgctcgcggaagcagttcgcctctccaacgagcttgcttcaaatggctggggctactgggactggaacaagcctcagggacccatcagtaccgccaaaggtggcatcagcgacaacgctgctaacaagtctctcgaactcgctgacggcgaaacgctcgctgtacaagtgtccgacctgactttcaccttcaacccggacatgccacctgcgctcgaacactgcaatctcagcctgaagcgtggctcgcgctgtcttcttatcggtgccaacggtgctggcaagtcgacactcttacgtctgctcgccggcaaaaagctgtgcgactccaaggtgcgcgtgtttggcaaggatgtcttccgcgagtctccttccggcgttacgtatctcggcaccgagtgggccatgaatccggttgtgcgctctgacattgtcgtctccgctttcctcgattcagtcggcggctaccgtcacaaggcgcgtcgcgatcgtctgctcgacattcttgatgtcgatctcacgtggcacatgcacgccatctcggatggtgaacgacgacgtgttcagctgtgcatgggtctcatggagccctgggacctgctcctgctcgacgaagtgactgtggatctggatgtccaagttcgcgcggatctgctcgactttctgcagcaagagaccgaggagaggcatgcgaccatcatctacgccactcacatctttgacggattgcagagcttccccactcatctggctcatatgcggctgggaacgactacgaccactttgccgatcgattggcctgccaccaacgcggctgatatcgcggcgctgccacccactgcggctgctgacaagaccagagacctgtcgccattgctcaacgtctcgctcgcttggttgagagaggacaaggtggtgcgcgccgagcaagaggctaagcgcggcagagtcagaggtgccaaccgccaaaacgagaccaccgactcggagaaattcttcagcaagtatgattactcgcagtcagtcacacgctag

SEQ ID NO: 15302 - protein, 555 aa, Ustilago maydis 521
MPGYTDSICVFCGSSPGVKPEYMAAAASVGHAIARHNYRLVYGGGSRGCMSGVSQAVLEVGGHVLGVIPQVMAATVPAGHPGQNLAAPKVVSKEGVGPTVLNPDAGTGHIETIVVQSMHERKQRMAAESNLGFIGLPGGYGTFEEVMEMVTWTQLGIHRKPMVLLNVNGFYTPIKQQIELAVEDGFIAKDGKQLISFVECDASNIDACGDKVLAEAVRLSNELASNGWGYWDWNKPQGPISTAKGGISDNAANKSLELADGETLAVQVSDLTFTFNPDMPPALEHCNLSLKRGSRCLLIGANGAGKSTLLRLLAGKKLCDSKVRVFGKDVFRESPSGVTYLGTEWAMNPVVRSDIVVSAFLDSVGGYRHKARRDRLLDILDVDLTWHMHAISDGERRRVQLCMGLMEPWDLLLLDEVTVDLDVQVRADLLDFLQQETEERHATIIYATHIFDGLQSFPTHLAHMRLGTTTTTLPIDWPATNAADIAALPPTAAADKTRDLSPLLNVSLAWLREDKVVRAEQEAKRGRVRGANRQNETTDSEKFFSKYDYSQSVTR

SEQ ID NO: 15303 - DNA, 1539 bp, Cryptococcus neoformans var. neoformans B-3501A
  CDS (1)..(1539)
atgtcccctttcccccagaccgcaaagctcaataaccctgtctgtgtcttctgtggctcatccccaggaaacaagcccctttttgtcaaagccgcggaatcagttggtaaagctcttgccaaagccaatataccgcttgtctatggcggtggccgacgaggtatcatgggcgtcgtctctcaatcggcattgtccgccaatgggtatgtccatggcattctccctcgtgcacttgtcgagccggcatcggaacccacaccggttccgtggtctaccacgaacggagacacggcccggagcaaggaagggactggaaaggatgtcgtggaagatgacaaccaagccaagttgaccgtcgaggttgttgggtctatgcatcagcgaaagctggccatggccaaactgtcaaccggagggtttatagtgcttcctggcggctatggtactcttgaagaagctcttgagatgatcacctggaatcagctcggtatccatcgccttcccatcatcatcttgaacattggcaactttttcacccatctctataaacaatttgaaaactcagtcgaggctggctttatcgctcccagtaacctctcattgttgagactggtcgacttggaaggcggtgaggaggccaatattgatgaaacaagggcagatgaatggggtcaagctgccctgaaagctctcaaagagtggagcgtcgatgaggatgtcggatacaatttaaactggaaagaagaagatgatggtggcacacaagatacttgtcgtagcccctcctacctatttaccaccatgcgctgtacctttccctcggccacatctacccctatatctgaagcagatttaccattaatcggctaccaccttgagcgactccgagaggcacatgcccactttgcagagcgtgatacgcattactggggtgaatggcctggtgacgactctgtcacggacaaatgtttgcaagtcttacgagagaaagcacaggaaggcgagggggattatcgagttagaattgtcatctgcccgaaaggtatagtcaaagttgaagtgcctcctgcacccaaagatgccggcccattcagtttggagatcccgactgcctcgatggctagagcaagacctctggtgctcgatccagctgttaccgacgtgcgaggagaagacccatcgaatagaaagtttagattatacaaaaccagccagagggaactgtacgatctggcatatgagcgtggtagcactctttctccatgtcaccctgaagttctcttgcacacatcaactcatctcctggaaactacgacttcaaacattgctattctctcgccctccggccagtggattacaccatcgatttcctcttcaactcctcttctcaatggagttgtaaggaggtttctcctggcgagcggagtcatagaagaaggcgaactgacactggcagattttgagcgcgtaaaggcggaaggaggacgaatcattggattcaacggtttgaggggtatctgggaagggaaaatcatctag

SEQ ID NO: 15304 - protein, 512 aa, Cryptococcus neoformans var. neoformans B-3501A
MSPFPQTAKLNNPVCVFCGSSPGNKPLFVKAAESVGKALAKANIPLVYGGGRRGIMGVVSQSALSANGYVHGILPRALVEPASEPTPVPWSTTNGDTARSKEGTGKDVVEDDNQAKLTVEVVGSMHQRKLAMAKLSTGGFIVLPGGYGTLEEALEMITWNQLGIHRLPIIILNIGNFFTHLYKQFENSVEAGFIAPSNLSLLRLVDLEGGEEANIDETRADEWGQAALKALKEWSVDEDVGYNLNWKEEDDGGTQDTCRSPSYLFTTMRCTFPSATSTPISEADLPLIGYHLERLREAHAHFAERDTHYWGEWPGDDSVTDKCLQVLREKAQEGEGDYRVRIVICPKGIVKVEVPPAPKDAGPFSLEIPTASMARARPLVLDPAVTDVRGEDPSNRKFRLYKTSQRELYDLAYERGSTLSPCHPEVLLHTSTHLLETTTSNIAILSPSGQWITPSISSSTPLLNGVVRRFLLASGVIEEGELTLADFERVKAEGGRIIGFNGLRGIWEGKII

SEQ ID NO: 15305 - DNA, 597 bp, Herminiimonas arsenicoxydans; identical to SEQ ID NO: 171
  CDS (1)..(597): transl_table=11

SEQ ID NO: 15306 - protein, 198 aa, Herminiimonas arsenicoxydans; identical to SEQ ID NO: 172

SEQ ID NO: 15307 - DNA, 582 bp, Burkholderia vietnamiensis G4; identical to SEQ ID NO: 173
  CDS (1)..(582): transl_table=11

SEQ ID NO: 15308 - protein, 193 aa, Burkholderia vietnamiensis G4; identical to SEQ ID NO: 174

SEQ ID NO: 15309 - DNA, 564 bp, Dichelobacter nodosus VCS1703A
  CDS (1)..(564): transl_table=11
atgaatatcacggtattttgcggcgcaagtttgggaatgaataaactatatcaagaaaaaacaatcgagttgggaaaatggattgcgcaaaatcatcatcaattgatttatggcggcggaaaagtgggattgatggggttaattgctgatacggttttggaaaatggcggtcgcgtgattggcgtgatgccgcgctttttagtggaaagagaaatcagtcatacaaaattaaatgagttaatcgtggttgataatttgtcggacagaaaggcgcgcatgattgagcgcggagacgtttttatggctttatcgggcggactgggaacgctggaagaaattgctcaagtgatttcatgggcgagagtggggcaaaatgataaaccgtgcattttgataaacgttaacggttattatgattatttagcaaagtttttcgatcatatgatggaagaaggatttttatcgcgcgccgatagagaaaaaacgttgttttcggataatcttgaagaaatcgcacgttttataaaaaattaccaaaaaccggaagtaagaaaatatcagtaa

SEQ ID NO: 15310 - protein, 187 aa, Dichelobacter nodosus VCS1703A
MNITVFCGASLGMNKLYQEKTIELGKWIAQNHHQLIYGGGKVGLMGLIADTVLENGGRVIGVMPRFLVEREISHTKLNELIVVDNLSDRKARMIERGDVFMALSGGLGTLEEIAQVISWARVGQNDKPCILINVNGYYDYLAKFFDHMMEEGFLSRADREKTLFSDNLEEIARFIKNYQKPEVRKYQ

SEQ ID NO: 15311 - DNA, 558 bp, Leptospira interrogans serovar Copenhageni str. Fiocruz L1-130
  CDS (1)..(558): transl_table=11
atggatttaaccaaattggcggtttgtgttttttgtggttcgcgttccgggaacaatccggtttatgtggaagcggctcggaatttgggtcgattgctcgttgaaaaaaatttagatttggtttttggaggggcttcgtgcggtatcatgggaacgattgctgatgctgtaatggacaaaggaggaggtgtatctggaatcattccggattttctttctatcaaagaagttaaacacgatcgtgttaaggatttgatgatcgtttcttccatgcatgaaagaaaatttaggatgtatgaaaggtcctcaggttttatcgccttgcctggtggaattggaactttggacgagctcgtagaaatcactacttggaatcaactcaaacttatttcaaaacctttgggtttactcaatgtaaacggttattttgaatatttgcttaaacaattaggtagaatggtggacgatggttttttagattcggaaactaaagaaggtctaatcgtttcggaagatccggaagaattactcgacttattgagtagacgttttgtttaa

SEQ ID NO: 15312 - protein, 185 aa, Leptospira interrogans serovar Copenhageni str. Fiocruz L1-130
MDLTKLAVCVFCGSRSGNNPVYVEAARNLGRLLVEKNLDLVFGGASCGIMGTIADAVMDKGGGVSGIIPDFLSIKEVKHDRVKDLMIVSSMHERKFRMYERSSGFIALPGGIGTLDELVEITTWNQLKLISKPLGLLNVNGYFEYLLKQLGRMVDDGFLDSETKEGLIVSEDPEELLDLLSRRFV

SEQ ID NO: 15313 - DNA, 579 bp, Bacillus anthracis str. Sterne; identical to SEQ ID NO: 175
  CDS (1)..(579): transl_table=11

SEQ ID NO: 15314 - protein, 192 aa, Bacillus anthracis str. Sterne; identical to SEQ ID NO: 176

SEQ ID NO: 15315 - DNA, 579 bp, Bacillus thuringiensis serovar konkukian str. 97-27; identical to SEQ ID NO: 177
  CDS (1)..(579): transl_table=11

SEQ ID NO: 15316 - protein, 192 aa, Bacillus thuringiensis serovar konkukian str. 97-27; identical to SEQ ID NO: 178

SEQ ID NO: 15317 - DNA, 618 bp, Acinetobacter sp. ADP1; identical to SEQ ID NO: 179
  CDS (1)..(618): transl_table=11

SEQ ID NO: 15318 - protein, 205 aa, Acinetobacter sp. ADP1; identical to SEQ ID NO: 180

SEQ ID NO: 15319 - DNA, 600 bp, Acinetobacter sp. ADP1; identical to SEQ ID NO: 181
  CDS (1)..(600): transl_table=11

SEQ ID NO: 15320 - protein, 199 aa, Acinetobacter sp. ADP1; identical to SEQ ID NO: 182

SEQ ID NO: 15321 - DNA, 576 bp, Bacillus licheniformis ATCC 14580; identical to SEQ ID NO: 183
  CDS (1)..(576): transl_table=11

SEQ ID NO: 15322 - protein, 191 aa, Bacillus licheniformis ATCC 14580; identical to SEQ ID NO: 184

SEQ ID NO: 15323 - DNA, 579 bp, Bacillus cereus E33L
  CDS (1)..(579): transl_table=11
atgagaaagatttgtgtgtttgcaggttcaaatttaggggagagaccagagttcaaagagcaggcaatagcgttagggaaaatgtttgttgagaatgagtacgagcttgtatatggtggttcttgcgttggattaatgggagaagtagcaaacgaagttcttcgtttaggcgggcgtgtaacaggtgttatgccgcgcggtctatttctaggagaaatcgttcatacagggttaacagaattaattgaagtagaaacgatgcatgaacgtaaagcgaaaatggcagagcttgcggatgctttcattgcactgccaggcggatatggaacgtttgaagagctatttgaagtagtatgttggtcacaaattggtatacataataagccagttggtttattgaacataaaagatttttacggaccaattctgcaaatggttgaacgtgcagcagaagaaggattcatgaatccatcgaataaagagttaatcgttgccgctgaaacggcagatgcactcattcataagatacaaaattacgagcgtcctgttttaggaacgaagtggaagcaactatcataa

SEQ ID NO: 15324 - protein, 192 aa, Bacillus cereus E33L
MRKICVFAGSNLGERPEFKEQAIALGKMFVENEYELVYGGSCVGLMGEVANEVLRLGGRVTGVMPRGLFLGEIVHTGLTELIEVETMHERKAKMAELADAFIALPGGYGTFEELFEVVCWSQIGIHNKPVGLLNIKDFYGPILQMVERAAEEGFMNPSNKELIVAAETADALIHKIQNYERPVLGTKWKQLS

SEQ ID NO: 15325 - DNA, 573 bp, Legionella pneumophila subsp. pneumophila str. Philadelphia 1
  CDS (1)..(573): transl_table=11
atgctccataatactaaaataaacaaactcgctgtcttttgtggatctaacactggttattctgaagtctataaacaatcagctgaaaacatggccgatgtcctaagcagtaatggtattaccctggtttatggtggctcaaaaagcggtttgatgggaataatagccaatcgcatgttaaaaaatggctctaatgtcattggtgttataccaaaatctctggttgacacagaaaaagcacatgatgggttgacggaattacatgttgttaattctatgtatgaaagaaaaatattgatgtgtaaattgtcggacgggttcattctgctgccaggtgggtcaggttctctggatgagttttttgaaatgtttaccctggtacaattaggataccataaaaaaccttgctgtgtactcaatgcctctggttactatgattaccttttgcaatttttagactatgctgttaatcaaggttttttacgctcaaaggatcgaaacgcgctcattgtcaatcaatatccagatacgctcattgagaatttatttgaagtaatcaataatcgcaaataa

SEQ ID NO: 15326 - protein, 190 aa, Legionella pneumophila subsp. pneumophila str. Philadelphia 1
MLHNTKINKLAVFCGSNTGYSEVYKQSAENMADVLSSNGITLVYGGSKSGLMGIIANRMLKNGSNVIGVIPKSLVDTEKAHDGLTELHVVNSMYERKILMCKLSDGFILLPGGSGSLDEFFEMFTLVQLGYHKKPCCVLNASGYYDYLLQFLDYAVNQGFLRSKDRNALIVNQYPDTLIENLFEVINNRK

SEQ ID NO: 15327 - DNA, 588 bp, Methylococcus capsulatus str. Bath; identical to SEQ ID NO: 185
  CDS (1)..(588): transl_table=11

SEQ ID NO: 15328 - protein, 195 aa, Methylococcus capsulatus str. Bath; identical to SEQ ID NO: 186

SEQ ID NO: 15329 - DNA, 552 bp, Silicibacter pomeroyi DSS-3
  CDS (1)..(552): transl_table=11
atgaccgtcaaatccgtttgtatctattgcggatcgcgcgccggagcaatgcccgcctatgccgaggcggcccgccggatgggcgcgctgctggccgaggcgggttggcggctggtctatggcgctggcgatgtgggcctgatgggagaggtggcgcgcgccgctcaggccgcaggcggccagacctttggcgtgatcccggtacacctgctgcggcgcgaggtcggcaagaccgacctgagcacattcgtcgtcaccgaaaccatgcacgaacgcaaaaaagtgatgatcatgaacgccgatgcggtggtggtgctgcccggcggccccggctccttggacgagctgttcgaagcgctgacctggcgccagctgggcctgcatgacaaacccatcctggtgatgaatgtggacggctattgggacccgctgcgtgccctgatcgaacgcacggtggatcagggctttgccgatgcctcgctggcggattacctgacctgggtcgacacgcccgaaaccgccatggcggccctgcgcgccgccctgtcctga

SEQ ID NO: 15330 - protein, 183 aa, Silicibacter pomeroyi DSS-3
MTVKSVCIYCGSRAGAMPAYAEAARRMGALLAEAGWRLVYGAGDVGLMGEVARAAQAAGGQTFGVIPVHLLRREVGKTDLSTFVVTETMHERKKVMIMNADAVVVLPGGPGSLDELFEALTWRQLGLHDKPILVMNVDGYWDPLRALIERTVDQGFADASLADYLTWVDTPETAMAALRAALS

SEQ ID NO: 15331 - DNA, 582 bp, Bacillus clausii KSM-K16; identical to SEQ ID NO: 187
  CDS (1)..(582): transl_table=11

SEQ ID NO: 15332 - protein, 193 aa, Bacillus clausii KSM-K16; identical to SEQ ID NO: 188

SEQ ID NO: 15333 - DNA, 567 bp, Staphylococcus epidermidis RP62A
  CDS (1)..(567): transl_table=11
atgaaaagaattgctgtttattgtggtgcaagtaaagggaaaaacccatcttatgttaaagaggcatacgaattaggaaaatatatggctgaacaaggatacgagcttgtattcggagcaggatcagtcggcattatgggagctattcaagatggcatacttgagcatggcggtaaagctatcggtgtcatgcctaaaatgttagatgaacgagaaataacaagccaaaaagtaagtgagcttatattagtagattctatgcatgaacgaaaaaataaaatgactgaacttgccgatgcttttattatggctccaggcggtgctggttcattagaagaattttttgaaatgtatagttgggctcaaattggtatacaccaaaagcctataggtgtatttaatttaaatggattctttgagccactacaacacttaatcgaccatatgattaaagaaggatttattgatgagaaatatcaaaagcttgcacctttatatgatactaaagaatcactcatcgaaggacttaaacattacaaaccacttggtgtacgtacatacgattaa

SEQ ID NO: 15334 - protein, 188 aa, Staphylococcus epidermidis RP62A
MKRIAVYCGASKGKNPSYVKEAYELGKYMAEQGYELVFGAGSVGIMGAIQDGILEHGGKAIGVMPKMLDEREITSQKVSELILVDSMHERKNKMTELADAFIMAPGGAGSLEEFFEMYSWAQIGIHQKPIGVFNLNGFFEPLQHLIDHMIKEGFIDEKYQKLAPLYDTKESLIEGLKHYKPLGVRTYD

SEQ ID NO: 15335 - DNA, 597 bp, Bacteroides fragilis NCTC 9343
  CDS (1)..(597): transl_table=11
atgcaagaaatgaaccaaataacttccgtatgcgtatattgcgcttcaagtacaaaaatagaccagacttattttgatgcagccatgaaattagggcatctgttggcaaaccggcatatccgtttgataaatggagcggggaatataggattgatgcgttcggtggctgatgcagtattgcagaatgggggagaagtgaccggagtaattcctcattttatggtagaccagggatggcatcacacgggattgacagagcttatcgaggtagaaggtatgcacgagcgtaagaggttgatggctgaaaagagtgatgccgtgattgcactgcccggaggatgcggaactttggaagagctgcttgagattattacctggaaacagttggggttgtatcttaacccgatcgtgatattaaacactaatggtttctttgacccgttgctggagatgcttgaaaatgctatagaaggtaatttcatgaggaaacagcatggagatatctggcatgtggcacatactccggaggaggctgtagagttggtttattccataccggtgtgggatggttctattcgtaagtttgccgctatatga

SEQ ID NO: 15336 - protein, 198 aa, Bacteroides fragilis NCTC 9343
MQEMNQITSVCVYCASSTKIDQTYFDAAMKLGHLLANRHIRLINGAGNIGLMRSVADAVLQNGGEVTGVIPHFMVDQGWHHTGLTELIEVEGMHERKRLMAEKSDAVIALPGGCGTLEELLEIITWKQLGLYLNPIVILNTNGFFDPLLEMLENAIEGNFMRKQHGDIWHVAHTPEEAVELVYSIPVWDGSIRKFAAI

SEQ ID NO: 15337 - DNA, 588 bp, Pseudomonas fluorescens Pf-5
  CDS (1)..(588): transl_table=11
atgtcgttaacttctgtctgtgtattctgtggcgccagcaccggcgccaaccctctctatcgtgaagccgcccaggccctgggccgggccatcgccgagcgcaggctgaccctggtgtatggcggcggcgcggtagggctgatgggcatcgtcgccgacgcggccctggcggccgggggcgaagtcatcgggatcattccgcaaagcctgaaggacaaggaaatcggccatcgcggcctgacccgcctggaagtggtggacggcatgcacgcccgcaaggcgcgcatggccgagctcagcgatgccttcatcgccctgcccggcggcctgggaaccctggaagaactgttcgaagtctggacctggggccagttgggctaccaccacaagccgctcggcctgctggaagtgaatggcttctacgaaaaactcagcggttttctcgatcatatcgtcggcgaaggcttcgtccgtgccccgcaccgtgacatgctgcaaatgagcgagtcgccggccggcctgctggatgcgctggacgcctggcaaccgacggtcccggacaaatgggccgaaggcaaacccagctaa

SEQ ID NO: 15338 - protein, 195 aa, Pseudomonas fluorescens Pf-5
MSLTSVCVFCGASTGANPLYREAAQALGRAIAERRLTLVYGGGAVGLMGIVADAALAAGGEVIGIIPQSLKDKEIGHRGLTRLEVVDGMHARKARMAELSDAFIALPGGLGTLEELFEVWTWGQLGYHHKPLGLLEVNGFYEKLSGFLDHIVGEGFVRAPHRDMLQMSESPAGLLDALDAWQPTVPDKWAEGKPS

SEQ ID NO: 15339 - DNA, 678 bp, Psychrobacter arcticus 273-4
  CDS (1)..(678): transl_table=11
atgcaaatgaaaattaataatgacatgtatgaagtgattaccagtcaagacattaccaatattgaaaaagcagtggataaatcagcgttaaccatgccgctagtggcagtctattgtgggtcgcgtttgggtaatgatgtcgtatatgagcaagccgcgcgcgagctgggtatggcgctagcagacaatggcatgggcttggtatatggcggcgcgagtatcgggctgatgggcgcagtcgccgatgaggtgattcgaggcggcgcagaagcagtcggtgtgattccaacttttatgctcaagcacgaaattgctcatgagcagctgacccgtctacatttaaccgatacgatgcacacacgcaaaacggtgatggcagaatatgctgatgcgtttattaccttaccgggcgggcttggcaccttagaagaaatcatggaaattgccacttggcgccagctgtatcaacatgaaaaaccaatgattattttgaatatcaatggtttttatgatcgtatgattgagcatttaaaatataccactgagcaaggctttatgaagcaagaagatcttgagcgcttggtagtgtgtaatactattaatgatgccattgatttactacagaccatggtcaaaatagatgccgctgtcaatacggaaaagatggctggcaactaa

SEQ ID NO: 15340 - protein, 225 aa, Psychrobacter arcticus 273-4
MQMKINNDMYEVITSQDITNIEKAVDKSALTMPLVAVYCGSRLGNDVVYEQAARELGMALADNGMGLVYGGASIGLMGAVADEVIRGGAEAVGVIPTFMLKHEIAHEQLTRLHLTDTMHTRKTVMAEYADAFITLPGGLGTLEEIMEIATWRQLYQHEKPMIILNINGFYDRMIEHLKYTTEQGFMKQEDLERLVVCNTINDAIDLLQTMVKIDAAVNTEKMAGN

SEQ ID NO: 15341 - DNA, 600 bp, Dechloromonas aromatica RCB; identical to SEQ ID NO: 189
  CDS (1)..(600): transl_table=11

SEQ ID NO: 15342 - protein, 199 aa, Dechloromonas aromatica RCB; identical to SEQ ID NO: 190

SEQ ID NO: 15343 - DNA, 585 bp, Ralstonia eutropha JMP134; identical to SEQ ID NO: 191
  CDS (1)..(585): transl_table=11

SEQ ID NO: 15344 - protein, 194 aa, Ralstonia eutropha JMP134; identical to SEQ ID NO: 192

SEQ ID NO: 15345 - DNA, 588 bp, Pseudomonas fluorescens PfO-1; identical to SEQ ID NO: 193
  CDS (1)..(588): transl_table=11

SEQ ID NO: 15346 - protein, 195 aa, Pseudomonas fluorescens PfO-1; identical to SEQ ID NO: 194

SEQ ID NO: 15347 - DNA, 582 bp, Burkholderia sp. 383; identical to SEQ ID NO: 195
  CDS (1)..(582): transl_table=11

SEQ ID NO: 15348 - protein, 193 aa, Burkholderia sp. 383; identical to SEQ ID NO: 196

SEQ ID NO: 15349 - DNA, 579 bp, Synechococcus sp. CC9605; identical to SEQ ID NO: 197
  CDS (1)..(579): transl_table=11

SEQ ID NO: 15350 - protein, 192 aa, Synechococcus sp. CC9605; identical to SEQ ID NO: 198

SEQ ID NO: 15351 - DNA, 582 bp, Geobacter metallireducens GS-15; identical to SEQ ID NO: 199
  CDS (1)..(582): transl_table=11

SEQ ID NO: 15352 - protein, 193 aa, Geobacter metallireducens GS-15; identical to SEQ ID NO: 200

SEQ ID NO: 15353 - DNA, 594 bp, Desulfovibrio desulfuricans G20; identical to SEQ ID NO: 201
  CDS (1)..(594): transl_table=11

SEQ ID NO: 15354 - protein, 197 aa, Desulfovibrio desulfuricans G20; identical to SEQ ID NO: 202

SEQ ID NO: 15355 - DNA, 597 bp, Rhodospirillum rubrum ATCC 11170
  CDS (1)..(597): transl_table=11
atgtcgcgcctgcgttcgatctgcgttttttgcggttcctctcccggatccgatcccgcctatctcgccgccgcccgcgccctgggcgcggcgatgggacgcgccgggctgaccctggttttcggggcgggcaatgtcgggctgatgggcgccaccgccaccgccgccatcgccgagggcggccgggtggtcggggtcatccccgagcatctgacccgggtggaaacgccgcacggcgagctgatggaactccatgtggtcgagtcgatgcatgtgcgcaagcgcttgatgttcgagcgctccgacgccatctgcgtgctgcccggcggcctggggacgctcgacgagaccttcgagatcctgacctggaagcagttgggcctgcatgaaaagccggtgattttcttgaatatcaacggctattgggacccgctgctcggcctgatcgacgccatcgtcgcccagggcttcgcccgcccctcggtgcgcgatctctatacggtggtcgacggcgtcgaggcgatcatcccggcggcccgtcaaggcctgcccgagggcgatctgcacccggaaagcccgacgtccgaacgcttttag

SEQ ID NO: 15356 - protein, 198 aa, Rhodospirillum rubrum ATCC 11170
MSRLRSICVFCGSSPGSDPAYLAAARALGAAMGRAGLTLVFGAGNVGLMGATATAAIAEGGRVVGVIPEHLTRVETPHGELMELHVVESMHVRKRLMFERSDAICVLPGGLGTLDETFEILTWKQLGLHEKPVIFLNINGYWDPLLGLIDAIVAQGFARPSVRDLYTVVDGVEAIIPAARQGLPEGDLHPESPTSERF

SEQ ID NO: 15357 - DNA, 606 bp, Frankia sp. CcI3
  CDS (1)..(606): transl_table=11
gtgaacgtctgcgtgtactgcgcgtcctccgagctgatcgacccctcgtacgtcctgctggcggcccagaccggcaccgagctcgcccggcgcggccacaccctggtttccggcggaggctcggtgtcgtgcatgggggcgatcgcccgggcggtgcgggccagcggaggttacacggtcggcgtgatcccgcgggcgctggtcgcgatggaggtcagcgacctggacgcggacgagatcatcgtcacggagaccatgcgggagcgtaaggcgctcatggacgcgcgctcggatgccttcctggcgctgcccgggggcctgggcaccctcgaggagctgctcgaggtctgggtcgccggggtcctgcgcatgcacaccaagcccgtggtgctcctcgaccccgacggggtcttcgcccacctgcggatcctcgtcgacgagatggtcgaccgcgggttcgtccgcccgcgcgcccgggacaccctccgctgggcgaccggcatcggcgaggcggtggacttcctggaggcgggcgtgacagcggcgaccgtcacctcccctccgcccccgaccccgaccccgcgggagatcgtcgaaggcgactga

SEQ ID NO: 15358 - protein, 201 aa, Frankia sp. CcI3
MNVCVYCASSELIDPSYVLLAAQTGTELARRGHTLVSGGGSVSCMGAIARAVRASGGYTVGVIPRALVAMEVSDLDADEIIVTETMRERKALMDARSDAFLALPGGLGTLEELLEVWVAGVLRMHTKPVVLLDPDGVFAHLRILVDEMVDRGFVRPRARDTLRWATGIGEAVDFLEAGVTAATVTSPPPPTPTPREIVEGD

SEQ ID NO: 15359 - DNA, 582 bp, Novosphingobium aromaticivorans DSM 12444; identical to SEQ ID NO: 203
  CDS (1)..(582): transl_table=11

SEQ ID NO: 15360 - protein, 193 aa, Novosphingobium aromaticivorans DSM 12444; identical to SEQ ID NO: 204

SEQ ID NO: 15361 - DNA, 585 bp, Burkholderia xenovorans LB400; identical to SEQ ID NO: 205
  CDS (1)..(585): transl_table=11

SEQ ID NO: 15362 - protein, 194 aa, Burkholderia xenovorans LB400; identical to SEQ ID NO: 206

SEQ ID NO: 15363 - DNA, 585 bp, Ralstonia metallidurans CH34; identical to SEQ ID NO: 207
  CDS (1)..(585): transl_table=11

SEQ ID NO: 15364 - protein, 194 aa, Ralstonia metallidurans CH34; identical to SEQ ID NO: 208

SEQ ID NO: 15365 - DNA, 615 bp, Acidobacteria bacterium Ellin345
  CDS (1)..(615): transl_table=11
atggcgggccacaagttctgcgtctttagttcctcaagcgatgccattgatcgcgagttctttagcgcggcgctggaactcggcatggagatcgctctgcgcaacggcacgctggtttttggtggaacgaatgttggcttgatgggcgccgtcgcgcgcgccacgcagaagcacggcggccaggtggtgggcgtgatcccagacttcatgcgcgccaagggaattgcttatgcaagcgccgatgagctgatcgtgacgaaagacatgcgcgagcggaaagccacgatggaagcgcgaagcgatgcgttcatcgcgctgcccggcggcttcggcacgctcgaagagatgatcgagatcatcaccctgaagcagctcaagcagcacactaagcctgtggttttcctcgacatcaacaacttttatcgtccgctgcaacggctgttcgaacacatgatcacgcaacacttcgccaaggaagcgatgcgcaagatctaccacttcgccaacgatgtgccggcggcgttccgctacatcgacgagtacgagccgccgaagatggacgagaagtggactctgtcggcggagatgggcgagatcaatacggaccgggagtag

SEQ ID NO: 15366 - protein, 204 aa, Acidobacteria bacterium Ellin345
MAGHKFCVFSSSSDAIDREFFSAALELGMEIALRNGTLVFGGTNVGLMGAVARATQKHGGQVVGVIPDFMRAKGIAYASADELIVTKDMRERKATMEARSDAFIALPGGFGTLEEMIEIITLKQLKQHTKPVVFLDINNFYRPLQRLFEHMITQHFAKEAMRKIYHFANDVPAAFRYIDEYEPPKMDEKWTLSAEMGEINTDRE

SEQ ID NO: 15367 - DNA, 564 bp, Hyphomonas neptunium ATCC 15444
  CDS (1)..(564): transl_table=11
atgacaaaaatacgctcaatctgcgtttactgcggggcttcggatgccgttgatccccgctacatcaagctggccgaagcccttggacgcgaactcgccaagcggggcattcgccttgtgtatggcggcggcggcgtgggcctgatgggcgcctgcgcgcgggcggcgcacgacgcttccggtgaggtgctcggcatcatgccgcgcttcctgctgcagaaggaacgcatctacaaagacgtcgaacaccgcatcgtcgacgacatgcacacccgcaagcagatgatgtttgatgaggccgatgccttcatcgtgttgcccggcgggatcgggacgcttgaagaggctgtggaaatcctctcctgggcacgccttggcctgcatgcgaagccgatggcgtttctggatgaggacggcttctggtcgcccttcttcgagttgctggagcggatcatcgagggcggtttcatccccgaggaattccgccaggcgatggtgcacagcaagacgtccagcgacgcgatcgaggcgctgctcgaccgtgtggtggtgctggacatctga

SEQ ID NO: 15368 - protein, 187 aa, Hyphomonas neptunium ATCC 15444
MTKIRSICVYCGASDAVDPRYIKLAEALGRELAKRGIRLVYGGGGVGLMGACARAAHDASGEVLGIMPRFLLQKERIYKDVEHRIVDDMHTRKQMMFDEADAFIVLPGGIGTLEEAVEILSWARLGLHAKPMAFLDEDGFWSPFFELLERIIEGGFIPEEFRQAMVHSKTSSDAIEALLDRVVVLDI

SEQ ID NO: 15369 - DNA, 660 bp, Rhizobium leguminosarum bv. viciae 3841
  CDS (1)..(660): transl_table=11
ttgactgcattgaaatggaatagttgttttgccctcatgaccgaacaatctgtatcgattcgatccatctgcgtttactgcggctccaggccgggacgcgatccttcccacatggcggccgggcgtgctctcggaagagagatcgccgaatacggcctgcgcctcgtctatggcgggggtaccaaaggcatcatgggcgcggttgccagcggcgtgctttcaggcggcggtcaggtcacgggcatcattcccgaattcctgatcgatatggaagcgactcgccactcgctcggtcagctgaacgagctcattgtaacccctgacatgcatgcgcgcaaacacaccatgttcgagcgctcagatgccttcgtcgcgttgcccggcggcatcggtacgctggaggagatcgtcgagatcatgacctgggcgcagctcggccgccacgagaagccgatggtctttgccaacgtcaacggtttctgggatccgatgatggaactgatgcgccatatgaccgaagaaggcttcctgcacaccgcgcaccgggtgcagccgctcgtcgtcgacgagatctccggcatcattccggcgatcatggcccaggcagcccagctcgcggccgatcgtgacggcgaggacgaggtgatttcgaagatgtag

SEQ ID NO: 15370 - protein, 219 aa, Rhizobium leguminosarum bv. viciae 3841
MTALKWNSCFALMTEQSVSIRSICVYCGSRPGRDPSHMAAGRALGREIAEYGLRLVYGGGTKGIMGAVASGVLSGGGQVTGIIPEFLIDMEATRHSLGQLNELIVTPDMHARKHTMFERSDAFVALPGGIGTLEEIVEIMTWAQLGRHEKPMVFANVNGFWDPMMELMRHMTEEGFLHTAHRVQPLVVDEISGIIPAIMAQAAQLAADRDGEDEVISKM

SEQ ID NO: 15371 - DNA, 588 bp, Pseudomonas aeruginosa UCBPP-PA14; identical to SEQ ID NO: 211
  CDS (1)..(588): transl_table=11

SEQ ID NO: 15372 - protein, 195 aa, Pseudomonas aeruginosa UCBPP-PA14; identical to SEQ ID NO: 212

SEQ ID NO: 15373 - DNA, 585 bp, Mycobacterium smegmatis str. MC2 155
  CDS (1)..(585): transl_table=11
gtggtcgcgcgcgtctacgttggagatgtgaaagaaggacaggaccgccagtgggcggtgtgtgtgtactgcgcgtcgggaccgacgcatcccgaactgctcgagctggcagcagaggtcggctcgtcgatcgcggcgcgggggtggacgttggtgtccggtggcggcaacgtgtcggcgatgggtgccgtcgcgcaggccgcccgcgccaagggcggccacacggtcggtgtgatccccaaggcgctcgtgcatcgtgagctcgccgacgtcgacgcggccgaactcatcgtcaccgacacgatgcgcgagcggaagcgcgagatggagcaccgctcggacgcgttcatcgcgctgcccggcggcatcggcactctcgaagagttcttcgaggcctggaccgcgggctatctgggcatgcacgacaagccgctgatcctgctcgatccgttcggccactacgacgggctcttgacgtggttgcgggggctggtcccgacgggttacgtctcgcaacgggccatggacagcctggtggtggtcgacaacgtcgaggccgcgctcgaggcgtgcgcgcccgagtag

SEQ ID NO: 15374 - protein, 194 aa, Mycobacterium smegmatis str. MC2 155
MVARVYVGDVKEGQDRQWAVCVYCASGPTHPELLELAAEVGSSIAARGWTLVSGGGNVSAMGAVAQAARAKGGHTVGVIPKALVHRELADVDAAELIVTDTMRERKREMEHRSDAFIALPGGIGTLEEFFEAWTAGYLGMHDKPLILLDPFGHYDGLLTWLRGLVPTGYVSQRAMDSLVVVDNVEAALEACAPE

SEQ ID NO: 15375 - DNA, 594 bp, Acidovorax sp. JS42
  CDS (1)..(594): transl_table=11
atggctgatgtcgctttttcgatctgcgtgtacctgggctctcgcccgggcaacaaccccttgttcacagaagcggccacggccgtgggccactggataggccgccacggcggccagttggtctacggcggcggccgcagcggcctcatgggcacggtggcggaggccacgcgcgtggcaggcggccgggtcgtgggcatcattccgcaggctctcgtggacaaggaactggccaaccacttctgcgatgagctgcacatcgtgcagaccatgcacgagcgcaaggccatgatggccgagcgcagcgatgccttcgtcgccctgccgggcggcatcggcacactggaagagctgttcgaagtctggacctggcgccagctgggctaccacgacaagcctatcggcctgttggacaccgacggctactacggcggcatgctgggcttcctgcagcatgcggtacatggcgggctcatgggggaatggcagatgggcctgatccgcgtgggtacggagcccgatgccctgctcaccgcgctggtgcaggacgcaggcgcgaatgccagcgccatccccctgcgcagcgtgatctga

SEQ ID NO: 15376 - protein, 197 aa, Acidovorax sp. JS42
MADVAFSICVYLGSRPGNNPLFTEAATAVGHWIGRHGGQLVYGGGRSGLMGTVAEATRVAGGRVVGIIPQALVDKELANHFCDELHIVQTMHERKAMMAERSDAFVALPGGIGTLEELFEVWTWRQLGYHDKPIGLLDTDGYYGGMLGFLQHAVHGGLMGEWQMGLIRVGTEPDALLTALVQDAGANASAIPLRSVI

SEQ ID NO: 15377 - DNA, 582 bp, Exiguobacterium sibiricum 255-15
  CDS (1)..(582): transl_table=11
atgaaaaagttagcagtattttgtggttctaaagatggagcaacacccattttccggcaagccgcaacaacactcgggacgacgctcgcagcgcatcaaatcggacttgtctatggcggttcacgtgtcgggacgatgggcgccgttgcggatgctgtcctcgcagccaacggacatgcagtcggtgtcctgcctcatttcttgcaggaaaaggagattgcccatccgaacctgacggaacttcacctcgtcgaatcgatgcacgaccggaaagcgaagatggccgagcttgcggacggcttcatcatcttgcccggtggtccgggaacgatggaagagttttttgaagtttttacgtgggcacagctcggtcttcacgaaaagccgtgtggcatcttaaacattgacggctactatgacccgctcgttgccttgtttcagcagatggagacacaaggtttcctgattccggaacacgcggcgatgctgattgtagaatcggatccggaacggttgctcgaacgattccggacgtatcatgcgccgcaggtcaagacgtacatgaacacaaaacaaacgtaa

SEQ ID NO: 15378 - protein, 193 aa, Exiguobacterium sibiricum 255-15
MKKLAVFCGSKDGATPIFRQAATTLGTTLAAHQIGLVYGGSRVGTMGAVADAVLAANGHAVGVLPHFLQEKEIAHPNLTELHLVESMHDRKAKMAELADGFIILPGGPGTMEEFFEVFTWAQLGLHEKPCGILNIDGYYDPLVALFQQMETQGFLIPEHAAMLIVESDPERLLERFRTYHAPQVKTYMNTKQT

SEQ ID NO: 15379 - DNA, 612 bp, Prosthecochloris aestuarii DSM 271
  CDS (1)..(612): transl_table=11
atgtctaccagagagctaatgacagcattacgcggaatcgctaaccaggtcacacctgaacaacaaagctatcatcccatgacacgatccgtcaccgtctactgcagttcaagcaatcgcgtttcagaagagtttttcaaagcagcatcggaacttggtaaaacccttgctgaaaagcaaatcggactggtattcggaggaggcaatgtcgggctgatgggttgcattgctaatgccgtgatggagaacggaggcaacgtccgcggaatcattccgcgctttctggaagaaaaagaggtcggtcattacggcattacagaactccatgtcgtcgaaaccatgcatgaacgaaagataaaactgaccgaatgggccgatgcattcattgtcctccccggcggcttcggtacactcgacgaactgattgaagtcattacctggcgccatctcggtcatcacaataaaccaatactgctcttcaacgtcaacggcttctggaacccgctgactgacttcttcgacaatctcgcatcacagcatatggtcaagccggaccatcacaaactctataccatctgcaactccatagaagagattctcgtatcgctgtaa

SEQ ID NO: 15380 - protein, 203 aa, Prosthecochloris aestuarii DSM 271
MSTRELMTALRGIANQVTPEQQSYHPMTRSVTVYCSSSNRVSEEFFKAASELGKTLAEKQIGLVFGGGNVGLMGCIANAVMENGGNVRGIIPRFLEEKEVGHYGITELHVVETMHERKIKLTEWADAFIVLPGGFGTLDELIEVITWRHLGHHNKPILLFNVNGFWNPLTDFFDNLASQHMVKPDHHKLYTICNSIEEILVSL

SEQ ID NO: 15381 - DNA, 705 bp, Kineococcus radiotolerans SRS30216
  CDS (1)..(705): transl_table=11
gtgcctgcgggtgctcaccggctggctgctcgagggcaccgggcaggaggacgcgtgagcacgatctgcctgtacggcagcgcctccggcggcatcgaccccgcccacgtcgagctcgccaccacggtggggcgcctcatcggcgaacgcggccacgacctcgtctacggcgggggcgggacctccgtcatgggcgcggccgaggccgccgcccgcgccgccggggcccgcaccaccggcgtcatgccggaggcgctcatggccctcgagctgccgcctgcgggcctgggcgagctcgtcgtcaccgccgacatgcgccagcgcaaggcggagatggacgcccgcgccgacgcgttcgtcgtcctgcccggcgggctgggcaccctggaggagctcttcgagatctgggtcgcgcgcaccatcggcctgcacaccaagcccttggccgtcctggaccgcgcgggccactacgcgggtctgcggacctggctggagggcctggtcgagcgcgggttcgcccggcccctggtcttcgactgcatcctctggaccgaggacccggaggaggcgctggaccacctggagcgggcgccgcgggagcgggtgtcgctgcccagctcggagatcgtggggaccttcgtcgacttcccgccccagccggacggggacccgccgcggccccccgccgggggtggtccctcgtga

SEQ ID NO: 15382 - protein, 234 aa, Kineococcus radiotolerans SRS30216
MPAGAHRLAARGHRAGGRVSTICLYGSASGGIDPAHVELATTVGRLIGERGHDLVYGGGGTSVMGAAEAAARAAGARTTGVMPEALMALELPPAGLGELVVTADMRQRKAEMDARADAFVVLPGGLGTLEELFEIWVARTIGLHTKPLAVLDRAGHYAGLRTWLEGLVERGFARPLVFDCILWTEDPEEALDHLERAPRERVSLPSSEIVGTFVDFPPQPDGDPPRPPAGGGPS

SEQ ID NO: 15383 - DNA, 585 bp, Oceanicola batsensis HTCC2597
  CDS (1)..(585): transl_table=11
atgacctccgatgcccccgccctttccgtctgcgtcttctgcgggtcgcgccccggcgcggatcccgcctatgccgaggccgccgagaccttcggcacagcgctcgcgcaggagggctggcggctggtctacggggcgggcgacgtcgggctgatgggcggggtcgcgcgggcggcgcaggccgcgggcggcgagaccttcggcgtgatcccggtccacctgctgcacgccgaggtcggcaagcgcgacctgacgaatttcgtggtgaccgagaacatgcacgagcgcaagaaggtcatgttcatgaactcggacgcggtggtcgtcctgcccgggggcgcgggcacgctggacgagttcttcgagatcctcacctgggcgcagctcgggctgcacgccaagccgatcatcctgctgaatacctcggggttctggacgccgctcgtcgcgctggtcgatcacgtgatcgagcgcggcttcgcggccgagacgctcagggcgctggtgaccctggcggagaaccccgcagcggccatgcaggcgctgcgggcccatgagggtcaggcgagttcggcccgcagctga

SEQ ID NO: 15384 - protein, 194 aa, Oceanicola batsensis HTCC2597
MTSDAPALSVCVFCGSRPGADPAYAEAAETFGTALAQEGWRLVYGAGDVGLMGGVARAAQAAGGETFGVIPVHLLHAEVGKRDLTNFVVTENMHERKKVMFMNSDAVVVLPGGAGTLDEFFEILTWAQLGLHAKPIILLNTSGFWTPLVALVDHVIERGFAAETLRALVTLAENPAAAMQALRAHEGQASSARS

SEQ ID NO: 15385 - DNA, 588 bp, Pseudomonas putida GB-1; identical to SEQ ID NO: 213
  CDS (1)..(588): transl_table=11

SEQ ID NO: 15386 - protein, 195 aa, Pseudomonas putida GB-1; identical to SEQ ID NO: 214

SEQ ID NO: 15387 - DNA, 591 bp, unidentified eubacterium SCB49; identical to SEQ ID NO: 215
  CDS (1)..(591): transl_table=11

SEQ ID NO: 15388 - protein, 196 aa, unidentified eubacterium SCB49; identical to SEQ ID NO: 216

SEQ ID NO: 15389 - DNA, 690 bp, Oryza sativa subsp; identical to SEQ ID NO: 217
  CDS (1)..(690)

SEQ ID NO: 15390 - protein, 229 aa, Oryza sativa subsp; identical to SEQ ID NO: 218

SEQ ID NO: 15391 - DNA, 693 bp, Oryza sativa subsp
  CDS (1)..(693)
atggatgctaaccacgacaaggttgtggagagcggcagccgcgggggccggggaccggtgcggacgatctgcgtcttctgcggcagcaggcgggggaaccggccgtccttcagcgctgtcgctctcgacctcggaaagcagctggtcgagagggagctcgatctggtctacggcggcggcagcggcggcctgatgggcctcgtctccaagaccgtccacgacggcggccgccacgtcctcggggtcatccctagtgctctcctacctgaagaggtgtcaggggagacgttgggagaggcgaaagtggtcagggacatgcatgagcgcaagtcagaaatggcgaaacacgccgacgctttcatcgccctgccaggtggttacgggacaatcgaagaactgttggagatcatagcgtgggcgcagctggggatccacaacaaaccggtggggctgctcaatgtggacggctactacaacaacttactctcgctgttcgacaagggcgtcgaggaagggttcatcgacgccgcggcgcggaacatcttcgtcctcgccgacaacgccggcgaactactgaccaagctgacggaggcggcggcagcggcagcggcggcggttgagggcggcgacggggatcaggtcgacggcgaggccacggccgcggcggctggcttgaagaggaaaagaagctag

SEQ ID NO: 15392 - protein, 230 aa, Oryza sativa subsp
MDANHDKVVESGSRGGRGPVRTICVFCGSRRGNRPSFSAVALDLGKQLVERELDLVYGGGSGGLMGLVSKTVHDGGRHVLGVIPSALLPEEVSGETLGEAKVVRDMHERKSEMAKHADAFIALPGGYGTIEELLEIIAWAQLGIHNKPVGLLNVDGYYNNLLSLFDKGVEEGFIDAAARNIFVLADNAGELLTKLTEAAAAAAAAVEGGDGDQVDGEATAAAAGLKRKRS

SEQ ID NO: 15393 - DNA, 735 bp, Oryza sativa subsp
  CDS (1)..(735)
atggagaatagcagggagctgcagccggagtcgtcgccggcgaacaacaatagcaagaagaagaagaagaagaagacggcgtcgcggttccggcgtgtgtgcgtgttctgcggcagcagccccgggaagaaggcgtcgtaccaggtggccgccgtgcagctggggcagcagctggtggagcgcggcatcgacctggtgtacggcggcggcagcgttgggctgatggggctggtgtcccgcgccgtccacggaggcggcgggcacgtggtgggcgtggtgcccaatggcgtgctgccacgcgagctgatcggcgagacgctgggggaggtgagggcggtgggaagcatgcaccagcggaaggcggagatggcgcgggagtcggatgccttcatcgccctccccggcggctacggcacgctggaggagctcctggaggtcatcacctgggctcagctccgcatccaccacaagcccgtcggcctcctcaacgtcgacggctactacgactccctgctcgccttcatcgacaaggccgtccacgaaggcttcgtctcgccgcccgcccgccgcatcatcgtcgccgcgcccaccgcctccgacctgctctgcaagctcgaggaatacgtgccgccgccgcacgacgccaccgccctgaagctcacctgggagatgtccaccgtatcggagcagcacgccggaagcatctactcccccaagcccgacatggcacgctag

SEQ ID NO: 15394 - protein, 244 aa, Oryza sativa subsp
MENSRELQPESSPANNNSKKKKKKKTASRFRRVCVFCGSSPGKKASYQVAAVQLGQQLVERGIDLVYGGGSVGLMGLVSRAVHGGGGHVVGVVPNGVLPRELIGETLGEVRAVGSMHQRKAEMARESDAFIALPGGYGTLEELLEVITWAQLRIHHKPVGLLNVDGYYDSLLAFIDKAVHEGFVSPPARRIIVAAPTASDLLCKLEEYVPPPHDATALKLTWEMSTVSEQHAGSIYSPKPDMAR

SEQ ID NO: 15395 - DNA, 606 bp, Vitis vinifera; identical to SEQ ID NO: 219
  CDS (1)..(606)
  misc_feature (21)..(21): r is g or a

SEQ ID NO: 15396 - protein, 201 aa, Vitis vinifera; identical to SEQ ID NO: 220

SEQ ID NO: 15397 - DNA, 651 bp, Vitis vinifera; identical to SEQ ID NO: 221
  CDS (1)..(651)

SEQ ID NO: 15398 - protein, 216 aa, Vitis vinifera; identical to SEQ ID NO: 222

SEQ ID NO: 15399 - DNA, 645 bp, Vitis vinifera; identical to SEQ ID NO: 223
  CDS (1)..(645)

SEQ ID NO: 15400 - protein, 214 aa, Vitis vinifera; identical to SEQ ID NO: 224

SEQ ID NO: 15401 - DNA, 801 bp, Vitis vinifera; identical to SEQ ID NO: 225
  CDS (1)..(801)

SEQ ID NO: 15402 - protein, 266 aa, Vitis vinifera; identical to SEQ ID NO: 226

SEQ ID NO: 15403 - DNA, 654 bp, Vitis vinifera; identical to SEQ ID NO: 227
  CDS (1)..(654)

SEQ ID NO: 15404 - protein, 217 aa, Vitis vinifera; identical to SEQ ID NO: 228

SEQ ID NO: 15405 - DNA, 678 bp, Pichia guilliermondii; identical to SEQ ID NO: 229
  CDS (1)..(678)

SEQ ID NO: 15406 - protein, 225 aa, Pichia guilliermondii; identical to SEQ ID NO: 230

SEQ ID NO: 15407 - DNA, 591 bp, Ostreococcus tauri; identical to SEQ ID NO: 231
  CDS (1)..(591)

SEQ ID NO: 15408 - protein, 196 aa, Ostreococcus tauri; identical to SEQ ID NO: 232

SEQ ID NO: 15409 - DNA, 690 bp, Phaeosphaeria nodorum; identical to SEQ ID NO: 233
  CDS (1)..(690)

SEQ ID NO: 15410 - protein, 229 aa, Phaeosphaeria nodorum; identical to SEQ ID NO: 234

SEQ ID NO: 15411 - DNA, 645 bp, Medicago truncatula; identical to SEQ ID NO: 235
  CDS (1)..(645)

SEQ ID NO: 15412 - protein, 214 aa, Medicago truncatula; identical to SEQ ID NO: 236

SEQ ID NO: 15413 - DNA, 660 bp, Medicago truncatula; identical to SEQ ID NO: 237
  CDS (1)..(660)

SEQ ID NO: 15414 - protein, 219 aa, Medicago truncatula; identical to SEQ ID NO: 238

SEQ ID NO: 15415 - DNA, 783 bp, Medicago truncatula; identical to SEQ ID NO: 239
  CDS (1)..(783)

SEQ ID NO: 15416 - protein, 260 aa, Medicago truncatula; identical to SEQ ID NO: 240

SEQ ID NO: 15417 - DNA, 732 bp, Aspergillus oryzae; identical to SEQ ID NO: 241
  CDS (1)..(732)

SEQ ID NO: 15418 - protein, 243 aa, Aspergillus oryzae; identical to SEQ ID NO: 242

SEQ ID NO: 15419 - DNA, 711 bp, Aspergillus oryzae; identical to SEQ ID NO: 243
  CDS (1)..(711)

SEQ ID NO: 15420 - protein, 236 aa, Aspergillus oryzae; identical to SEQ ID NO: 244

SEQ ID NO: 15421 - DNA, 576 bp, Streptomyces turgidiscabies; identical to SEQ ID NO: 245
  CDS (1)..(576): transl_table=11

SEQ ID NO: 15422 - protein, 191 aa, Streptomyces turgidiscabies; identical to SEQ ID NO: 246

SEQ ID NO: 15423 - DNA, 603 bp, Oryza sativa subsp; identical to SEQ ID NO: 247
  CDS (1)..(603)

SEQ ID NO: 15424 - protein, 200 aa, Oryza sativa subsp; identical to SEQ ID NO: 248

SEQ ID NO: 15425 - DNA, 642 bp, Arabidopsis thaliana; identical to SEQ ID NO: 249
  CDS (1)..(642)
  misc_feature (467)..(467): y is t or c

SEQ ID NO: 15426 - protein, 213 aa, Arabidopsis thaliana; identical to SEQ ID NO: 250
  misc_feature (156)..(156): The Xaa at location 156 stands for Ala, or Val.

SEQ ID NO: 15427 - DNA, 696 bp, Oryza sativa subsp; identical to SEQ ID NO: 251
  CDS (1)..(696)

SEQ ID NO: 15428 - protein, 231 aa, Oryza sativa subsp; identical to SEQ ID NO: 252

SEQ ID NO: 15429 - DNA, 642 bp, Arabidopsis thaliana; identical to SEQ ID NO: 253
  CDS (1)..(642)

SEQ ID NO: 15430 - protein, 213 aa, Arabidopsis thaliana; identical to SEQ ID NO: 254

SEQ ID NO: 15431 - DNA, 546 bp, Arabidopsis thaliana
  CDS (1)..(546)
atggaagagacaaaatcaagattcaggaggatctgtgtcttctgcggaagcagttccggcaacaaaaccacttatcacgacgctgctctccaactcgcccaccaactggtggagagaaacatcgatttggtgtatggaggaggaagcgtggggctaatgggtctcatttctcaagctgttcatgatggtggtcgagaagttataacagtatcgactatgcaccaaaggaaggctgaaatgggtcgccaagcggatgccttcatcgcacttcctggtggatatgggacatttgaagagttgttggaagtcatcacctggtctcagcttgggattcacactaaaccggtgggactattgaacgtggatggattctacgattcactattgacgtttatagataaggcagtggacgaaggcttcgtctcctccaccgctcgccgtatcattgtctcggctccaaacgctcctcaattacttcaacttcttgaggtttttttatttgcctttcattactttttgattattctatttaatactatagactaa

SEQ ID NO: 15432 - protein, 181 aa, Arabidopsis thaliana
MEETKSRFRRICVFCGSSSGNKTTYHDAALQLAHQLVERNIDLVYGGGSVGLMGLISQAVHDGGREVITVSTMHQRKAEMGRQADAFIALPGGYGTFEELLEVITWSQLGIHTKPVGLLNVDGFYDSLLTFIDKAVDEGFVSSTARRIIVSAPNAPQLLQLLEVFLFAFHYFLIILFNTID

SEQ ID NO: 15433 - DNA, 807 bp, Arabidopsis thaliana; identical to SEQ ID NO: 255
  CDS (1)..(807)

SEQ ID NO: 15434 - protein, 268 aa, Arabidopsis thaliana; identical to SEQ ID NO: 256

SEQ ID NO: 15435 - DNA, 609 bp, Arabidopsis thaliana; identical to SEQ ID NO: 257
  CDS (1)..(609)

SEQ ID NO: 15436 - protein, 202 aa, Arabidopsis thaliana; identical to SEQ ID NO: 258

SEQ ID NO: 15437 - DNA, 597 bp, Rhodococcus fascians
  CDS (1)..(597): transl_table=11
atgaaccttcgaccaatgcccgcgactacggtctcggcacaggcccgcccgacccccaagagcgtcacggtcttctgcggagctatgccagggcgcgggaccaaatatggacagctcgcagaggggatggggcgtgcgattgctagatcgaagctgcgcctcgtttatggtggcgcccgagtcggcctcatgggcaccctcgcgaacgcggccttggactccggcggaaccgtcgttggcgtgatccctgagagcttcactgcgatacccgaggctgcgcatcatggactgacagaactacacgtcgtccatgacatgcaccaacgcaaagctctcatggccgaactcggtgacgcattcattgccctccccggcggtgtcggaaccgcagaagagttcttcgaggtccttacgtggtcacacctggggcttcacaataaaccctgtgtactgctgaacgacaacgagtattaccgccccttgctctcctacatcgagcacgctgccgtcgaaggatttatcacccccgcaacccggtctcgcgtaatcgtctgcaaagacatcgagggggctatcgcggccattcgctcaccctaa

SEQ ID NO: 15438 - protein, 198 aa, Rhodococcus fascians
MNLRPMPATTVSAQARPTPKSVTVFCGAMPGRGTKYGQLAEGMGRAIARSKLRLVYGGARVGLMGTLANAALDSGGTVVGVIPESFTAIPEAAHHGLTELHVVHDMHQRKALMAELGDAFIALPGGVGTAEEFFEVLTWSHLGLHNKPCVLLNDNEYYRPLLSYIEHAAVEGFITPATRSRVIVCKDIEGAIAAIRSP

SEQ ID NO: 15439 - DNA, 588 bp, Pseudomonas aeruginosa; identical to SEQ ID NO: 259
  CDS (1)..(588): transl_table=11

SEQ ID NO: 15440 - protein, 195 aa, Pseudomonas aeruginosa; identical to SEQ ID NO: 260

SEQ ID NO: 15441 - DNA, 651 bp, Arabidopsis thaliana; identical to SEQ ID NO: 261
  CDS (1)..(651)

SEQ ID NO: 15442 - protein, 216 aa, Arabidopsis thaliana; identical to SEQ ID NO: 262

SEQ ID NO: 15443 - DNA, 738 bp, Saccharomyces cerevisiae; identical to SEQ ID NO: 263
  CDS (1)..(738)

SEQ ID NO: 15444 - protein, 245 aa, Saccharomyces cerevisiae; identical to SEQ ID NO: 264

SEQ ID NO: 15445 - DNA, 729 bp, Oryza sativa; identical to SEQ ID NO: 265
  CDS (1)..(729)

SEQ ID NO: 15446 - protein, 242 aa, Oryza sativa; identical to SEQ ID NO: 266

SEQ ID NO: 15447 - DNA, 672 bp, Oryza sativa; identical to SEQ ID NO: 267
  CDS (1)..(672)

SEQ ID NO: 15448 - protein, 223 aa, Oryza sativa; identical to SEQ ID NO: 268

SEQ ID NO: 15449 - DNA, 870 bp, Oryza sativa; identical to SEQ ID NO: 269
  CDS (1)..(870)

SEQ ID NO: 15450 - protein, 289 aa, Oryza sativa; identical to SEQ ID NO: 270

SEQ ID NO: 15451 - DNA, 636 bp, Oryza sativa; identical to SEQ ID NO: 271
  CDS (1)..(636)

SEQ ID NO: 15452 - protein, 211 aa, Oryza sativa; identical to SEQ ID NO: 272

SEQ ID NO: 15453 - DNA, 1032 bp, Oryza sativa; identical to SEQ ID NO: 273
  CDS (1)..(1032)

SEQ ID NO: 15454 - protein, 343 aa, Oryza sativa; identical to SEQ ID NO: 274

SEQ ID NO: 15455 - DNA, 741 bp, Oryza sativa; identical to SEQ ID NO: 275
  CDS (1)..(741)

SEQ ID NO: 15456 - protein, 246 aa, Oryza sativa; identical to SEQ ID NO: 276

SEQ ID NO: 15457 - DNA, 753 bp, Oryza sativa; identical to SEQ ID NO: 277
  CDS (1)..(753)

SEQ ID NO: 15458 - protein, 250 aa, Oryza sativa; identical to SEQ ID NO: 278

SEQ ID NO: 15459 - DNA, 672 bp, Oryza sativa; identical to SEQ ID NO: 279
  CDS (1)..(672)

SEQ ID NO: 15460 - protein, 223 aa, Oryza sativa; identical to SEQ ID NO: 280

SEQ ID NO: 15461 - DNA, 651 bp, Oryza sativa; identical to SEQ ID NO: 281
  CDS (1)..(651)

SEQ ID NO: 15462 - protein, 216 aa, Oryza sativa; identical to SEQ ID NO: 282

SEQ ID NO: 15463 - DNA, 684 bp, Oryza sativa; identical to SEQ ID NO: 285
  CDS (1)..(684)

SEQ ID NO: 15464 - protein, 227 aa, Oryza sativa; identical to SEQ ID NO: 286

SEQ ID NO: 15465 - DNA, 615 bp, Oryza sativa; identical to SEQ ID NO: 287
  CDS (1)..(615)

SEQ ID NO: 15466 - protein, 204 aa, Oryza sativa; identical to SEQ ID NO: 288

SEQ ID NO: 15467 - DNA, 735 bp, Oryza sativa; identical to SEQ ID NO: 289
  CDS (1)..(735)

SEQ ID NO: 15468 - protein, 244 aa, Oryza sativa; identical to SEQ ID NO: 290

SEQ ID NO: 15469 - DNA, 651 bp, Brassica napus
  CDS (1)..(651)
atggaggagaaccagagaagcaggtttaaaaaagtttgcgtcttttgcggaagccactctggtaatagagaagtcttcagcgatgctgccatcgaactcggcaatgaactcgtgaagaggaagatagacttggtttatggaggaggaagtgttgggctgatgggtcttatctccaggagagtctatgaaggtggtttccatgtactcgggatcattcccaaagctttgatgccaattgagatatctggtgagactgttggagaagtaagggttgttgctgacatgcacgaacgcaaagctgcaatggcacaagaatctgaggccttcattgctctccctggaggttatggaacaatggaggagctgctggagatgataacatggtcacaactcggtatccataagaaaacggttggtatattgaatactgatggctactataacaatttgcttgcgttatttgacactggcgtccaagaaggttttatcaaaccaggggcacgtaatattgtggtttctgcaccaacagccaaagagcttatggagaagatggaggaatatactccttcacacaagcatgttgcatcccacgaaagctggaatgttgaggagcttggagcttaccctggacaacaaagcaatcatcaataa

SEQ ID NO: 15470 - protein, 216 aa, Brassica napus; identical to SEQ ID NO: 86

SEQ ID NO: 15471 - DNA, 678 bp, Glycine max; identical to SEQ ID NO: 291
  CDS (1)..(678)

SEQ ID NO: 15472 - protein, 225 aa, Glycine max; identical to SEQ ID NO: 292

SEQ ID NO: 15473 - DNA, 630 bp, Glycine max; identical to SEQ ID NO: 293
  CDS (1)..(630)

SEQ ID NO: 15474 - protein, 209 aa, Glycine max; identical to SEQ ID NO: 294

SEQ ID NO: 15475 - DNA, 627 bp, Triticum aestivum; identical to SEQ ID NO: 295
  CDS (1)..(627)

SEQ ID NO: 15476 - protein, 208 aa, Triticum aestivum; identical to SEQ ID NO: 296

SEQ ID NO: 15477 - DNA, 705 bp, Triticum aestivum
  CDS (1)..(705)
atggctgttgaggccacggcagagaagaacaccggcgccgctgccccggagagcggggacaggcgctcccgcttcaggcggatctgcgtctactgcggcagcgccaagggccggaaggccagctaccaggacgccgccgtcgagctcggcaaggagctggtggagaggggcatcgacctggtctacggaggaggctccattgggctcatgggcctcgtctcccacgcagtccatgatggaggacgccatgtgattggggtcatccccaagtccttgatgcccagagaggtcactggagagcctgttggggaagtcagagccgtctccggcatgcacgagaggaaggccgagatggttcgctctgctgatgccttcattgccttacccggtggctacgggactctggatgagctgctcgaggtcctcacgtgggcccaacttgggatccacaagaagccgatcgggttgctgaacgtggatgggttctacaatttcttcctgtccttcatcgacatggctgtgagcgaaggattcatacaggaggacgcgaggcacctcgtcatctcagctccaaccgccaaggagctagttctcaagctcgaggagtatgttccggactacgagatcgggctggtgtgggaggatcagggccagatcacgcacggcttcgtgccggagctggagcccggcattgcgtcgtcatga

SEQ ID NO: 15478 - protein, 234 aa, Triticum aestivum; identical to SEQ ID NO: 94

SEQ ID NO: 15479 - DNA, 627 bp, Triticum aestivum; identical to SEQ ID NO: 297
  CDS (1)..(627)

SEQ ID NO: 15480 - protein, 208 aa, Triticum aestivum; identical to SEQ ID NO: 298

SEQ ID NO: 15481 - DNA, 720 bp, Triticum aestivum; identical to SEQ ID NO: 299
  CDS (1)..(720)

SEQ ID NO: 15482 - protein, 239 aa, Triticum aestivum; identical to SEQ ID NO: 300

SEQ ID NO: 15483 - DNA, 651 bp, Linum usitatissimum; identical to SEQ ID NO: 301
  CDS (1)..(651)

SEQ ID NO: 15484 - protein, 216 aa, Linum usitatissimum; identical to SEQ ID NO: 302

SEQ ID NO: 15485 - DNA, 786 bp, Zea mays; identical to SEQ ID NO: 303
  CDS (1)..(786)

SEQ ID NO: 15486 - protein, 261 aa, Zea mays; identical to SEQ ID NO: 304

SEQ ID NO: 15487 - DNA, 627 bp, Zea mays; identical to SEQ ID NO: 305
  CDS (1)..(627)

SEQ ID NO: 15488 - protein, 208 aa, Zea mays; identical to SEQ ID NO: 306

SEQ ID NO: 15489 - DNA, 660 bp, Brassica napus; identical to SEQ ID NO: 307
  CDS (1)..(660)

SEQ ID NO: 15490 - protein, 219 aa, Brassica napus; identical to SEQ ID NO: 308

SEQ ID NO: 15491 - DNA, 711 bp, Brassica napus; identical to SEQ ID NO: 309
  CDS (1)..(711)

SEQ ID NO: 15492 - protein, 236 aa, Brassica napus; identical to SEQ ID NO: 310

SEQ ID NO: 15493 - DNA, 642 bp, Brassica napus; identical to SEQ ID NO: 311
  CDS (1)..(642)

SEQ ID NO: 15494 - protein, 213 aa, Brassica napus; identical to SEQ ID NO: 312

SEQ ID NO: 15495 - DNA, 642 bp, Brassica napus; identical to SEQ ID NO: 313
  CDS (1)..(642)

SEQ ID NO: 15496 - protein, 213 aa, Brassica napus; identical to SEQ ID NO: 314

SEQ ID NO: 15497 - DNA, 651 bp, Brassica napus; identical to SEQ ID NO: 315
  CDS (1)..(651)

SEQ ID NO: 15498 - protein, 216 aa, Brassica napus; identical to SEQ ID NO: 316

SEQ ID NO: 15499 - DNA, 630 bp, Glycine max; identical to SEQ ID NO: 317
  CDS (1)..(630)

SEQ ID NO: 15500 - protein, 209 aa, Glycine max; identical to SEQ ID NO: 318

SEQ ID NO: 15501 - DNA, 660 bp, Glycine max; identical to SEQ ID NO: 319
  CDS (1)..(660)

SEQ ID NO: 15502 - protein, 219 aa, Glycine max; identical to SEQ ID NO: 320

SEQ ID NO: 15503 - DNA, 648 bp, Glycine max; identical to SEQ ID NO: 321
  CDS (1)..(648)

SEQ ID NO: 15504 - protein, 215 aa, Glycine max; identical to SEQ ID NO: 322

SEQ ID NO: 15505 - DNA, 645 bp, Glycine max; identical to SEQ ID NO: 323
  CDS (1)..(645)

SEQ ID NO: 15506 - protein, 214 aa, Glycine max; identical to SEQ ID NO: 324

SEQ ID NO: 15507 - DNA, 678 bp, Glycine max; identical to SEQ ID NO: 325
  CDS (1)..(678)

SEQ ID NO: 15508 - protein, 225 aa, Glycine max; identical to SEQ ID NO: 326

SEQ ID NO: 15509 - DNA, 648 bp, Brassica napus; identical to SEQ ID NO: 327
  CDS (1)..(648)

SEQ ID NO: 15510 - protein, 215 aa, Brassica napus; identical to SEQ ID NO: 328

SEQ ID NO: 15511 - DNA, 657 bp, Zea mays; identical to SEQ ID NO: 329
  CDS (1)..(657)

SEQ ID NO: 15512 - protein, 218 aa, Zea mays; identical to SEQ ID NO: 330

SEQ ID NO: 15513 - DNA, 711 bp, Zea mays; identical to SEQ ID NO: 331
  CDS (1)..(711)

SEQ ID NO: 15514 - protein, 236 aa, Zea mays; identical to SEQ ID NO: 332

SEQ ID NO: 15515 - DNA, 798 bp, Zea mays; identical to SEQ ID NO: 333
  CDS (1)..(798)

SEQ ID NO: 15516 - protein, 265 aa, Zea mays; identical to SEQ ID NO: 334

SEQ ID NO: 15517 - DNA, 672 bp, Zea mays; identical to SEQ ID NO: 335
  CDS (1)..(672)

SEQ ID NO: 15518 - protein, 223 aa, Zea mays; identical to SEQ ID NO: 336

SEQ ID NO: 15519 - DNA, 768 bp, Zea mays; identical to SEQ ID NO: 337
  CDS (1)..(768)

SEQ ID NO: 15520 - protein, 255 aa, Zea mays; identical to SEQ ID NO: 338

SEQ ID NO: 15521 - DNA, 627 bp, Zea mays; identical to SEQ ID NO: 339
  CDS (1)..(627)

SEQ ID NO: 15522 - protein, 208 aa, Zea mays; identical to SEQ ID NO: 340

SEQ ID NO: 15523 - DNA, 774 bp, Zea mays; identical to SEQ ID NO: 341
  CDS (1)..(774)

SEQ ID NO: 15524 - protein, 257 aa, Zea mays; identical to SEQ ID NO: 342

SEQ ID NO: 15525 - DNA, 22 bp, Artificial sequence
  primer
atggaaactcaacaccaacaac

SEQ ID NO: 15526 - DNA, 23 bp, Artificial sequence
  primer
tcaacgggaaatatctgactttg

SEQ ID NO: 15527 - protein, 233 aa, Artificial sequence
  consensus sequence
  Variant (3)..(3): Xaa in position 3 is any amino acid
  Variant (7)..(7): Xaa in position 7 is any amino acid
  Variant (8)..(8): Xaa in position 8 is any or no amino acid
  Variant (10)..(12): Xaa in position 10 to 12 is any amino acid
  Variant (13)..(21): Xaa in position 13 to 21 is any or no amino acid
  Variant (23)..(24): Xaa in position 23 to 24 is any amino acid
  Variant (27)..(32): Xaa in position 27 to 32 is any amino acid
  Variant (33)..(61): Xaa in position 33 to 61 is any or no amino acid
  Variant (68)..(69): Xaa in position 68 to 69 is any amino acid
  Variant (74)..(82): Xaa in position 74 to 82 is any amino acid
  Variant (83)..(84): Xaa in position 83 to 84 is any or no amino acid
  Variant (86)..(86): Xaa in position 86 is any amino acid
  Variant (87)..(87): Xaa in position 87 is any or no amino acid
  Variant (89)..(89): Xaa in position 89 is any amino acid
  Variant (91)..(91): Xaa in position 91 is any amino acid
  Variant (94)..(95): Xaa in position 94 to 95 is any amino acid
  Variant (97)..(98): Xaa in position 97 to 98 is any amino acid
  Variant (99)..(139): Xaa in position 99 to 139 is any or no amino acid
  Variant (141)..(144): Xaa in position 141 to 144 is any amino acid
  Variant (145)..(152): Xaa in position 145 to 152 is any or no amino acid
  Variant (154)..(156): Xaa in position 154 to 156 is any amino acid
  Variant (158)..(159): Xaa in position 158 to 159 is any amino acid
  Variant (162)..(162): Xaa in position 162 is any amino acid
  Variant (165)..(166): Xaa in position 165 to 166 is any amino acid
  Variant (168)..(171): Xaa in position 168 to 171 is any amino acid
  Variant (172)..(177): Xaa in position 172 to 177 is any or no amino acid
  Variant (179)..(179): Xaa in position 179 is any amino acid
  Variant (181)..(181): Xaa in position 181 is any amino acid
  Variant (187)..(187): Xaa in position 187 is any amino acid
  Variant (190)..(190): Xaa in position 190 is any amino acid
  Variant (193)..(194): Xaa in position 193 to 194 is any amino acid
  Variant (196)..(197): Xaa in position 196 to 197 is any amino acid
  Variant (200)..(200): Xaa in position 200 is any amino acid
  Variant (204)..(204): Xaa in position 204 is any amino acid
  Variant (206)..(206): Xaa in position 206 is any amino acid
  Variant (209)..(211): Xaa in position 209 to 211 is any amino acid
  Variant (214)..(215): Xaa in position 214 to 215 is any amino acid
  Variant (217)..(220): Xaa in position 217 to 220 is any amino acid
  Variant (222)..(231): Xaa in position 222 to 231 is any amino acid
CVXCGSXXGXXXXXXXXXXXXAXXLGXXXXXXXXXXXXXXXXXXXXXXXXXXXXXXXXXXXLVYGGGXXGLMGXXXXXXXXXXXGXXVXGXIPXXLXXXXXXXXXXXXXXXXXXXXXXXXXXXXXXXXXXXXXXXXXXXEXXXXXXXXXXXXEXXXVXXMHXRKXXMXXXXXXXXXXDXFXALPGGXGTXEEXXEXXTWXQLGXHXKPXXXLNXXGXXXXLXXXXXXXXXXGF

SEQ ID NO: 15528 - protein, 20 aa, Artificial sequence
  protein pattern
  Variant (2)..(2): Xaa in position 2 is any amino acid
  Variant (6)..(6): Xaa in position 6 is any amino acid
  Variant (8)..(9): Xaa in position 8 to 9 is any amino acid
  Variant (10)..(10): Xaa in position 10 is Ala, Gly, Pro or Thr
  Variant (11)..(12): Xaa in position 11 to 12 is any amino acid
  Variant (13)..(13): Xaa in position 13 is Phe, Ile, Leu or Val
  Variant (14)..(14): Xaa in position 14 is any amino acid
  Variant (15)..(15): Xaa in position 15 is Asp, Glu or Asn
  Variant (16)..(17): Xaa in position 16 to 17 is any amino acid
  Variant (18)..(18): Xaa in position 18 is Gly, Asn or Ser
  Variant (19)..(19): Xaa in position 19 is Phe or Tyr
  Variant (20)..(20): Xaa in position 20 is Phe, Trp or Tyr
WXQLGXHXXXXXXXXXXXXX

SEQ ID NO: 15529 - protein, 13 aa, Artificial sequence
  protein pattern
  Variant (2)..(2): Xaa in position 2 is Ile or Val
  Variant (3)..(3): Xaa in position 3 is Ala or Thr
  Variant (4)..(4): Xaa in position 4 is Leu or Met
  Variant (8)..(8): Xaa in position 8 is any amino acid
  Variant (11)..(11): Xaa in position 11 is any amino acid
FXXXPGGXGTXEE

SEQ ID NO: 15530 - protein, 15 aa, Artificial sequence
  protein pattern
  Variant (6)..(8): Xaa in position 6 to 8 is any or no amino acid
  Variant (10)..(10): Xaa in position 10 is Ile or Leu
  Variant (13)..(13): Xaa in position 13 is any amino acid
  Variant (14)..(14): Xaa in position 14 is Ile or Val
  Variant (15)..(15): Xaa in position 15 is Ala or Ser
LVYGGXXXGXMGXXX

SEQ ID NO: 15531 - protein, 20 aa, Artificial sequence
  protein pattern
  Variant (2)..(2): Xaa in position 2 is any amino acid
  Variant (3)..(4): Xaa in position 3 to 4 is any or no amino acid
  Variant (6)..(7): Xaa in position 6 to 7 is any amino acid
  Variant (8)..(8): Xaa in position 8 is any or no amino acid
  Variant (11)..(11): Xaa in position 11 is any amino acid
  Variant (14)..(15): Xaa in position 14 to 15 is any amino acid
  Variant (17)..(19): Xaa in position 17 to 19 is any amino acid
  Variant (20)..(20): Xaa in position 20 is Ala, Gly or Ser
EXXXVXXXMHXRKXXMXXXX

SEQ ID NO: 15532 - DNA, 1497 bp, Brassica napus
  CDS (1)..(1497)
atggcgatgatagagcaaaggccgaagacgaagatcgtgtgtaccgttggtcccgcttccagatccgttgagatggtcgagaagcttctcagggctggcatgaacgtcgctaggtttaacttctctcacggatctcatgagtaccaccaggagactctcgataatctccgtcaagctatgctcaacactggtatcctctgcgccgtcatgctcgataccaagggtccagagatccgaaccggattcttgaaagatgggaaaccaatccagttgaaacaaggccaagagatcaccatctccactgactacgacttgcagggagacgaggaaacaatctgcatgagctacaagaagttggctgaggatgtgaacccagggatggttatcctctgtgctgacggtacaatctcgttactggtcctctcctgtgacacagagaacggcacagtccgttgccgctgcgagaactctgccatgcttggtgagaggaagaacgttaatctcccaggtgttgttgtggacctcccaactctaactgagaaagacaaagaagacatcatgaagtggggagtcccgaatcagatcgatatgatcactttgtcttttgtcagaaaaggttcggacttggttcaggtcaggaaactgttaggagatcatgccaagaacattcttctcatgtcaaaggttgagaaccaagaaggtgtggcgaacttcgatgacattcttgtcaactccgacgcgtttatgattgcaagaggagatctcggcatggagatcccaatcgagaagatcttcctagctcagaaagtgatgatctacaaatgcaacatccagggaaaaccagtggtcacagcgactcagatgctcgagtccatgatcaaatcccctcgacccacaagagctgaagccactgacgtagcaaacgcagtcctcgacggcaccgactgtgtcatgctcagcggagaaaccgcagctggagcttaccctgagctagctgtacgcacgatggccaagatctgcgttgaagccgagagcacgcttgactacggagacgtcttcaagaggatcatgcagtactctccggttccaatgtccccgctggagtcactggcctcctctgcagtcagaacagctaactcggctagagccacgctcatcatggtcctaaccaggggaggaagcacggcgaggcttgtggctaaatacagaccagggatgcctattttgtcagtcgttgttcccgagatgaaaacagacttctttgactggtcttgcagcgacgaatcgccggcgaggcacagtctcatcttccgtgggttgattccggtgctgtacgcagggtctgctagagcctcgcatgatgagtccacagaagaagctattgagtttgcgactcagcatgggaaagagaagcagctgtgtaagactggagactctgttgttgctctgctccgagttggtaatgcttctctaatcaagatcttgaccgtcaagtga

SEQ ID NO: 15533 - protein, 498 aa, Brassica napus; identical to SEQ ID NO: 8854

SEQ ID NO: 15534 - DNA, 2347 bp, Oryza sativa
  CDS (116)..(1648)
gggagaccaagaagaagaaagaggaaaccacacccacctccatctccgcctccgccgccgccgccgccgaccaagtcgagggggagatccagcgagagcgaggaggaggaggaggatggcggtgatggaggagcagcaggagggagccgcgggggtgatgcggcggaggcccaagacgaagatcgtgcgcacgctggggccggcgtcgaggtcggtggagatgatcgggcggctgctccgcgccgggatgtgcgtcgcgcgcttcaacttctcccacggatcccacgagtaccaccaggagacgctcgacaacctccgcgccgccatggagagcaccggcatcctctgcgccgtcatgctcgacaccaaggggccagagatccgaactggatttctgaaagatggaaaacccgtacagttgaagaagggtcaagaaatcacagtttcaactgattatagcataaagggtgatgacaacatgatatcaatgagctacaagaagctagcggtggatctgaagccaggcagtgtaatattatgtgctgatggcaccatcactcttactgtccttcactgtgataaagagcaaggcttggttcgctgccgttgtgagaacactgctatgcttggtgagaggaagaatgttaaccttccaggagttattgttgatctcccgacacttactgagaaggacaaggaggatattcttaaatggggtgtcccaaacaagattgacatgattgctctgtcttttgttcgtaaaggctcagaccttgtagaggtcaggaaggtgcttgggaagcatgcaaagtcaataatgctgatgtcaaaggttgagaatcaagagggagtggctaactttgatgatatcctggcacaatctgatgcttttatggttgcaaggggtgatttgggaatggaaattccgatagagaagatcttttatgcacagaaggtgatgattttcaagtgcaatattcagggcaagccagttgtgactgcaacccagatgttggaatctatgatcaagtctccccgccctactagagcagaagcgactgatgttgccaatgcagttcttgatggcactgactgtgtcatgctcagtggtgagacagctgctggggcttacccggaactggctgtacggaccatggccaagatctgcctgcaagcggagtcatgcgtcgaccatgccgctgttttcaagtccattaccgcatcagctccaattcccatgagcccattggagagccttgcatcatcagctgtgcgtacagcgaactctgccaaggcggcgctcatcttggtcctgactaggggaggaacaactgctaggctggtggccaagtacaggccatccatgccgattctgtccgtcgtggttcctgagctgaaacagaccgactccttcgactggacctgcagcgacgaagctcctgcgcggcacagcctcatcgtcaggggagtgatcccgatgctgagtgtagccactgccaaggccttcgacaacgaagccactgaagaagctctcgggttcgccatcagcaacgccaaggcgatggggctctgcaactccggtgagtccgtcgtcgccctccaccggatcggaactgcatctgtcatcaagctcctgacagcgaactagtggcagacggcagttaatccacaccattttgctcggaggaaaatttttgctgggggatttttacttaccacgcatatctatagcttttgttgccatgatagtggcatttgcattcaggtgcaccttcggtgtttgctgttcatgggttaaccattgaaacagttaaattcgttattgctaccgcagcttatttcgctgcctctgctgctactagtattaaacttgacagccgttacgtaatttgttagttctattctgttctgttttcttggctgaaatgcatttcttgaattcgtttcgttatgatgaatatggttcggggttctgcgtaactggttactgctagggatatgaaatggagttgatagtttccgtccactacttgtagggatataaaatggagtggatagtttcatccgttcggagtagaaactgctccaaatggattgaacaatgttatttggatatctgttgaaggcgtgaaacatctcattttttacatgttggacttaattaggcattgtttataatttatgatcaaacttttttatataaaacaagcttattttgtgtttatgtgatggtatttgtttctattagaagtttaggtggttttcatgttttgagaaatttttgttttgatatttgtgtacgataaaaacgaatatggtataaacattatccatctgtattcatcct

SEQ ID NO: 15535 - protein, 510 aa, Oryza sativa
MAVMEEQQEGAAGVMRRRPKTKIVRTLGPASRSVEMIGRLLRAGMCVARFNFSHGSHEYHQETLDNLRAAMESTGILCAVMLDTKGPEIRTGFLKDGKPVQLKKGQEITVSTDYSIKGDDNMISMSYKKLAVDLKPGSVILCADGTITLTVLHCDKEQGLVRCRCENTAMLGERKNVNLPGVIVDLPTLTEKDKEDILKWGVPNKIDMIALSFVRKGSDLVEVRKVLGKHAKSIMLMSKVENQEGVANFDDILAQSDAFMVARGDLGMEIPIEKIFYAQKVMIFKCNIQGKPVVTATQMLESMIKSPRPTRAEATDVANAVLDGTDCVMLSGETAAGAYPELAVRTMAKICLQAESCVDHAAVFKSITASAPIPMSPLESLASSAVRTANSAKAALILVLTRGGTTARLVAKYRPSMPILSVVVPELKQTDSFDWTCSDEAPARHSLIVRGVIPMLSVATAKAFDNEATEEALGFAISNAKAMGLCNSGESVVALHRIGTASVIKLLTAN

SEQ ID NO: 15536 - DNA, 1712 bp, Glycine max
  CDS (25)..(1533)
agcacattgatatctaaggaaggaatggaaaagatgttagggagaaattgtgggaagttgaagaccaagattgtgtgcactttgggaccatcaagtaggtcagtggagatgctggagaagcttctgaaggcagggatgaacgtggctcgcttcaacttctctcatggcactcactcttaccaccaagagacccttgataatctcagaactgcaatgaacaacaccggcattctctgtgctgtcatgttggacaccaagggtccagagatcagaactgggtttttgaatgaagggaagccaatacaaatccataggggacaagaaatcacaatcacaactgattacagcataaagggtgatgagaacatgatcagcatgagctacaagaagttggcacaccatttgagtccagggagtaatattctgtgtgctgatgggacaattagtttcactgtgctagaatgtgacaaagagaatggcttggttcgatgtcattgcgaaaattctgcagttctgggggagaggaagaatgttaaccttcctggagtggttgttgatcttccaaccttgacagagaaggacaaggaggacattttggagtggggggttcctaataagattgatatcattgctctctcttttgttagaaaaggttcagaccttgtggaggtcagaaatctacttggaaagcatgcaaaaagcatacttctcatgtccaaggttgaaaatcaagagggtgttgcaaattttgatgaaatactggaaaattcagatgcattcatggtggcaagaggtgacctgggaatggaaattccaattgagaagatctttctagctcagaaagttatgatacacaagtcaaacattaaaggcaagcctgtggtgacagccacccagatgttagagtccatgatcaaatctcctcggcctacacgagccgaggccaccgatgttgccaatgcagtccttgatggcacagactgtgttatgcttagcggggaaactgctgcaggagcctatccagacattgctgtccaaaccatggccagaatctgttcagaggcagagagtttcatagactatggtgacctattcaagagagtgatggaaacagctccaactccaatgagtcctttggagagcatggcttcagcggcagttaggactgcaaattgcatcaatgctgcactcatcttagttctaactagaggaggaaccacttcaaaacttgtggcaaagtatagacccagcatgcctattctgtcactggtggttcctgagataacaacagattcttttgaatggttctgcagtcaggaagcccctgcaaggcatagccttatctaccggggactaatacctgttttgggcacaggttcttttggagattccatgactgaatcaacagaagaaaccatacagcttgctctttcatatgcaaagaaaaatgacttgtgcaagcctggagactctgttgtagcacttcaccgtcttgagtctggtactgtcatcaagatattggatgtttgttaactgaagtcgcaagtcaaggactaggactaatcccttgttttgttcagttttccactttttacttgtaggcttgttttcttgttctggttttcagaaaatagttctttgttctctttctgatttgattgacgatggtatctaatgtgagaattaaagaataatatactgaattattcctg

SEQ ID NO: 15537 - protein, 502 aa, Glycine max
MEKMLGRNCGKLKTKIVCTLGPSSRSVEMLEKLLKAGMNVARFNFSHGTHSYHQETLDNLRTAMNNTGILCAVMLDTKGPEIRTGFLNEGKPIQIHRGQEITITTDYSIKGDENMISMSYKKLAHHLSPGSNILCADGTISFTVLECDKENGLVRCHCENSAVLGERKNVNLPGVVVDLPTLTEKDKEDILEWGVPNKIDIIALSFVRKGSDLVEVRNLLGKHAKSILLMSKVENQEGVANFDEILENSDAFMVARGDLGMEIPIEKIFLAQKVMIHKSNIKGKPVVTATQMLESMIKSPRPTRAEATDVANAVLDGTDCVMLSGETAAGAYPDIAVQTMARICSEAESFIDYGDLFKRVMETAPTPMSPLESMASAAVRTANCINAALILVLTRGGTTSKLVAKYRPSMPILSLVVPEITTDSFEWFCSQEAPARHSLIYRGLIPVLGTGSFGDSMTESTEETIQLALSYAKKNDLCKPGDSVVALHRLESGTVIKILDVC

SEQ ID NO: 15538 - DNA, 1984 bp, Sorghum bicolor
  CDS (202)..(1710)
gtcctcgtcgcccacggaatcgcaattccacaccttcctagcagtctcctcaaagcgcccccattcattcttagcagatctcgctgctttccgccgctcgacgccgacgccgacgccgacgcagacgccaccaccgcttccccccattcccccgtcccggaccgcggagcagagagggagagagatccggagcggcgcgcgatggcgaacatcgacatggcgaagatcctggcggacctggaccgcggcgccggcgacgcgcgggtgcccaagaccaagctcgtctgcacgctcggcccggcctcccgcaccgtgcctatgctcgagaagctgcttcgcgccggcatgaacgtcgcgcgcttcaacttctcccacggcacccacgagtaccaccaggagacgctcgacaacctccgacaggccatgcacaacaccggcatcctctgcgccgtcatgctcgacaccaagggtcctgagattcgtacagggtttttgaaggatggtaaaccaattaagctaaccaagggtcaagaaatcactgtcaccactgattatgatatcaagggtgatgaaaatatgattgctatgagttacaagaaactgcctgttgacgtgaagcctggaaatgtcatactctgcgcagatggtactatctctctggccgttctgtcttgcgatcctgatgctggaactgtgaggtggaggtgtgtgaaccctccagggcttggtgtgggtctccccacactcacagacaaggacaaggaggacatccttaagtggggtgttccaaacaagattgacatgattgccttgtcatttgttcggaagggttcggatcttgtggaggttaggaaggtacttggcgagcatgccaagtccataatgctgatgtcaaaggttgagaatcaagagggagtagctaactttgatgatatcctggcaaactctgatgcttttatggtggcaagaggtgatttagggatggaaattcctatagagaagattttctttgcacagaaggtgatgattttcaagtgcaatattcaaggcaagcctgttgtgactgcaacccagatgttggaatctatgatcaagtctcctcgccctactcgggcagaagcaaccgatgttgcaaacgcagttcttgatggcacgggtcctgtcatgcttagtggcgagactgctgctggggcttatccagagctggcggtgcagactatggccaagatctgcctacaagcagagtcttgtgtagaccatgcttctgttttcaaatcaatcatggcttcagctccaattccaatgagcccattggagagccttgcatcatcagctgtccgcacagcaaactctgccaaggcagcacttatcttagtcctgaccaggggaggaacaactgctaggcttgtggccaagtataggccatccatgccgattctgtccgttgtggttcctgagctgaagacagactcgttcgactggacctgcagtgacgaggggccggcaaggcacagcctcattgtgaggggtgttatcccaatgctgagtgctggcactgccaaggcctttgacaatgaagccactgaagaagctcttggttttgccattgaaaatgcaaaggcgatggggctatgcaacaccggtgagtccgttgtggcccttcaccgcatcgggactgcatccgtcatcaagctcctgactgtgaactagggtctagccgaagggggagccacaccactttgtttggtggaatttttgtgaggctgcttacgcatatcagcgaatctgcagcttttttgttgccaaagatacagactttgggttctggtacaccttggtgtcacaaggttgtgggaatttgtcatttagatgttagtgatttaaacagttatcaactgctatagctaattaatttgcactgtgttgcaactgctatcgtactgaaaactttatggttgcttcaccatgtttgctggttgatttt

SEQ ID NO: 15539 - protein, 502 aa, Sorghum bicolor
MANIDMAKILADLDRGAGDARVPKTKLVCTLGPASRTVPMLEKLLRAGMNVARFNFSHGTHEYHQETLDNLRQAMHNTGILCAVMLDTKGPEIRTGFLKDGKPIKLTKGQEITVTTDYDIKGDENMIAMSYKKLPVDVKPGNVILCADGTISLAVLSCDPDAGTVRWRCVNPPGLGVGLPTLTDKDKEDILKWGVPNKIDMIALSFVRKGSDLVEVRKVLGEHAKSIMLMSKVENQEGVANFDDILANSDAFMVARGDLGMEIPIEKIFFAQKVMIFKCNIQGKPVVTATQMLESMIKSPRPTRAEATDVANAVLDGTGPVMLSGETAAGAYPELAVQTMAKICLQAESCVDHASVFKSIMASAPIPMSPLESLASSAVRTANSAKAALILVLTRGGTTARLVAKYRPSMPILSVVVPELKTDSFDWTCSDEGPARHSLIVRGVIPMLSAGTAKAFDNEATEEALGFAIENAKAMGLCNTGESVVALHRIGTASVIKLLTVN

SEQ ID NO: 15540 - DNA, 1866 bp, Glycine max
  CDS (48)..(1628)
ggtgatcggtgatcggtgatcagtggtttggtgttgttgatagaaaaatgcattccagccctttgcttcttgaggaacccattaggatggcatccattcttgagccatccaagcctactttctttccagctatgacaaaaattgttggcacacttggtctaaagtcacgatcagttgatacaatttcccgttgccttgatgcaggaatgtctgtggcaaggtttgacttctcatggggtgatccagaataccatcaagagacattggaaaatttgagagttgctatcaaaagtaccaagaaactctgtgcggttatgctagatactgtgggtcctgaattacagattgagaataagacagatcacccaatcacccttgaagcagacacattagttgtcttaactccagatcaaaccaaagaagctggttcaaatctcttaccagtaaattttaacggactatcaaaggctgtgaagaagggtgatactatttttatcggaaaatacctgtttactggaagtgaaacagcttccttatggctggaggtcagtgaggtgaaaggtgaggatgtcacctgtctggtaaaaaacactgctacactgtctggatcattgtttactgcacatgtctctcagatccacatcgatcttcctactcttgctgataaagataaggaggtaataagcacatggggtgttcgaaacaatattgacttcctttcattatatacccggcacgttgaagatattcgtcatgcgcgtgaatttctttctaaattgggtgaccttaagcagacacatatttatgcaaagattgaaaatatagagggactgaagcattttgatgaaatattgagagaagcagatggcatcatcctcgctcgtggaaatttagggatagaactcccacctgagaaggttttcttattccaaaaggctgctatttacaagtgcaacatggttggaaagccagttgttgttacacgtgttgtagactctatgactgataatctaagacctactcgtgctgaagcaacagatgttgccaatgcagtgctggatggaagtgatgcaattctccttggagcagagaccctgcggggacaataccctgtagagaccatttctatagttggaaaaatatgtgctgaggcagagaaagttcataatcaagatttgtattttaagaaggctgtcaaatatgtgggagagccaatgagccatttggaatcaattgcttcctctgcggttcgagcagctatcaaggttaaagcctctgttattatttgcttcacttcatctggaagagctgcaagattgattgctaagtacagaccaattatgcctgtcatatccgttgtcattcctcaactgaagacaaatcaactccgatggacattcaccggtgcttttgaggctaggcaatctcttattgtgaggggtctttttcctatgctggcagatccacgacacccggctgagtctaaaagtggaacaaatgaatcaattttgaaggttgctttagatcatggcaaggcttttggcatcataaagccacatgaccgagttgttgtctgccagaaagtagctgactcgtcagttgtgaagattcttgagctcgaagattgattggttcaatacaacttatgtgtcatttgatgcatcataataaaacttcttctcaaccttttcattctagcgtttgtgtttcattgaagtacaataacaaacacataacattgagatacatattgtagagtgggaaagagacttttttgtttgattgtttttttaataggcaatcacagttttgagctataaataatggtattggtatggaaataaaaaaaaatgatgttatatcagc

SEQ ID NO: 15541 - protein, 526 aa, Glycine max
MHSSPLLLEEPIRMASILEPSKPTFFPAMTKIVGTLGLKSRSVDTISRCLDAGMSVARFDFSWGDPEYHQETLENLRVAIKSTKKLCAVMLDTVGPELQIENKTDHPITLEADTLVVLTPDQTKEAGSNLLPVNFNGLSKAVKKGDTIFIGKYLFTGSETASLWLEVSEVKGEDVTCLVKNTATLSGSLFTAHVSQIHIDLPTLADKDKEVISTWGVRNNIDFLSLYTRHVEDIRHAREFLSKLGDLKQTHIYAKIENIEGLKHFDEILREADGIILARGNLGIELPPEKVFLFQKAAIYKCNMVGKPVVVTRVVDSMTDNLRPTRAEATDVANAVLDGSDAILLGAETLRGQYPVETISIVGKICAEAEKVHNQDLYFKKAVKYVGEPMSHLESIASSAVRAAIKVKASVIICFTSSGRAARLIAKYRPIMPVISVVIPQLKTNQLRWTFTGAFEARQSLIVRGLFPMLADPRHPAESKSGTNESILKVALDHGKAFGIIKPHDRVVVCQKVADSSVVKILELED

SEQ ID NO: 15542 - DNA, 1866 bp, Glycine max; identical to SEQ ID NO: 15540
  CDS (87)..(1628)

SEQ ID NO: 15543 - protein, 513 aa, Glycine max
MASILEPSKPTFFPAMTKIVGTLGLKSRSVDTISRCLDAGMSVARFDFSWGDPEYHQETLENLRVAIKSTKKLCAVMLDTVGPELQIENKTDHPITLEADTLVVLTPDQTKEAGSNLLPVNFNGLSKAVKKGDTIFIGKYLFTGSETASLWLEVSEVKGEDVTCLVKNTATLSGSLFTAHVSQIHIDLPTLADKDKEVISTWGVRNNIDFLSLYTRHVEDIRHAREFLSKLGDLKQTHIYAKIENIEGLKHFDEILREADGIILARGNLGIELPPEKVFLFQKAAIYKCNMVGKPVVVTRVVDSMTDNLRPTRAEATDVANAVLDGSDAILLGAETLRGQYPVETISIVGKICAEAEKVHNQDLYFKKAVKYVGEPMSHLESIASSAVRAAIKVKASVIICFTSSGRAARLIAKYRPIMPVISVVIPQLKTNQLRWTFTGAFEARQSLIVRGLFPMLADPRHPAESKSGTNESILKVALDHGKAFGIIKPHDRVVVCQKVADSSVVKILELED

SEQ ID NO: 15544 - DNA, 1866 bp, Glycine max; identical to SEQ ID NO: 15540
  CDS (132)..(1628)

SEQ ID NO: 15545 - protein, 498 aa, Glycine max
MTKIVGTLGLKSRSVDTISRCLDAGMSVARFDFSWGDPEYHQETLENLRVAIKSTKKLCAVMLDTVGPELQIENKTDHPITLEADTLVVLTPDQTKEAGSNLLPVNFNGLSKAVKKGDTIFIGKYLFTGSETASLWLEVSEVKGEDVTCLVKNTATLSGSLFTAHVSQIHIDLPTLADKDKEVISTWGVRNNIDFLSLYTRHVEDIRHAREFLSKLGDLKQTHIYAKIENIEGLKHFDEILREADGIILARGNLGIELPPEKVFLFQKAAIYKCNMVGKPVVVTRVVDSMTDNLRPTRAEATDVANAVLDGSDAILLGAETLRGQYPVETISIVGKICAEAEKVHNQDLYFKKAVKYVGEPMSHLESIASSAVRAAIKVKASVIICFTSSGRAARLIAKYRPIMPVISVVIPQLKTNQLRWTFTGAFEARQSLIVRGLFPMLADPRHPAESKSGTNESILKVALDHGKAFGIIKPHDRVVVCQKVADSSVVKILELED

SEQ ID NO: 15546 - DNA, 1875 bp, Triticum aestivum
  CDS (101)..(1630)
aaaatccaaatctcatcgtcatccccccgcacccccaacccaacccctcccaccccacctccggcgaccggatcggcagggcgcgatggcgaacatcgacatggcggcggtgctggcggacatggaccgggacgcggcggcggacgcgcggacgccgcggaccaagctcgtgtgcacgctcggcccggcctcccgctccgtgcccatgctcgagaagctgctccgcgccgggatgaacgtcgcgcgcttcaacttctcccacggcacccacgagtaccacaaggagaccctcgacgccctccgccaggccatgcacaacaccggcatcctctgcgccgtcatgctcgacaccaagggacctgagattcgtactggatttttgaaggatggtaaaccaatcaaactgacaaagggtcaagaaatcactgtttccactgactacgatatcaagggcgacacgaacaccatctccatgagctacaagaaacttcctcaggatgtgaagcctgggcatgtcatactatgtgctgatggtaccatctccttgtctgttctgtcttgcgacccagcagctggaactgtcagatgtaggtgtgagaacactgcaatgcttggagagaggaagaattgtaatctgccaggaattgtcgtggaccttcctacgctgacggagaaggataaggaggacattttgggatggggtgtgcctaatgacattgacatgattgctttgtcatttgtccgcaaaggatcagatttggtgaccgtcaggcagcttcttggacagcatgcaaagcgcatcaagttaatgtcaaaggttgaaaaccaagagggcattgtaaactttgatgacattctgagggaaaccgatgcctttatggttgccagaggtgatcttggaatggagattccagttgagaagatattccttgcacagaaaatgatgatctacaagtgcaaccttgctggcaagcctgtggtcacagcgacccagatgcttgagtcaatgatcaagtccccgaggccaacccgtgccgaggctactgacgtcgcaaatgcggtgcttgatggaactgactgtgtcatgctcagtggtgaaagcgctgccggagcataccctgaggtggctgtgaagatcatggcgcgcatctgcgtggaggcggagtcttccctggacaacgacgccgtcttcaaggagatgatcaaggccgcgcccctcccgatgagcccgctggagtccctcgcgtcctcggccgtgcgaaccgccaacaaggccagggccactctgatcgtcgtcctgacccgtggcggcaccacggcgaagctggtggccaagtaccggcccagggtgccgatcctgtcggtggtcgtcccggtgctgacgaccgactcgttcgactggaccgtcagctccgagggccccgccaggcacagcctgatctacaggggcctgatcccgctcctcgccgagggctccgccaaggccaccgactcggagtcgacggaggagatcctccaggcggcgctcaagtcggccgtgaagaagcagctctgcaaggctggtgacgccgtcgtcgtcctgcaccgcatcggcgtcgcctccgtcatcaagatctgcaccgtcaagtgagcgccatcgccgggcgctcggcggcccttgctgccgtggcgaactctctgttcttgtggagacgaattgataatcgccgtaccgtccgttgcagtttgttgcatagatccgatccgagctggtaaattaggagggagaggactccgttaatatagagctcttttattattattaccgttggttgatatgatatgccccctgtagtatggtgtttggcaggtgtcatgcctgcacaaatttttctc

SEQ ID NO: 15547 - protein, 509 aa, Triticum aestivum
MAAVLADMDRDAAADARTPRTKLVCTLGPASRSVPMLEKLLRAGMNVARFNFSHGTHEYHKETLDALRQAMHNTGILCAVMLDTKGPEIRTGFLKDGKPIKLTKGQEITVSTDYDIKGDTNTISMSYKKLPQDVKPGHVILCADGTISLSVLSCDPAAGTVRCRCENTAMLGERKNCNLPGIVVDLPTLTEKDKEDILGWGVPNDIDMIALSFVRKGSDLVTVRQLLGQHAKRIKLMSKVENQEGIVNFDDILRETDAFMVARGDLGMEIPVEKIFLAQKMMIYKCNLAGKPVVTATQMLESMIKSPRPTRAEATDVANAVLDGTDCVMLSGESAAGAYPEVAVKIMARICVEAESSLDNDAVFKEMIKAAPLPMSPLESLASSAVRTANKARATLIVVLTRGGTTAKLVAKYRPRVPILSVVVPVLTTDSFDWTVSSEGPARHSLIYRGLIPLLAEGSAKATDSESTEEILQAALKSAVKKQLCKAGDAVVVLHRIGVASVIKICTVK

SEQ ID NO: 15548 - DNA, 1953 bp, Triticum aestivum
  CDS (152)..(1693)
aatccgccgactgctccgtttatttaaccgagccgtcccattcttggagagcaagaagcacgccaccacctcgcgtccccaaagaatccccatcccttcccctcccctcccctccccggccgcacacagatccggcgaccgacaacaagccatggtgtccaacggggagctgtcgcagccgcaggcgggggagtacggcctcgccgtcatgcgccgccggcccaagaccaagatcgtctgcacgctcggcccggcctcccgctccgtcgacatgatcgagaagctgctgcgcgccggcatgtgcgtcgcccgcttcaacttctcccacggctcccacgactaccaccaggagacgctcgacaacctgcacgccgccatggaccgcaccgggatcctctgcgccgtcatgctcgacaccaagggtccagagatccgtactggatttttgaaagatgggaagcctatccagttgaggaagggccaagaaattgtgatctccacagattatagcataaagggggacgacaagatgatatcgatgagctataagaagctagcagttgatctgaagccaggcagtgtcatattatgcgctgatggtaccatcactcttacagtgcttcattgtgacaaagagcaaggtctcgttcgctgctgttgtgagaacactgctatgcttggtgagaggaagaatgtcaatcttccaggggtcgttgttgatctgccaacactcactgaaaaggacagggaggatatccttcaatggggcgtcccgaacaagattgacatgattgctttgtcgtttgtccgcaaaggttcagatcttgtggaggtcaggaaggtacttggggagcatgccaagtcaataatgctgatgtcaaaggttgagaaccaggaaggagtagctaactttgacgatatcctggcacagtctgatgcttttatggtggcaagaggtgatttggggatggaaattcctgtagagaagatcttttatgcacagaaggtgatgattttcaagtgcaacattcagggcaagccagttgtgactgcaacccagatgttggagtctatgatcaagtctcctcggcctactcgagcggaagcaactgatgtggccaacgcagttcttgatggcactgactgtgtgatgctcagtggtgagacagcggctggggcttatccagaactggcagtgcaaactatggccaagatctgcttgcaggccgagtcatgcgtggactattctgctgtttttaaatcaatcatgtcatcagccccgattcccatgagcccattggagagccttgcctcatcagctgtccgcacagccaactcagccaaggcgacgcttatcttggtactgaccaggggaggaacaactgcaaggcttgtagccaagtacaggccatccatgccgatactgtctgtggtggttcctgagctcaagacggtcgagtttgactggatctgcagcgacgaggggcctgccaggcaaagcctcatcgtgaggggcgtgatccctatgctcagtgctggcactgccaaggcgtttgacagcgaagccacggaagaggcactgaggtttgccatgaagaacgccaaggagatgggcctttgcaacgctggtgactccattgtggcccttcaccgcatcgggaatgcatctgtcatcaagctcttgaccgtgtaagctagtggcagcgaagcgacaatgcaacaccattttgcccggggattttcccttctttctttttgcgaggctacgcatacccacagttttttgctgccaagattgcggcagtgcaacctggttaaaactttgtgttatcaagttgtggctgtttactctttatgagagggtttagccaccaaaactattatcgcagcagcttgttttgctactactactataacttatatgcaacgattgaactacctgatagttgctcc

SEQ ID NO: 15549 - protein, 513 aa, Triticum aestivum
MVSNGELSQPQAGEYGLAVMRRRPKTKIVCTLGPASRSVDMIEKLLRAGMCVARFNFSHGSHDYHQETLDNLHAAMDRTGILCAVMLDTKGPEIRTGFLKDGKPIQLRKGQEIVISTDYSIKGDDKMISMSYKKLAVDLKPGSVILCADGTITLTVLHCDKEQGLVRCCCENTAMLGERKNVNLPGVVVDLPTLTEKDREDILQWGVPNKIDMIALSFVRKGSDLVEVRKVLGEHAKSIMLMSKVENQEGVANFDDILAQSDAFMVARGDLGMEIPVEKIFYAQKVMIFKCNIQGKPVVTATQMLESMIKSPRPTRAEATDVANAVLDGTDCVMLSGETAAGAYPELAVQTMAKICLQAESCVDYSAVFKSIMSSAPIPMSPLESLASSAVRTANSAKATLILVLTRGGTTARLVAKYRPSMPILSVVVPELKTVEFDWICSDEGPARQSLIVRGVIPMLSAGTAKAFDSEATEEALRFAMKNAKEMGLCNAGDSIVALHRIGNASVIKLLTV

SEQ ID NO: 15550 - DNA, 1953 bp, Triticum aestivum; identical to SEQ ID NO: 15548
  CDS (209)..(1693)

SEQ ID NO: 15551 - protein, 494 aa, Triticum aestivum
MRRRPKTKIVCTLGPASRSVDMIEKLLRAGMCVARFNFSHGSHDYHQETLDNLHAAMDRTGILCAVMLDTKGPEIRTGFLKDGKPIQLRKGQEIVISTDYSIKGDDKMISMSYKKLAVDLKPGSVILCADGTITLTVLHCDKEQGLVRCCCENTAMLGERKNVNLPGVVVDLPTLTEKDREDILQWGVPNKIDMIALSFVRKGSDLVEVRKVLGEHAKSIMLMSKVENQEGVANFDDILAQSDAFMVARGDLGMEIPVEKIFYAQKVMIFKCNIQGKPVVTATQMLESMIKSPRPTRAEATDVANAVLDGTDCVMLSGETAAGAYPELAVQTMAKICLQAESCVDYSAVFKSIMSSAPIPMSPLESLASSAVRTANSAKATLILVLTRGGTTARLVAKYRPSMPILSVVVPELKTVEFDWICSDEGPARQSLIVRGVIPMLSAGTAKAFDSEATEEALRFAMKNAKEMGLCNAGDSIVALHRIGNASVIKLLTV

SEQ ID NO: 15552 - DNA, 1958 bp, Triticum aestivum
  CDS (135)..(1718)
atcccgcatcgcatcgcactaggtctcggacattcctctttctctcccttgcttggggaagaagaagaagaagaagagagggctcccgacgccgtcgcccctcgccgccgatctgatctcaggagccagcgaagatgcattccaccaatctgctcctcgaggagcccatccggatggtctccatcctcgagccatccaagccgaacttcttcccggcgatgacgaagatcgtggggacgctgggtcccaagtcccggtccgttgaggccatctccgcctgtctaaaggccggcatgtctgtggcccgtttcgatttctcgtggggggatgccgcgtaccaccaggagacactcgagaacctcaagctcgccatcaaggccaccaagaagctatgtgctgttatgctcgacactgttggccctgagttgcaagtggtgaacaagagtgaagtcacaatctcgcttgaagagaacgagtctgttgttctcacccctcacaagggccaggaggcctcttccaagttgctccctatcaacttcgctggactcgccaaggctgtgaagcccggagccacaatattcgttgggcaatatttgttcacgggcagtgagactacatcagtttggctggaggtttctgaagttcaaggggatgacgtggtttgcgtgatcaagaactcagctaccctggctgggtcactcttcacattgcactgctcccagatccatatcgacatgcccacgctgtctgatgaggataaagatgttatgaaaaaatggggtgctccaaacaagattgacttcctctctctttcttatacaaggcacgcagaagatgtgcggcaagcacgggagttcctctctaagttaggtgatcttagccaaactctgatttttgccaaaattgagaatgtggagggcttgaaccattttgatgagatcctggaggaagcggatggtatcattctgtcaagagggaaccttggaattgatcttccacctgaaaaggtgttcttatttcagaagtctgctctgcacaagtgcaacatggctggaaagcctgctgttgttactcgtgttgtggacagtatgacggacaacctaaggcctactcgtgcggaggcaactgatgtggcaaatgcggtgctggatggtagtgatgccattctccttggtgccgagactctccgtgggttgtatccagttgagactatttcaacagtgggcagaatttgtgctgaggctgagaaggttttcaaccaagatttgtacttcaagcgaactgtgaaatatgtgggagaacccatgacccacttggagtctattgcttcctctgcagtgcgggctgctattaaagttaaggcttcggtcatcatttgcttcacctcatctggacgggctgcaaggctaattgccaagtacaggcccaccatgcctgtcctctctgttgtcattcctcgtctgaaaacaaatcaattgaagtggagcttcacaggtgcatttgaggcaagacaatcactcatagttagaggcctctttcccatgcttgccgatccacgtcatccggctgaatctactagcactacaaatgaatcagtgttgaaggttgctcttgaccacggcaaagcatccggtgtgatcaagtcgcatgaccgcgttgtcgtgtgccagaaagtgggagattcctctgtcgtgaagatcattgagctggacgactaggcaaaattagtctttgctcagggcttgccagatttttgactaggccaaaacgttgcttggtggctatgtataattctatctatagttttgcaaaacgagcagtttttcctatggtgtcatcataggatccgcggttaccattcgaaaacctacgctagttattatggatatgtcctcagattttactgcagtgtagcgagtaaatgatctgatggaataatgatatcaaaactttgtgac

SEQ ID NO: 15553 - protein, 527 aa, Triticum aestivum
MHSTNLLLEEPIRMVSILEPSKPNFFPAMTKIVGTLGPKSRSVEAISACLKAGMSVARFDFSWGDAAYHQETLENLKLAIKATKKLCAVMLDTVGPELQVVNKSEVTISLEENESVVLTPHKGQEASSKLLPINFAGLAKAVKPGATIFVGQYLFTGSETTSVWLEVSEVQGDDVVCVIKNSATLAGSLFTLHCSQIHIDMPTLSDEDKDVMKKWGAPNKIDFLSLSYTRHAEDVRQAREFLSKLGDLSQTLIFAKIENVEGLNHFDEILEEADGIILSRGNLGIDLPPEKVFLFQKSALHKCNMAGKPAVVTRVVDSMTDNLRPTRAEATDVANAVLDGSDAILLGAETLRGLYPVETISTVGRICAEAEKVFNQDLYFKRTVKYVGEPMTHLESIASSAVRAAIKVKASVIICFTSSGRAARLIAKYRPTMPVLSVVIPRLKTNQLKWSFTGAFEARQSLIVRGLFPMLADPRHPAESTSTTNESVLKVALDHGKASGVIKSHDRVVVCQKVGDSSVVKIIELDD

SEQ ID NO: 15554 - DNA, 1958 bp, Triticum aestivum; identical to SEQ ID NO: 15552
  CDS (174)..(1718)

SEQ ID NO: 15555 - protein, 514 aa, Triticum aestivum
MVSILEPSKPNFFPAMTKIVGTLGPKSRSVEAISACLKAGMSVARFDFSWGDAAYHQETLENLKLAIKATKKLCAVMLDTVGPELQVVNKSEVTISLEENESVVLTPHKGQEASSKLLPINFAGLAKAVKPGATIFVGQYLFTGSETTSVWLEVSEVQGDDVVCVIKNSATLAGSLFTLHCSQIHIDMPTLSDEDKDVMKKWGAPNKIDFLSLSYTRHAEDVRQAREFLSKLGDLSQTLIFAKIENVEGLNHFDEILEEADGIILSRGNLGIDLPPEKVFLFQKSALHKCNMAGKPAVVTRVVDSMTDNLRPTRAEATDVANAVLDGSDAILLGAETLRGLYPVETISTVGRICAEAEKVFNQDLYFKRTVKYVGEPMTHLESIASSAVRAAIKVKASVIICFTSSGRAARLIAKYRPTMPVLSVVIPRLKTNQLKWSFTGAFEARQSLIVRGLFPMLADPRHPAESTSTTNESVLKVALDHGKASGVIKSHDRVVVCQKVGDSSVVKIIELDD

SEQ ID NO: 15556 - DNA, 1958 bp, Triticum aestivum; identical to SEQ ID NO: 15552
  CDS (219)..(1718)

SEQ ID NO: 15557 - protein, 499 aa, Triticum aestivum
MTKIVGTLGPKSRSVEAISACLKAGMSVARFDFSWGDAAYHQETLENLKLAIKATKKLCAVMLDTVGPELQVVNKSEVTISLEENESVVLTPHKGQEASSKLLPINFAGLAKAVKPGATIFVGQYLFTGSETTSVWLEVSEVQGDDVVCVIKNSATLAGSLFTLHCSQIHIDMPTLSDEDKDVMKKWGAPNKIDFLSLSYTRHAEDVRQAREFLSKLGDLSQTLIFAKIENVEGLNHFDEILEEADGIILSRGNLGIDLPPEKVFLFQKSALHKCNMAGKPAVVTRVVDSMTDNLRPTRAEATDVANAVLDGSDAILLGAETLRGLYPVETISTVGRICAEAEKVFNQDLYFKRTVKYVGEPMTHLESIASSAVRAAIKVKASVIICFTSSGRAARLIAKYRPTMPVLSVVIPRLKTNQLKWSFTGAFEARQSLIVRGLFPMLADPRHPAESTSTTNESVLKVALDHGKASGVIKSHDRVVVCQKVGDSSVVKIIELDD

SEQ ID NO: 15558 - DNA, 1524 bp, Oryza sativa
  CDS (1)..(1524)
atggaggagcagcaggagggagccgcgggggtgatgcggcggaggcccaagacgaagatcgtgtgcacgctggggccggcgtcgaggtcggtggagatgatcgggcggctgctccgcgccgggatgtgcgtcgcgcgcttcaacttctcccacggatcccacgagtaccaccaggagacgctcgacaacctccgcgccgccatggagagcaccggcatcctctgcgccgtcatgctcgacaccaaggggccagagatccgaactggatttctgaaagatggaaaacccgtacagttgaagaagggtcaagaaatcacagtttcaactgattatagcataaagggtgatgacaacatgatatcaatgagctacaagaagctagcggtggatctgaagccaggcagtgtaatattatgtgctgatggcaccatcactcttactgtccttcactgtgataaagagcaaggcttggttcgctgccgttgtgagaacactgctatgcttggtgagaggaagaatgttaaccttccaggagttattgttgatctcccgacacttactgagaaggacaaggaggatattcttaaatggggtgtcccaaacaagattgacatgattgctctgtcttttgttcgtaaaggctcagaccttgtagaggtcaggaaggtgcttgggaagcatgcaaagtcaataatgctgatgtcaaaggttgagaatcaagagggagtggctaactttgatgatatcctggcacaatctgatgcttttatggttgcaaggggtgatttgggaatggaaattccgatagagaagatcttttatgcacagaaggtgatgattttcaagtgcaatattcagggcaagccagttgtgactgcaacccagatgttggaatctatgatcaagtctccccgccctactagagcagaagcgactgatgttgccaatgcagttcttgatggcactgactgtgtcatgctcagtggtgagacagctgctggggcttacccggaactggctgtacggaccatggccaagatctgcctgcaagcggagtcatgcgtcgaccatgccgctgttttcaagtccattaccgcatcagctccaattcccatgagcccattggagagccttgcatcatcagctgtgcgtacagcgaactctgccaaggcggcgctcatcttggtcctgactaggggaggaacaactgctaggctggtggccaagtacaggccatccatgccgattctgtccgtcgtggttcctgagctgaaacagaccgactccttcgactggacctgcagcgacgaagctcctgcgcggcacagcctcatcgtcaggggagtgatcccgatgctgagtgcagccactgccaaggccttcgacaacgaagccactgaagaagctctcgggttcgccatcagcaacgccaaggcgatggggctctgcaactccggtgagtccgtcgtcgccctccaccggatcggaactgcatctgtcatcaagctcctgacagcgaactag

SEQ ID NO: 15559 - protein, 507 aa, Oryza sativa
MEEQQEGAAGVMRRRPKTKIVCTLGPASRSVEMIGRLLRAGMCVARFNFSHGSHEYHQETLDNLRAAMESTGILCAVMLDTKGPEIRTGFLKDGKPVQLKKGQEITVSTDYSIKGDDNMISMSYKKLAVDLKPGSVILCADGTITLTVLHCDKEQGLVRCRCENTAMLGERKNVNLPGVIVDLPTLTEKDKEDILKWGVPNKIDMIALSFVRKGSDLVEVRKVLGKHAKSIMLMSKVENQEGVANFDDILAQSDAFMVARGDLGMEIPIEKIFYAQKVMIFKCNIQGKPVVTATQMLESMIKSPRPTRAEATDVANAVLDGTDCVMLSGETAAGAYPELAVRTMAKICLQAESCVDHAAVFKSITASAPIPMSPLESLASSAVRTANSAKAALILVLTRGGTTARLVAKYRPSMPILSVVVPELKQTDSFDWTCSDEAPARHSLIVRGVIPMLSAATAKAFDNEATEEALGFAISNAKAMGLCNSGESVVALHRIGTASVIKLLTAN

SEQ ID NO: 15560 - DNA, 1883 bp, Brassica napus
  CDS (119)..(1651)
caacccgaaaaaacaagaggttgttcttgttccgacacgacaacacatccagtatcggagctaataagagggaagaaagaagaaatagttgactgtgtttaagggtttctgttgaaaaatgtcgaacatagacattgaagggatattgaaggagctacctaacgatgggaggatcccaaaaaccaagatcgtttgcactctaggaccagcttctcgcactgttcctatgatcgaaaagcttctcagagccggtatgaacgtcgctcgcttcaacttctcacatggcagccatgagtatcaccaaggcacactcgacaacctccgcaccgctatgcagaacacaggcattctcgccgccgtcatgcttgacacaaagggacctgagattcgtactggtttcttgaaagatgggaaccctatacaactcaaggaaggccaagagatcactatcaccactgactacgaaactttaggagatgagacgacgatctccatgagctataagaagcttcccttagatgtgaagcccggaaacaccatactctgtgcagatggaagcataagtctagctgtcttgtcatgtgatccagagtctggaactgttaggtgcaggtgcgaaaacacggcgatgcttggcgagagaaagaacgtgaatctccccggtgtcgttgttgatctccccactctgacagacaaggatattgaagatattatgggttggggtgttcctaacagcatcgatatgattgcgctttcttttgtccgtaaaggctcagatcttgttaatgtcaggagggttcttggttctcatgctaaaagcattatgctgatgtcaaaggttgagaaccaggaaggagtggtgaactttgatgagatactgcgcgaaacagatgcattcatggtcgctcgtggtgatctcgggatggagattcccatagagaagatcttcttagctcagaagctgatgatctacaagtgcaaccttgcaggcaaaccagtggtgacagccactcagatgcttgagtcaatgatcaagtcaccaaggccaacacgtgctgaagccacggacgttgccaacgccgtccttgacggcacagactgcgtgatgctcagcggagagagcgcagcaggagcttatccggagatagccgtgaaagtcatggccaagatctgcattgaagcggagagctctcttgactacaacacgatctttaaagagaggatcagagcaactccggttccaatgagcccgttagagagtcttgcatcgtcagctgtgagggctgcgaacaaagcgcatgcgaagctcatcattgtgttgactcgtggaggctcaacagctaagcttgtagctaagtacagaccctctgttccgattctttcggtggttgtaccagttatgaccacggattcctttgactggacttgtagtgacgagtcgcctgcaaggcatagtttgatatacagaggtttgatccctatgttggctgaaggatctgcaaaggcgacagatagtgagtccacagaggttatcattgaatccgctttgaagtcagctgtgcagagaggactgtgcaaccatggtgatgctgttgtggcgctgcaccgtattggagtcgcctcggttattaagatctgtgtggttaagtaaagaaataaagaatagctcttggctccttatgattgttggcaatcgtaactgagttgacttcgttacttgaaataaagatgtactgttggagacatctctctctctctctctctctctctctctctctgtcttttcagttttcaagattatgaatcttaaatctgctttgtatgaatcactatgtataacactgtttctcttcataagctttgcttacaaaaaaaaaaaaaaa

SEQ ID NO: 15561 - protein, 510 aa, Brassica napus; identical to SEQ ID NO: 8816

SEQ ID NO: 15562 - DNA, 1911 bp, Brassica napus
  CDS (85)..(1668)
ccaaacctcacacacacacagacacacaccttccatctctccgctcgccgtcgatcatctgagatctctctcccctcaccaaagatgcattcgagccatctccttctcgaggagccgatcaggatggcttctatcctcgagccatccaaatccagcttctttccggcgttaactaagatcgtcgggactctcggtcccaaatccagatccgttgagacactctccggctgtctcaaatccggcatgtctgtggctagattcgatttctcttggggagacgctgagtatcaccaagagacgcttgataatctgaagattgctgttaagagcaccaagaagctttgtgctgttatgcttgatacagtgggacctgagcttcaagtgatcaacaagtctgagaaagctattactcttaaagctgatggacttgttactttgactcctaatcaagaccgagaagcctcttctgaagtccttcccattaactttgatggccttgccaaggcggtgaagaaaggagacactatctttgttgggcagtacctattcactggtagtgaaacaacttcagtttggctcgaggttgatgaagttaaaggagatgatgtcatttgcctttcaaggaatgctgctactctcgctggttctatgttcaccttgcacgcctctcaagttcacatcgatatgccaactcttactgagaaagataaagaggttataagcacatggggagttcaaaacaaaatcgactttctctcgttgtcctattgtcgccatgcagaggatgttcgccagacccgtgagatgcttaaaaagttgggtgacctctctcaaacacaaatatttgccaagattgagaacgttgagggactaaaccactttgatgagattctacaagaagctgatggaattattctttctcgtgggaacttgggtattgatctacccccggagaaggtgtttttgtttcaaaaggcggctctttacaagtgcaacatggcaggaaagccagccgttcttactcgtgttgttgatagtatgactgacaacttgcgaccaactcgtgcagaggcaacagatgttgctaatgctgttttagatggaagtgatgcaattcttctcggtgctgagactcttcgcggtctgtaccctgtggagactatatcaactgtcggaaggatctgtgctgaggcagagaaggttttcaatcaagatttgtacttcaagaagactgtcaagtatgttggagagccgatgtctcacctcgaatccattgcttcttcagctgtaagggcagcaatcaaggttaaggcatccgtcattatatgctttacctcttctggaagagcagccaggttgattgctaaatacaggccaacaatgccggttatttctgtagtcattccacgggttaagacaaatcagctaaaatggagcttcagtggagcctttgaggctaggcagtcacttattgtcaggggcctcttccccatgcttgctgaccctcgtcaccctgcggaatcaacaagtgcgacgaacgagtcagtcctgaaggttgcgttagaccacgggaagcaagcaggagtgatcaagtcgcacgacagagtagtggtgtgtcagaaagttggtgatgcatctgtggtcaagatcatcgagcttgaggattgataatatgggaggaaaacaattgctacaatctttttacttcgatccagtgctctgcagtgagtattcaggagatttgatgtctctgatgtttcccatttttcttggctattacatttggctggcctcagatttaaactacggtaaaaaaagtatacaatgtctagcaattattcaataatcttgtaacatcccactatgtttttctatgttacaaaaatattacgactcaaaaaaaaaaaaaaa

SEQ ID NO: 15563 - protein, 527 aa, Brassica napus; identical to SEQ ID NO: 8820

SEQ ID NO: 15564 - DNA, 1930 bp, Brassica napus
  CDS (109)..(1692)
cggtcaaatcccattcgcataaaaagcatctcctctccgatcgaattctctcactctgttcgccgccgaagatctgagatctctcctctctcctctctcacctcaaagatgcattcgagtcatctccttctcgaggaaccgatcaggatggcatcaatcctcgagccatccaaatctagcttcttcccagcattgactaagatcgtcgggactctcggtcccaaatcccgatccgtcgagactctctccggttgcctcaaatccgggatgtccgtggctcgatttgatttctcttggggagatgctgagtatcaccaggagacgctggataatctgaaaattgctgtgaagagcactaagaagctttgtgctgttatgcttgatactgtgggacctgagctgcaagttatcaacaagtctgggaaagctattactcttaaagccgatggacttgttactttgacacccagtcaagatcgagaagcgtcttctgaagtccttccgattaactttaatgggcttgccaaggcagtgaagaagggagacactatctttgttgggcaatacctattcactggtagtgaaacaacttcagtttggctcgaggttgatgaagttaaaggagatgatgtcatttgcctgtcaaggaatgctgctactcttgctggttctctcttcactctgcacgcctctcaagttcacatcgatctgccaactcttacggagaaagataaggaggttataagcacatggggagttcagaataaaatcgattttctctctttgtcttattgtcgtcatgcggaggatgttcgccagacccgcgaaatgcttaagaagttgggtgacctctctcaaacacaaatatttgccaagattgagaatgtagagggacttaaccactttgatgagattctacaagaagctgatggaattattctttctcgtgggaatttgggtattgatctacccccggaaaaggtgtttttgtttcaaaaggcggctctttacaagtgcaacatggctggaaaaccagccgttcttacccgtgtcgttgatagtatgactgacaacttgcgaccaactcgtgcagaggcaacagatgttgctaatgctgttctagatggaagtgatgcaattcttcttggtgctgagacccttcgcggtttataccctgttgagacaatatccactgtcggtagaatctgtgctgaggcagaaaaggttttcaatcaggacttgtacttcaagaagactgtcaagtatgtaggagaaccgatgtctcacttggaatccattgcttcttcagctgtacgggcagcaatcaaggttaaggcatctgtcattatatgcttcacctcttctggaagagcagcaaggttaattgccaaatacaggccaacaatgcccgttatttctgttgtcattccccgggttaagacaaatcagctgaaatggagctttagtggagcctttgaggcgaggcagtcacttattgtcagaggccttttccccatgctcgctgatcctcgtcacccagcggaatcaacaagtgcgacgaacgagtcagtcctcaaggttgcactagaccatggaaagcaagcaggagtgatcaaatcgcatgacagagtagtggtgtgtcagaaagttggtgatgcttctgtggtgaagatcatcgagctagaggattaacacaaaaatggaagaagaaaacaattgctatatttttcttacttcgagactgtgccggagtgagtatatttttatctacgggacttttggtttttgagatttgatgtctctaaatgattcccttctttttcctttcggtatacatttgggttgccttcagatttaaagccatgtttaaagagtatacaatgtctagcaaattattcaataaactgtaacatccaaaaaaaaaaaaaaa

SEQ ID NO: 15565 - protein, 527 aa, Brassica napus; identical to SEQ ID NO: 8822

SEQ ID NO: 15566 - DNA, 2063 bp, Glycine max
  CDS (192)..(1700)
ttgcataataacaagagtcgcatcgcatcacaaatcttttttgtctctctctacttttttgctttctttcttcttctgtttatcgcatcgcgtattggttggtcgaaaaacaaagagtgtgtgttgtgtggtttggtttggtttttcacttttcttcatctttttgcgagaagacacacacacagagagagatggctacgacgaggattgaggcagagaagaagccgaagacgaagatcgtgtgcactctgggccccgcatcacggtcggtcccaatgatcgagaagcttctgcgagcaggcatgaacgtggcgcgcttcaacttctcccatgggtcccacgagtaccaccaggaaaccctcgacaacctccgcgccgccatggagaacaccggtattctctgcgccgtcatgctcgacaccaaggggcctgagattcgaactggttttctcaaggacggtaagcctatccaactgatacaaggtaatgaaataaccatttccactgactatgacctaaagggagatgagaagacgatttgtatgagctacaaaaagctgcctgaggatgtgaagcccgggatggtcatactctgtgcggatggcaccatatcatttacagttttatcatgtgacaaacaagcaggcttggttcaatgccgatgtgagaactctgccactcttggcgagaggaagaatgttaatttgcctggagtgatagtggatctcccaactttgacagacaaggacaaggaagatatcttggcctggggaattccgaataaaattgacatgattgctctttcttttgttcgaaaaggttctgacctggtggaagtcaggaaagttctgggaaaacatgctaagaacattatgctcatgtctaaggttgaaaaccaagaaggggttgcaaattttgatgaaatccttgcaaattcagatgcatttatggtggcacgtggtgaccttggaatggaaattccaatagagaagatatttctcgcacagaaagtgatgatttacaagtgcaacatccaaggaaaaccagttgtcactgcaacccagatgttggagtcaatgatcaaatctcccaggccaaccagggccgaagctactgatgttgccaatgcagttctggatggcacagactgtgtgatgcttagtggtgaaaccgctgctggagcctatccagaccttgctgttcaaacaatggctaaaatatgcattgaagcagagagcacccttgactatggtgatgtgttcaaaaggattatggagcactcaccggtacccatgagcccattagagagtctagcttcttctgctgttagaacagccaactcggctagagcggctcttatcttggttttaactagaggagggagtactgcaaaattggtggcgaaatacaggccagggatgccaattctttccgtggttgttcccgagctcaagactgatagctttgattgggcatgcagtgatgaggcccctgcgagacatagccttatattccgcgggttggttcccgtgttgagtgcagcttctgctagagcttctcatgctgaaacaacagaagaagcaatagaattcgccatgcaacatgccaagtccaagggtctctgccacaacggggattcagtggtggcactgcatcgtgtgggcactgcatctatcatcaagatcttgactgtgaaatgatcacccccattacaaggaattcttctgctgtttatggcaaattttttggatggtgcaaaagaggtctcgatatacctcttcatatctacattggatgcaaacttcaattaaaagcatttattaggatcggttacctgtttttcacatatcatatattactttttttttttttttttgttacatttgccttatcattgtggcgagtagccacttgttttcatttgttaagattttgtacgaggcttttggtgaaccaaaaaactagccacttctggattttgaattttgcggtctaaagttgttttaacttttaattgagcagtcagcagtgtatgttttttgagaccgacacgcagcggccgc

SEQ ID NO: 15567 - protein, 502 aa, Glycine max; identical to SEQ ID NO: 8880

SEQ ID NO: 15568 - DNA, 1976 bp, Glycine max
  CDS (116)..(1696)
cgtacaacactttctatatttatcgtccattctctctcactccataattgcttcttgctttggtcgatccattcggtgatcactgaccagtggtttggtgttgttgatagagaaaatgcattccagccctttgcttcttgaggaacccattaggatggcatccatccttgagccatccaagcctactttttttccggctatgacgaaaattgttggcacacttggtccaaagtcacgatcagttgatataatttcccattgccttgatgcaggaatgtctgtggcaaggtttgacttttcatggggtgatccagaataccatcaagagacattggaaaatttgagagttgctatcaaaagtaccaagaaactctgtgcggttatgctagatactgtgggtccagaattacagattgagaataagactgatcacccaatcacccttgaagcagacacattagttgtcttaactccagatcaaaataaagaagctagttcaaatctcttaccattaaattttaccgggctatcaaaggctgtgaagaagggtgatactatttttattggaaaatacttgtttactggaagtgaaacagcttctgtatggctggaggtcagtgaggtggaaggtgaggatgtcacctgtctggtaaaaaacactgccacactctctggatcattgtttactgtacatgtctctcagattcacatcgatcttcctactcttgctgataaagataaggaggtaataagcacatggggtgttcaaaacaatattgacttcctttcattatatacccggcacgttgaagatattcgtcatgcacgtgaatttctctctaaattgggtgacctgaagcagacacatatttatgcaaagattgaaaatatagagggaatgaaacattttgatgaaatattgagagaagcagatggtatcatcctcgctcgtggaaatttagggatagaactcccacctgagaaggttttcttattccaaaaggctgctatttacaagtgtaacatggttggaaagccagttgttgttacacgtgttgtggactctatgactgataatctaagacctactcgtgctgaagcaacagatgttgccaatgcagtgttggatggaagtgacgcaattctccttggagcagagaccctgcggggacaataccctgtagagaccatttctatagttggaaaaatatgtgctgaggcagagaaagttcataatcaagatttgtattttaagaaggctgtaaaatatgtgggagagccaatgagccatttggaatcaattgcttcctctgcggttcgggcagctatcaaggttaaggcctctgttattatttgcttcacttcatctggaagagctgcaagattgattgctaagtacagaccaaccatgcctgtgatatctgttgtcattcctcaattgaagacaaatcaactccgatggacgttcaccggtgcttttgaggctaggcaatctcttattgtgagaggtctttttcctatgctggcagatccacgacacccagctgagtccagaagtggaacaaatgaatcaattttgaaggttgctttagaccatggcaaggcttttggcatcataaagccacatgaccgagttgttgtctgccagaaagtagctgactcgtcagttgtgaagattcttgagctcgaagattgaatgattacaacttatgcgttatttgatgcataataataaagattcttgggcttgtgtttgataatcggagcgatatccagttttgaaatcaagcatggtgtgctgatctttcggctacttatgttgtttaatagtaaaccatccgaattcgaaaacgaaattgattatcttctaatgaattttatgctgaaaagaaaagtatgaattataagacaacttgtaaacactgagtgtgccagataaacttgtgagattattttagcttaaaaaaaaaaaaaaa

SEQ ID NO: 15569 - protein, 526 aa, Glycine max; identical to SEQ ID NO: 8826

SEQ ID NO: 15570 - DNA, 2067 bp, Triticum aestivum
  CDS (115)..(1659)
gaattcccgggtcgacttcgctgtcgacgatttcgtatccgccccaaatccaaatctcatcgccttcccactctccccaccccaccctcgtctcccccggatcggtagcgcgcgatggccaacatcgacatggcggcggtgctggcggacctggagcgggacgcggcggcggacgcccgcaccccgcggaccaagctggtgtgcacgctcggcccggcctcccgctccgtgcccatgctcgagaagctgctccgcgccggcatgaacgtcgcgcgcttcaacttctcccacggcacccacgagtaccacaaggagaccctcgacgccctccgccaggccatgcacaacaccggcatcctctgcgccgtcatgctcgacaccaagggacctgagattcgtactggatttttgaaggatggtaaaccaatcaaactgacaaagggtcaagaaatcactgtttccaccgactatgatatcaagggcgacacgaacacgatctccatgagttacaagaaacttcctcaggatgtgaagcctgggcatgtcatactatgtgctgatggtaccatctccttggctgttctctcttgcgacccagcagctggaactgtcagatgtaggtgtgagaacactgcaatgcttggagagaggaagaattgtaatctgccaggaattgtcgtggaccttcctacactaacggagaaggataaggaggacattttggaatggggtgtgcctaatgacattgacatgattgctttgtcgtttgtccgcaaaggatcagatttggtgaccgtcaggcagcttcttggacagcatgcaaagcgcatcaagttaatgtcaaaggttgaaaaccaggagggcattgtgaactttgatgacattctgagggaaaccgatgcctttatggttgccagaggtgatcttggaatggagattccagttgagaagatattcctggcccaaaaaatgatgatttacaagtgcaaccttgctggcaagcctgttgtcacagcgacccagatgcttgagtcaatgatcaagtccccgaggccaacccgtgccgaggctactgacgtcgcaaatgcggtgcttgatggaaccgactgtgtcatgctcagtggtgaaagcgctgctggagcataccctgaggtggctgtgaagatcatggctcgcatctgcgtggaggcagagtcttccctggacaacgacgccgtcttcaaggagatgatcaaggccgcgcccctcccgatgagcccgctggagtcccttgcgtcttccgccgtgcggaccgccaacaaggccagggccactctgatcgtcgtcctgacccgtggcggcaccactgcgaagctggtggccaagtaccgccccagggtcccgatcctctcggtggttgtcccagtgctgacaaccgactcgttcgactggaccgtcagctccgagggcccggccaggcacagcctgatctacaggggcctgatcccgctcctcgccgagggctccgccaaggccaccgactcggagtcgacggaggagatcctccaggcggcgctcaagtcggccgtgaagaagcagctctgcaaggccggcgacgccgtagtcgtcctgcaccgcatcggcatggcctccgtcatcaagatctgcaccgtcaagtgaccgccattgccgggcatggtgacccgagcgccgccccggtccttgctgccgtggcgagacccgggtctcccttgttcctctctggtctttctcctggagacgaactgattaatcgccgtaccgtcagtattgcagtttgttgcatagatccgatccgagctggtaaattaggagggagaggactccgttatatagagctcttttattacctgtagtatggtgtttggcaggtgtcatgcctgcacaaatttttctctaattattattagttgctgctgctgcttgttgtactctgaactctcaagtactggtttggtagtgatgtcgatacatgtggtgataataagattttggcatcgtcgagtcggaagctcaaaagagagagagagaccgacacgcagcggccgc

SEQ ID NO: 15571 - protein, 514 aa, Triticum aestivum; identical to SEQ ID NO: 8828

SEQ ID NO: 15572 - DNA, 2002 bp, Triticum aestivum
  CDS (128)..(1711)
cgaacattcctctttctctcccttgcttggggaagaagaagaagaagaagaagaagagagggcgagcgcccccgcctcccgacgccgtcgcccctcgccgccgatctgatctcaggagccagcgaagatgcattccaccaatctgctcctcgaggagcccatccggatggtctccatcctcgagccatccaagccgaacttcttcccggcgatgacgaagattgtggggacgctgggtccgaagtcccggtccgttgaggccatctccgcctgtctaaaggccggcatgtctgtggcccgtttcgatttctcgtggggggatgccgcgtaccaccaggagacactcgagaacctcaagctcgccatcaaggccaccaagaagctatgtgctgttatgctcgacactgttggccctgagttgcaagtggtgaacaagagtgaagtcacaatctcgcttgaagagaacgagtctgttgttctcacccctcaccagggccaggaggcctcttccaagttgctccctatcaacttcgctggactcgccaaggctgtgaagcccggagccacaatattcgttgggcaatatttgttcacgggcagtgagactacatcagtttggctggaggtttctgaagttcaaggggatgacgtggtttgcgtgatcaagaactcagctaccctggctgggtcactcttcacattgcactgctcccagatccatatcgacatgcccacgctgtctgatgaggataaagatgttatgaaaaaatggggtgctccaaacaagattgacttcctctctctttcttatacaaggcatgcagaagatgtgcggcaagcacgggagttcctctctaagttaggtgatcttagccaaactctgatttttgccaaaattgagaatgtggagggcttgaaccattttgatgagatcctggaggaagcggatggtatcattctgtcaagagggaaccttggaattgatcttccacctgaaaaggtgttcttatttcagaagtctgctctgcacaagtgcaacatggctggaaagcctgctgttgttactcgtgttgtggacagtatgacggacaacctaaggcctactcgtgcggaggcaactgatgtggcaaatgcggtgctggacggtagtgatgccattctccttggtgctgagactctccgtgggttgtatccagtcgagactatttcaacagtgggcagaatttgtgctgaggctgagaaggtcttcaaccaagatttgtatttcaagcgaaccgtgaaatatgtgggagaacccatgacccacttggagtctattgcttcctctgcagtgcgggctgctattaaagttaaggcttcggtcatcatttgcttcacttcatctggacgggctgcaaggctaattgccaagtacaggcccaccatgcctgtcctgtccgttgtcattcctcgtctgaaaacaaatcaattgaagtggagcttcacaggtgcatttgaggcaagacaatcactcatagttagaggcctctttcccatgcttgctgatccacgtcatccggctgattctactagcactacaaatgaatcagtgttgaaggttgctcttgaccacggcaaagcatctggtgtgatcaagtcgcatgaccgtgtcgtcgtgtgccagaaagtgggagattcctctgtcgtgaagatcattgagctagacgactaggcaaaattagcctttgctcagggcttgccagatttttgactaggccaaaacgttgcttggtggctatgtataattctatctatagttttgcaaaacgagcagtttttcctatggtgtcatcataggatccgcggttatcattctgaaacctacgctagttattatggatatgtcctcagattttactgcagtgtagcgagtaaatgatctgatggaataatgatatcaaaactttgtgacccttattgttgtcgctaagcctatgttcccatttgcaaaaaaaaaaaaaaa

SEQ ID NO: 15573 - protein, 527 aa, Triticum aestivum; identical to SEQ ID NO: 8830

SEQ ID NO: 15574 - DNA, 1825 bp, Helianthus annuus
  CDS (128)..(1624)
ataacaaaccaacccacccatttttattctcatttcacacatcaccgccgcccaatattcaatacattctcatcattttcaattctgtttctcaatttgattccattattccttcacaatcacactgatggatcaccagatgaagaggccgaagacgaagatcgtctgcacgttaggacctgcatctagatcagttccaatggtggagaagctcttaaaagcaggtatgaacgttgctcgcttcaatttctctcacggatcctatgaatatcatcaggaaacgcttgataatctccgcactgctatggataacaccggtatactctgtgcggttatgctcgacaccaagggtccagagattcgaaccgggtttttaaaagatggcaagccagttcagcttaaacagggtcaagaaatcacaatctctatcgattacaccatcaaaggcgatgaaaacatgatctgcatgagctacaagaagctagctcacgatgttaaaccacaaagtgtgattctctgtgcagacggcaccatttcgtttactgttctgtcttgtgacattgaaaacgggctagttcgttgtcgttgtgagaacactgcggttcttggtgaacgaaaaaacgttaatctacctggtgtgattgtggatctaccaacgctgactgagaaagacaaagaagatatcatgaaatggggtgttcctaataagattgatatgattgctttgtcgtttgtccgaaagggttcagaccttgtggaggttcgtaagctgttgggagtacatgctaaaaacattctgcttatgtctaaggttgaaaatcaagaaggggttgccaactttgatgatatcctagcgaactcagacgcgtttatggtggcgcgtggtgatctcgggatggaaattccgattgagaaaatatttctagctcagaaagtaatgatatacaagtgcaacctacaaggaaagccggttgtaaccgccactcaaatgctggagtcaatgatcaagtctccaaggcccactcgagccgaagccacagacgttgctaacgcggtcctcgatggaaccgactgcgtcatgcttagtggagaaaccgcagccggggcttacccagagctcgcagttcaaaccatggctaaaatctgcatggaagccgaaagcacaatagactataaagacgttttcaaaaggatcactgccaatgcaccggtccccatgagcccacttgaaagcttagcctcttctgcggttcgaaccgcgatctcatcaaaagcgagtctgatattggttctaaccagaggtggaagcactgcgaaactagtggctaagtaccgccccgggatgcctatactgtctgttgtggttccagaaatcaagaccgattcttttgactggtcttgtagtgatgagtcaccggctagacatagtctaatctttaggggtttggtcccggttttgattgcggggtctgctagagcttctcatgatgagtccactgaagaagctattgaatttgctttgcaacatgctaaagataaaggactatgcaagaatggtgattcggttgtggctctacatcgtgttggaaccgcgtctataatcaagatcgtgacagttaagtgattcttatgctatattgatattgtcgatttttgccctttcgatggcacacattgttacactggtaaactaaagttgattttggtatcgatgaactggatttgttatgagaaactacgtaacgagtaatgcatttttgtcgcgagtttgaataattgacattacttcgtgttttttggaaaaaaaaagaaaaaaaaaaaaaaa

SEQ ID NO: 15575 - protein, 498 aa, Helianthus annuus; identical to SEQ ID NO: 8834

SEQ ID NO: 15576 - DNA, 2075 bp, Zea mays
  CDS (198)..(1739)
gcgcccacggaatcgcaattccccactcccaccccccttctcctttctataaagggaaacttcgccaccaaatctcgaatcccatctcgctgctctccgccgctcgacgccgacgccgacgccgacacctctccctcccccattccccgtgccccggaccgcggagcagacagaggcgagatccggagcgccgcgcgatggcgaacatcgacatggcgaagatcctggcggacctggaccgcggcgccggcgacgcgcggctgcccaagaccaagctcgtctgcacgcttggcccggcctcccgctccgtgcccatgctcgagaagctgctccgcgccggcatgaacgtcgcgcgcttcaacttctcccacggcacccaccagtaccaccaggagacgctcgacagcctccgccaggccatgcacaacaccggcatcctctgcgccgtcatgctcgacaccaagggtcctgagattcgtacagggtttttgaaggatggtaaaccaattaagctaaccaagggtcaagagatcactgttaccactgattatgatatcaagggtgacgaaaaaatgatcgctatgagttacaagaaactgcctgttgacgtgaagcctggaaatgtcatactctgcgcagatggtactatctctctggccgttctgtcttgcgatcctgatgctggaactgtgcgttgtaggtgtgagaacactgcaatgcttggtgagagaaagaactgcaatttgccaggaattgttgtggatcttcctacattgactgagaaagataaagaagatattttgggctggggtgttccaaatgacattgacatgattgctctatcctttgtccgtaaaggatcagatttggtgactgtcagacaggttcttgggcagcatgccaagcgcattaagttgatgtcaaaggttgagaaccaagagggtgttgtaaactttgatgagatcttgagggagactgatgcttttatggttgctagaggtgatctgggaatggagattccagtcgagaagattttccttgcgcagaagatgatgatctacaagtgcaacattgctggcaaacctgttgttactgctacccagatgctcgagtcgatgatcaaatctcctcggccgacacgtgctgaggccactgacgttgcaaatgccgttcttgatggaactgactgtgtcatgctcagcggagagagtgccgctggagcctaccccgaggtggctgtgaagatcatggctcgtatttgcatcgaggcagaatcttccctggaccacgaggcagttttcaaggccatgatcaggtccgcgcctcttccaatgagccctctggagtcccttgcatcatctgctgtgaggactgccaacaaggccaaggctgcactgattgtcgtcctgactcgcggtggcaccacggccaaactggtcgccaagtaccgccccagggtccccatcctctccgttgtcgtacccgtgcttacgaccgactctttcgactggaccatcagctccgagggcccagctaggcacagcctgatctacagaggcctcattcccctcctcgccgagggctccgcgaaggctacggattcagagtcgacggaggtgatccttgaggccgcgttgaagtcggccgtgcagaagcagctctgcaagcctggtgatgccatcgtggctcttcatcgtattggcgtcgcctccgtcatcaagatctgcatcgtgaagtgatcaccacgacctggttctcactgctgggattccatgaaacagcttttctgcctcctttttactgcatttttttccggagacagatatttatgttgtaagcctgcgtctgttgtttgcagttgcggaatgttttttgttcacgtagttatttagctggtaaatggggagggagaggactccattgatgttagtggtaataagatttgtgtctatggagttgagttgaaagggttttttcatgctaagccccgagacactaggagatggagatcgaggttgagatgagataagcaataagtgaaaaaaatgttgatttgcaaaaaaaaaaaaaaaaaa

SEQ ID NO: 15577 - protein, 513 aa, Zea mays; identical to SEQ ID NO: 8894

SEQ ID NO: 15578 - DNA, 1590 bp, Aedes aegypti
  CDS (1)..(1590)
atgatggtctgggtgtccgattacgactgcgaccctaagggtcgcaagatgaatcccgaatcggtttcccacctggagcacatgtgctcgctggacattgactcgcagacggcgttcgtgcgtctgtccggcatcatctgtaccatcggaccggcctccgttgcaccggagatgctggagaagatgatggccaccgggatgaacattgcccggttgaacttctcgcacggttcgcacgaataccacgccaacacgatcaagaacatccgcgaggccgtcgataactactcgaagaagcagggcaagccgttcccgctggccatcgctctggacaccaagggtccggaaatccgtactgggctgatcgagggcagcggcaccggcgaggttgagctgaagaagggcgaacagatccagctgacgaccgacaaggatcatctggagaagggaagcaaggacaagatcttcgtcgactacgttaacatcgtcaaggttgtcaagaagggcgatcgggtgttcgtcgacgatggtctgatctcgctggtggttgacagtattagcggagacactctgacctgtacggttgagaacggtggtttgctgggatcgcgtaagggcgttaacctgcccggagtcccagttgatctgccggccgtctccgaaaaggataagtccgatctgcagttcggcgttgaacagggtgttgatgtgattttcgcttccttcatccgtaatgccgcggcattgaaggaaatccgtaccattctcggagagaagggtaagaacatcaagatcatctcgaagatcgagaaccagcagggtatgcagaacttggatgctatcatcgctgcctcggacggtattatggttgcccgtggtgatctgggtatcgaaatcccagcggagaaggtcttcctggcccagaagtcgatgatcgctcggtgcaaccgtgccggcaagcccgtcatctgcgccacccaaatgttggagtccatgatcaagaagccacgcccaacccgcgccgaaatttccgatgttgccaacgccatcattgacggtgctgactgcgtaatgctgtccggtgaaactgccaagggcgagtacccattggagtgtgtgctgaccatggccaagacctgcaaggaagccgaagctgccctctggcatcgcaacctgttcaacgatctggtcaacacgacccccactcctctggacacggccagctcgattgcgatcgctgcctcggaagcggctgccaagagccgcgctgctgccgtcattgtcattacgacctcgggccgttcggctcatctcatctccaagtaccggccacgctgcccgatcattgccgttactcggtttgcgcaaaccgctcgccagtgccatctgtaccgaggcatcctgcccgtgatctatgaacaacaagccctggaagactggctgaaggatgtcgatgctcgcgtccagtacggcatggatttcggcaaggaacgcggcttcctgaagccgggcaacccagtggtcgtcgtcaccggctggaagcagggctccggcttcaccaacaccattcgcattgtgaatgtcgaataa

SEQ ID NO: 15579 - protein, 529 aa, Aedes aegypti
MMVWVSDYDCDPKGRKMNPESVSHLEHMCSLDIDSQTAFVRLSGIICTIGPASVAPEMLEKMMATGMNIARLNFSHGSHEYHANTIKNIREAVDNYSKKQGKPFPLAIALDTKGPEIRTGLIEGSGTGEVELKKGEQIQLTTDKDHLEKGSKDKIFVDYVNIVKVVKKGDRVFVDDGLISLVVDSISGDTLTCTVENGGLLGSRKGVNLPGVPVDLPAVSEKDKSDLQFGVEQGVDVIFASFIRNAAALKEIRTILGEKGKNIKIISKIENQQGMQNLDAIIAASDGIMVARGDLGIEIPAEKVFLAQKSMIARCNRAGKPVICATQMLESMIKKPRPTRAEISDVANAIIDGADCVMLSGETAKGEYPLECVLTMAKTCKEAEAALWHRNLFNDLVNTTPTPLDTASSIAIAASEAAAKSRAAAVIVITTSGRSAHLISKYRPRCPIIAVTRFAQTARQCHLYRGILPVIYEQQALEDWLKDVDARVQYGMDFGKERGFLKPGNPVVVVTGWKQGSGFTNTIRIVNVE

SEQ ID NO: 15580 - DNA, 1560 bp, Aedes aegypti
  CDS (1)..(1560)
atggcagagggtcgcaagatgaatcccgaatcggtttcccacctggagcacatgtgctcgctggacattgactcgcagacggcgttcgtgcgtctgtccggcatcatctgtaccatcggaccggcctccgttgcaccggagatgctggagaagatgatggccaccgggatgaacattgcccggttgaacttctcgcacggttcgcacgaataccacgccaacacgatcaagaacatccgcgaggccgtcgataactactcgaagaagcagggcaagccgttcccgctggccatcgctctggacaccaagggtccggaaatccgtactgggctgatcgagggcagcggcaccggcgaggttgagctgaagaagggcgaacagatccagctgacgaccgacaaggatcatctggagaagggaagcaaggacaagatcttcgtcgactacgttaacatcgtcaaggttgtcaagaagggcgatcgggtgttcgtcgacgatggtctgatctcgctggtggttgacagtattagcggagacactctgacctgtacggttgagaacggtggtttgctgggatcgcgtaagggcgttaacctgcccggagtcccagttgatctgccggccgtctccgaaaaggacaagtccgatctgcagttcggcgttgaacagggtgttgatgtgattttcgcttccttcatccgtaatgccgcggcattgaaggaaatccgtaccattctcggagagaagggtaagaacatcaagatcatctcgaagatcgagaaccagcagggtatgcagaacttggatgccatcattgctgcctcggacggtattatggttgcccgtggtgatctgggtatcgaaatcccagcggagaaggtcttcctggcccagaagtcgatgatcgctcggtgcaaccgtgccggcaagcccgtcatctgcgccacccaaatgttggagtccatgatcaagaagccacgcccaacccgcgccgaaatttccgatgttgccaacgccatcatcgacggtgctgactgcgtaatgctgtccggtgaaactgccaagggcgagtacccattggagtgtgtgttgaccatggccaagacctgcaaggaagccgaagctgccctctggcatcgcaacctgttcaacgatctggtcaacacgacccccactccgctggacacggccagttcgattgcgatcgctgcctcggaagcggctgccaagagccgcgctgctgccgtcattgtcattacgacctcaggccgttcggctcatctcatctccaagtaccggccccgctgcccgatcattgccgttacccggttcgcgcaaaccgctcgccagtgccatctgtaccgaggcatcctgcccgtgatctatgaacaacaagccctggaagactggctgaaggatgtcgatgctcgcgtccagtacggcatggatttcggcaaggaacgcggcttcctgaagccgggcaacccagtggtcgtcgtcaccggctggaagcagggctccggcttcaccaacaccattcgcattgtgaatgtcgaataa

SEQ ID NO: 15581 - protein, 519 aa, Aedes aegypti
MAEGRKMNPESVSHLEHMCSLDIDSQTAFVRLSGIICTIGPASVAPEMLEKMMATGMNIARLNFSHGSHEYHANTIKNIREAVDNYSKKQGKPFPLAIALDTKGPEIRTGLIEGSGTGEVELKKGEQIQLTTDKDHLEKGSKDKIFVDYVNIVKVVKKGDRVFVDDGLISLVVDSISGDTLTCTVENGGLLGSRKGVNLPGVPVDLPAVSEKDKSDLQFGVEQGVDVIFASFIRNAAALKEIRTILGEKGKNIKIISKIENQQGMQNLDAIIAASDGIMVARGDLGIEIPAEKVFLAQKSMIARCNRAGKPVICATQMLESMIKKPRPTRAEISDVANAIIDGADCVMLSGETAKGEYPLECVLTMAKTCKEAEAALWHRNLFNDLVNTTPTPLDTASSIAIAASEAAAKSRAAAVIVITTSGRSAHLISKYRPRCPIIAVTRFAQTARQCHLYRGILPVIYEQQALEDWLKDVDARVQYGMDFGKERGFLKPGNPVVVVTGWKQGSGFTNTIRIVNVE

SEQ ID NO: 15582 - DNA, 1542 bp, Aedes aegypti
  CDS (1)..(1542)
atgaatcccgaatcggtttcccacctggagcacatgtgctcgctggacattgactcgcagacggcgttcgtgcgtctgtccggcatcatctgtaccatcggaccggcctccgttgcaccggagatgctggagaagatgatggccaccgggatgaacattgcccggttgaacttctcgcacggttcgcacgaataccacgccaacacgatcaagaacatccgcgaggccgtcgataactactcgaagaagcagggcaagccgttcccgctggccatcgctctggacaccaagggtccggaaatccgtactgggctgatcgagggcagcggcaccggcgaggttgagctgaagaagggcgaacagatccagctgacgaccgacaaggatcatctggagaagggaagcaaggacaagatcttcgtcgactacgttaacatcgtcaaggttgtcaagaagggcgatcgggtgttcgtcgacgatggtctgatctcgctggtggttgacagtattagcggagacactctgacctgtacggttgagaacggtggtttgctgggatcgcgtaagggcgttaacctgcccggagtcccagttgatctgccggccgtctccgaaaaggacaagtccgatctgcagttcggcgttgaacagggtgttgatgtgattttcgcttccttcatccgtaatgccgcggcattgaaggaaatccgtaccattctcggagagaagggtaagaacatcaagatcatctcgaagatcgagaaccagcagggtatgcagaacttggatgccatcattgctgcctcggacggtattatggttgcccgtggtgatctgggtatcgaaatcccagcggagaaggtcttcctggcccagaagtcgatgatcgctcggtgcaaccgtgccggcaagcccgtcatctgcgccacccaaatgttggagtccatgatcaagaagccacgcccaacccgcgccgaaatttccgatgttgccaacgccatcatcgacggtgctgactgcgtaatgctgtccggtgaaactgccaagggcgagtacccattggagtgtgtgttgaccatggccaagacctgcaaggaagccgaagctgccctctggcatcgcaacctgttcaacgatctggtcaacacgacccccactccgctggacacggccagttcgattgcgatcgctgcctcggaagcggctgccaagagccgcgctgctgccgtcattgtcattacgacctcaggccgttcggctcatctcatctccaagtaccggccccgctgcccgatcattgccgttacccggttcgcgcaaaccgctcgccagtgccatctgtaccgaggcatcctgcccgtgatctatgaacaacaagccctggaagactggctgaaggatgtcgatgctcgcgtccagtacggcatggatttcggcaaggaacgcggcttcctgaagccgggcaacccagtggtcgtcgtcaccggctggaagcagggctccggcttcaccaacaccattcgcattgtgaatgtcgaataa

SEQ ID NO: 15583 - protein, 513 aa, Aedes aegypti
MNPESVSHLEHMCSLDIDSQTAFVRLSGIICTIGPASVAPEMLEKMMATGMNIARLNFSHGSHEYHANTIKNIREAVDNYSKKQGKPFPLAIALDTKGPEIRTGLIEGSGTGEVELKKGEQIQLTTDKDHLEKGSKDKIFVDYVNIVKVVKKGDRVFVDDGLISLVVDSISGDTLTCTVENGGLLGSRKGVNLPGVPVDLPAVSEKDKSDLQFGVEQGVDVIFASFIRNAAALKEIRTILGEKGKNIKIISKIENQQGMQNLDAIIAASDGIMVARGDLGIEIPAEKVFLAQKSMIARCNRAGKPVICATQMLESMIKKPRPTRAEISDVANAIIDGADCVMLSGETAKGEYPLECVLTMAKTCKEAEAALWHRNLFNDLVNTTPTPLDTASSIAIAASEAAAKSRAAAVIVITTSGRSAHLISKYRPRCPIIAVTRFAQTARQCHLYRGILPVIYEQQALEDWLKDVDARVQYGMDFGKERGFLKPGNPVVVVTGWKQGSGFTNTIRIVNVE

SEQ ID NO: 15584 - DNA, 1413 bp, Klebsiella pneumoniae subsp. pneumoniae MGH 78578
  CDS (1)..(1413): transl_table=11
atgaaaaagaccaaaattgtttgcaccatcggtccgaaaaccgaatctgaagagatgctgaccaaaatgctggaagccggcatgaatgtgatgcgtctgaacttctcccacggtgactatgcggaacacggtcagcgcatccagaacctgcgcaatgtgatgagcaaaaccggtaagaaagccgctattctgctggacaccaaagggccggaaattcgtaccatcaagctggaaggcggcaacgacgtctccctgaaagcaggccagaccttcaccttcactaccgataaatccgtcatcggcaacaacgaaatcgttgcggtaacctatgaaggcttcacctctgacctcgccgtcggcaacaccgtcctggtggacgatggcctgatcggcatggaagtcacggctatcgaaggcaacaaagttatctgtaaagtgctgaacaatggcgacctcggcgagaacaaaggcgttaacctgccgggcgtctccatcgccctgccggcgctggctgagaaagacaaacaggatctgatcttcggttgcgaacagggcgtggacttcgtcgcggcctccttcatccgtaaacgttccgacgtcgtcgagatccgtgagcacctgaaagcccacggcggcgaaaacatccagatcatctccaaaatcgaaaaccaggaaggcctgaacaacttcgacgaaatcctcgaagcgtctgacggcatcatggttgcgcgtggcgacatgggcgtggagatcccggttgaagaagttatcttcgcccagaaaatgatcatcgaaaaatgtatccgcgcgcgtaaagtggttatcaccgccacccagatgctggactccatgatcaagaacccgcgtccgacccgcgctgaagccggcgacgtggctaacgccatcctcgacggcaccgatgcggtgatgctgtccggcgaatccgcgaaaggtaaatacccgctggaagcggtcaccatcatggcgaccatttgcgaacgtaccgaccgcgtgatgaccagccgtctggacttcaacaacgacaaccgtaaactgcgcatcaccgaagcggtgtgccgcggcgcggtagaaaccgctgagaaactggaagcgccgctgatcgtggtcgccacccagggcggtaaatccgcacgcgctgtgcgcaaatacttcccggatgccaccatcctggcgctgaccaccaacgaaaccaccgctcgtcagctggtgctgagcaaaggcgtggtaccgcagctggtggaagagattgcctctaccgatgatttctatcatctgggcaaagacctggcgctgaagagcggcctcgcgcgtaaaggcgacgtagtggtgatggtttccggcgcattagtgccgagcggcacgactaataccgcttccgtacacgtgctgtaa

SEQ ID NO: 15585 - protein, 470 aa, Klebsiella pneumoniae subsp. pneumoniae MGH 78578
MKKTKIVCTIGPKTESEEMLTKMLEAGMNVMRLNFSHGDYAEHGQRIQNLRNVMSKTGKKAAILLDTKGPEIRTIKLEGGNDVSLKAGQTFTFTTDKSVIGNNEIVAVTYEGFTSDLAVGNTVLVDDGLIGMEVTAIEGNKVICKVLNNGDLGENKGVNLPGVSIALPALAEKDKQDLIFGCEQGVDFVAASFIRKRSDVVEIREHLKAHGGENIQIISKIENQEGLNNFDEILEASDGIMVARGDMGVEIPVEEVIFAQKMIIEKCIRARKVVITATQMLDSMIKNPRPTRAEAGDVANAILDGTDAVMLSGESAKGKYPLEAVTIMATICERTDRVMTSRLDFNNDNRKLRITEAVCRGAVETAEKLEAPLIVVATQGGKSARAVRKYFPDATILALTTNETTARQLVLSKGVVPQLVEEIASTDDFYHLGKDLALKSGLARKGDVVVMVSGALVPSGTTNTASVHVL

SEQ ID NO: 15586 - DNA, 1557 bp, Xanthobacter autotrophicus Py2; identical to SEQ ID NO: 8651
  CDS (1)..(1557): transl_table=11

SEQ ID NO: 15587 - protein, 518 aa, Xanthobacter autotrophicus Py2; identical to SEQ ID NO: 8652

SEQ ID NO: 15588 - DNA, 1533 bp, Arabidopsis thaliana; identical to SEQ ID NO: 8391
  CDS (1)..(1533)

SEQ ID NO: 15589 - protein, 510 aa, Arabidopsis thaliana; identical to SEQ ID NO: 8392

SEQ ID NO: 15590 - DNA, 1494 bp, Arabidopsis thaliana; identical to SEQ ID NO: 8393
  CDS (1)..(1494)

SEQ ID NO: 15591 - protein, 497 aa, Arabidopsis thaliana; identical to SEQ ID NO: 8394

SEQ ID NO: 15592 - DNA, 1533 bp, Arabidopsis thaliana; identical to SEQ ID NO: 8395
  CDS (1)..(1533)

SEQ ID NO: 15593 - protein, 510 aa, Arabidopsis thaliana; identical to SEQ ID NO: 8396

SEQ ID NO: 15594 - DNA, 1533 bp, Arabidopsis thaliana; identical to SEQ ID NO: 8399
  CDS (1)..(1533)

SEQ ID NO: 15595 - protein, 510 aa, Arabidopsis thaliana; identical to SEQ ID NO: 8400

SEQ ID NO: 15596 - DNA, 1740 bp, Arabidopsis thaliana; identical to SEQ ID NO: 8401
  CDS (1)..(1740)

SEQ ID NO: 15597 - protein, 579 aa, Arabidopsis thaliana; identical to SEQ ID NO: 8402

SEQ ID NO: 15598 - DNA, 1497 bp, Arabidopsis thaliana; identical to SEQ ID NO: 8403
  CDS (1)..(1497)

SEQ ID NO: 15599 - protein, 498 aa, Arabidopsis thaliana; identical to SEQ ID NO: 8404

SEQ ID NO: 15600 - DNA, 1533 bp, Arabidopsis thaliana; identical to SEQ ID NO: 8405
  CDS (1)..(1533)

SEQ ID NO: 15601 - protein, 510 aa, Arabidopsis thaliana; identical to SEQ ID NO: 8406

SEQ ID NO: 15602 - DNA, 1413 bp, Vibrio cholerae O1 biovar eltor str. N16961
  CDS (1)..(1413): transl_table=11
atgaaaaagaccaaaatcgtatgtacgattggcccaaaaactgagtctgtagagaaactgactgagcttgtaaacgctggcatgaatgttatgcgtctcaacttctctcacggtgactacgttgaacacggcactcgtatcactaacttccgtaaagtgatggaagtgaccggtaaacaactggcgatcctactggatactaaaggtccagagatccgtactatcaagctggaaaacggtgacgatgtggatctggtcgctggccaagagttcactttcacaactgacacgaaagttgttggtaacaaagagcgcgtagcagtcacttactctggttttgcaaaagacctgaacgtgggcaaccgtattctggttgacgacggtcttatagagatggaagtactggcgaccactgacactgaagtgaagtgtaaagttctgaacaacggcgctctgggtgaaaacaaaggtgttaacctgccaggcgtttctgtcaatctgccagcgctgtctgaaaaagacaaaaacgacctgaaatttggttgtgagcaaggcgttgatttcgttgctgcctctttcatccgtaaaggttctgacgtgaaagaaatccgtgaagtattagcttctcacggcggtcaaaacattcaaatcatctctaaaatcgaaaaccaagaaggcttggacaacttcgatgagatccttgagctgtctgacggcatcatggttgcacgtggcgacctaggtgtagaaatcccagcagaagaagttatcttcgctcaaaagatgatgatcgagaaatgtaaccgtgcacgtaaagtggttatcacggcgacgcaaatgctggattcaatgatcaagaacccacgtccaactcgcgcagaagcgggcgacgttgcgaacgcgatcatggatggtactgatgctgtaatgctttctggcgaaacagcaaaaggtaagtacccagttgaagcggtgaagatcatggcgcaaattgctgagcgtactgaccctgtactgaaagcagaactgggttcacgcctagacagcccacgtctacgtatcactgaagccgtatgtaaaggtgcagtagacaccgcagagaaactggcagcgccactgatcatcgtagcaactgaagcgggtaaatctgctcgttcagttcgtaagtacttcccaacggctaacattattgcagtcaccaccaacaagaaaacagcagctcagttagtgctttctaaaggtgtaacgccagttgtggttgacgcgattgacaacactgacgctttctaccacctaggtaaagagattgcgctgcaatctggccttggcaagaaaggcgacatcgtagtgatggtttcaggcgcactggttgcttctggcacaacgaacactgcatcagtacacgtactgtaa

SEQ ID NO: 15603 - protein, 470 aa, Vibrio cholerae O1 biovar eltor str. N16961
MKKTKIVCTIGPKTESVEKLTELVNAGMNVMRLNFSHGDYVEHGTRITNFRKVMEVTGKQLAILLDTKGPEIRTIKLENGDDVDLVAGQEFTFTTDTKVVGNKERVAVTYSGFAKDLNVGNRILVDDGLIEMEVLATTDTEVKCKVLNNGALGENKGVNLPGVSVNLPALSEKDKNDLKFGCEQGVDFVAASFIRKGSDVKEIREVLASHGGQNIQIISKIENQEGLDNFDEILELSDGIMVARGDLGVEIPAEEVIFAQKMMIEKCNRARKVVITATQMLDSMIKNPRPTRAEAGDVANAIMDGTDAVMLSGETAKGKYPVEAVKIMAQIAERTDPVLKAELGSRLDSPRLRITEAVCKGAVDTAEKLAAPLIIVATEAGKSARSVRKYFPTANIIAVTTNKKTAAQLVLSKGVTPVVVDAIDNTDAFYHLGKEIALQSGLGKKGDIVVMVSGALVASGTTNTASVHVL

SEQ ID NO: 15604 - DNA, 1755 bp, Bacillus halodurans C-125
  CDS (1)..(1755): transl_table=11
atgcgaaagacaaaaatcgtttgtacgatcggtccggcgagtgaaagtgtagaaaagttagaacaattaatggaagcaggcatgaatgttgcgcggttaaatttttcccatggggactttgaagagcacggtgcacgaatcaaaaacattcgagaagcagcgaaacgtatcggaaaaacagttgcaattttacttgatacaaaaggaccggaaattcgtacccaaacccttgaagggggcgtggccgaattaaaggcagggcaagagcttgtcatctctatgaaggaggttgtaggtacgagtgagcgtatttctgtcacatatccgggcctagttcatgatgttgtaccaggtgcaaaaattttattagatgatgggttaattgggctagaagtcgttgaggttcgcgatcaagagattttgacaaaagtcttgaacagcggcacattgaaaaataaaaaaggtgtcaatgtcccgaacgtaagcgtcaacctgcctggaatcacagaaaaagacgcagcggatatcaagtttgggatagagcaaggcgtcgatttcattgcagcttcattcgttcgcagagcgcaagatgtactagaaattcgcgaattgcttgagcagcacggggcagagcatattaaaatcatccctaagatcgagaatcaagaaggcgttgataacatcgaggaaattcttgaagtatcagacggtttgatggtggcccgcggagatctaggggtagagattcctgctgaggaagttccacttgtgcaaaagtcgcttattaagaaatgcaaccttgtagctaaacctgttattacagcgacacagatgcttgactcgatgcagcgtaacccacgtccaactcgagccgaagctagtgatgtagcgaatgcgatttttgatggaacggatgcgatcatgctttccggtgaaaccgcagctggggattatccagtcgaggcggttcagacgatgagccgaattgcagagcgtgcagagcaagccctaaactatcaagaaatcttgtccaagcatacaaaagaagcgagaacgacgattacgagtgctattagtcaatcggttggccacacagcattcaacttgaatgcaagtgcaatcttgacggcgactgaaagcggccatacagctcgcgtagtagcgaaataccgcccgaaatcaccaattgtagcagttacaagtaacgaaacagttgttcgtcaactcgctctcgtttggggagtgtattcaatccttggagaagaggcagagacgacggatgatatgcttcaagtgaccgttgagacagcgttaaagtcccaattggtgaaacaaggggatcttgtcgtcatcacggcaggtgttccagtgggagagacaggaacgacgaacattatgaaagttcacgtcattggtgaagtggtcgcgaaaggtcaaggcattggacgcgacacggtgaacggcaaagtcgtcattgctgctaatgcagaggaagcaaatgcaaaggttgaagaagggtcgattttagttactttcagcacggataaggatatgatgccagcctttgaaaaagcagccgccgtcattaccgaagaaggtgggattacatcccatgccgcagttgttggtctaagtcttaatacacctgtgatcgtcggtgtacaaaatgcgtctgcgctctttaaagatggggaagaaataacggtcgatacgagccgcggtgacatttacagagggcaagcaagtgtactataa

SEQ ID NO: 15605 - protein, 584 aa, Bacillus halodurans C-125
MRKTKIVCTIGPASESVEKLEQLMEAGMNVARLNFSHGDFEEHGARIKNIREAAKRIGKTVAILLDTKGPEIRTQTLEGGVAELKAGQELVISMKEVVGTSERISVTYPGLVHDVVPGAKILLDDGLIGLEVVEVRDQEILTKVLNSGTLKNKKGVNVPNVSVNLPGITEKDAADIKFGIEQGVDFIAASFVRRAQDVLEIRELLEQHGAEHIKIIPKIENQEGVDNIEEILEVSDGLMVARGDLGVEIPAEEVPLVQKSLIKKCNLVAKPVITATQMLDSMQRNPRPTRAEASDVANAIFDGTDAIMLSGETAAGDYPVEAVQTMSRIAERAEQALNYQEILSKHTKEARTTITSAISQSVGHTAFNLNASAILTATESGHTARVVAKYRPKSPIVAVTSNETVVRQLALVWGVYSILGEEAETTDDMLQVTVETALKSQLVKQGDLVVITAGVPVGETGTTNIMKVHVIGEVVAKGQGIGRDTVNGKVVIAANAEEANAKVEEGSILVTFSTDKDMMPAFEKAAAVITEEGGITSHAAVVGLSLNTPVIVGVQNASALFKDGEEITVDTSRGDIYRGQASVL

SEQ ID NO: 15606 - DNA, 1440 bp, Pasteurella multocida subsp. multocida str. Pm70; identical to SEQ ID NO: 8409
  CDS (1)..(1440): transl_table=11

SEQ ID NO: 15607 - protein, 479 aa, Pasteurella multocida subsp. multocida str. Pm70; identical to SEQ ID NO: 8410

SEQ ID NO: 15608 - DNA, 1434 bp, Pseudomonas aeruginosa PAO1
  CDS (1)..(1434): transl_table=11
atgacagccgacaagaaagccaagatcctcgccaccctcggcccggccacccgcagccgcgacgatatccgtgccctggtggaggccggcgccaacctgctccgcctgaacttcagccacggcgactatgccgatcacgcgcagcgcttcgcctgggtgcgcgaggtggaagcggagctgaactacccgatcggcgtgctcatggacctgcagggtccgaagctgcgggtcggccgcttcgccgccggtgccgtgcaattgcagcgtgggcagaccttcaccctcgacctcagcgacgcccccggcgacgagcggcgggtcaacctgccgcatccggagatcatccatgccctggaaccgggcatgagcctgctgctggacgacggcaagatccgcctggaagtggtcaactgccacagcgacgccatcgagacccgcgtggcggtgggtggcgagctgtccgatcgcaagggcgtcaacgtgccggaagcggtgctgcaactcagcccgctgaccgacaaggaccgccgcgatctggccttcggcctggaactgggggtcgactgggtggcgctgtccttcgtgcaacgcccggaggacatcgacgaggcccgtgggctgatcggcgacaaggccttcctcatggccaagatcgagaagcccagcgcggtgagcgccatcgaggcgatcgccgagcgcgccgacgcgatcatggtggcgcgcggcgacctcggcgtagaggtgccggcggagagcgtgccaggcatccagaaacgcatcgtccaggtctgccgccagctcggcaagccggtggtggtggccacccagatgctcgagtcgatgcgcttctcccccgccccgacccgcgccgaggtgaccgacgtagccaccgcggtgggcgccggcgccgacgcggtgatgctctcggcggaaaccgcttccggacaataccctcgcgaggcggtagagatgatggcgaagatcgtccgccaggtggaggccgagccggactaccacgtccagctcgaggtcaaccgtccgcagcccgacgctaccgtctccgatgcgatcagctgcgcgatccgccgggtcagccggatcctcccggtggcggtgctggtgaactacaccgagtcgggcaactcgaccctgcgcgccgcccgcgagcggcccaaggcgccgatcctcagcctgaccccgaacctgcgtaccgcgcggcgactgaccgtggcctggggcgtgtattcggtggtcaacgagcaactggcgcacgtcgacgagatctgctcgaccgccctcgacatcgccctggcccagcgcatggcgcgccgcggcgacaccgtggtggtcaccgccggcgtaccgttcggtcgccccggctcgaccaacatgctgcgcatcgagaccgtggcgccgccgctgggagatctctga

SEQ ID NO: 15609 - protein, 477 aa, Pseudomonas aeruginosa PAO1
MTADKKAKILATLGPATRSRDDIRALVEAGANLLRLNFSHGDYADHAQRFAWVREVEAELNYPIGVLMDLQGPKLRVGRFAAGAVQLQRGQTFTLDLSDAPGDERRVNLPHPEIIHALEPGMSLLLDDGKIRLEVVNCHSDAIETRVAVGGELSDRKGVNVPEAVLQLSPLTDKDRRDLAFGLELGVDWVALSFVQRPEDIDEARGLIGDKAFLMAKIEKPSAVSAIEAIAERADAIMVARGDLGVEVPAESVPGIQKRIVQVCRQLGKPVVVATQMLESMRFSPAPTRAEVTDVATAVGAGADAVMLSAETASGQYPREAVEMMAKIVRQVEAEPDYHVQLEVNRPQPDATVSDAISCAIRRVSRILPVAVLVNYTESGNSTLRAARERPKAPILSLTPNLRTARRLTVAWGVYSVVNEQLAHVDEICSTALDIALAQRMARRGDTVVVTAGVPFGRPGSTNMLRIETVAPPLGDL

SEQ ID NO: 15610 - DNA, 1740 bp, Halobacterium sp. NRC-1; identical to SEQ ID NO: 8411
  CDS (1)..(1740): transl_table=11

SEQ ID NO: 15611 - protein, 579 aa, Halobacterium sp. NRC-1; identical to SEQ ID NO: 8412

SEQ ID NO: 15612 - DNA, 1473 bp, Neisseria meningitidis Z2491
  CDS (1)..(1473): transl_table=11
atgaaccagacaagccgcgatctgacccgcatcagccacaacactaaaatcgtcgccacccttgggccgggcagcaacaacgtcgaactgttggaagacatgatccgcgtcggcggtctgaacgtcgtccgcttcaacttcagccacggcacgcccgaattccatcaggaaaacgcccgcatcgtgcgcgaggcggcaaaacgcaccggacaggaaatcgccatcattgccgacctgcagggcccgaaaatccgcgtgggcaaaatcgccggcggcggcatcgaattgaacaaaggcgaaacgctgggactggatgccgcgctcgaaggcgaaggcacgcgcgaggcggtcggtttggactaccgcgacctgcccgacgacgttgccgcaggcgatgtcttgtggctggacgacggcctgctgaccctgaccgtggaatccgtcgaaggcagcaggattatcacaagggtggaaaacagccacgtcctgaaaagcaacaagggcatcaacaaacgcggcggcggtctgtccgcaggcgcgttgaccgaaaaagacttccgcgacctgaaaaccgcgattgccatcggttgcgactatctcgccatcagctttgtgaaatccgccgaagatttgcacatcgcgcgcgccaaagtcgaagaagaaatgaaaggcagtacggccgtgcgccccggtttggtttccaaaatcgaacgcgtagaagcgattgaaaaccttgatgaaatcatcctcgccggcgacggcattatggttgcacgcggcgacttggcggtcgaagtcggacacgccgccgtccccgccctgcaaaaacggatgatccgccgcgcccgcgagttgcgccgcttcagcattacggcgacgcaaatgatggaatcgatgattaccaaccccgtgccgacccgcgcggaagtcagcgatgtggcaaacgcggtattggacggcaccgatgcggtgatgtgttccgccgaaaccgccgtcggcgcgtatccgtttgaaaccgtcagccaaatggcgattatctgcgcggctgcggaaaaagagcaggattcgctcaacggcgttgccgaacaggtcgagtatcccgaagcggtcagcaccaacctggcggttgccggcggtgcggtcagcgtggcgcgcgcggttcacgccaaagccatcgtcgccctgaccgaaagcggttcgaccgcctttgaaatcagccgccacaacatcaccctgccgattttcgcgctgaccccgagcgtttccgcccaacgccgtatggcgatgtaccggggcgtgcgcccgctgattttggcaaccagcaccgaccacgacacggcgttaaacgaagtcgaaaccatgctggtggaacacaacatcctgcattccggcgaccaatacatcattaccagcggctcgcaaatgcgcgaatccggttcgaccaatacgctggaagtgctgcgcgtcaaataa

SEQ ID NO: 15613 - protein, 490 aa, Neisseria meningitidis Z2491
MNQTSRDLTRISHNTKIVATLGPGSNNVELLEDMIRVGGLNVVRFNFSHGTPEFHQENARIVREAAKRTGQEIAIIADLQGPKIRVGKIAGGGIELNKGETLGLDAALEGEGTREAVGLDYRDLPDDVAAGDVLWLDDGLLTLTVESVEGSRIITRVENSHVLKSNKGINKRGGGLSAGALTEKDFRDLKTAIAIGCDYLAISFVKSAEDLHIARAKVEEEMKGSTAVRPGLVSKIERVEAIENLDEIILAGDGIMVARGDLAVEVGHAAVPALQKRMIRRARELRRFSITATQMMESMITNPVPTRAEVSDVANAVLDGTDAVMCSAETAVGAYPFETVSQMAIICAAAEKEQDSLNGVAEQVEYPEAVSTNLAVAGGAVSVARAVHAKAIVALTESGSTAFEISRHNITLPIFALTPSVSAQRRMAMYRGVRPLILATSTDHDTALNEVETMLVEHNILHSGDQYIITSGSQMRESGSTNTLEVLRVK

SEQ ID NO: 15614 - DNA, 1443 bp, Escherichia coli O157:H7 EDL933
  CDS (1)..(1443): transl_table=11
  misc_feature (850)..(850): r is g or a
atgtccagaaggcttcgcagaacaaaaatcgttaccacgttaggcccagcaacagatcgcgataataatcttgaaaaagttatcgcggcgggtgccaacgttgtacgtatgaacttttctcacggctcgcctgaagatcacaaaatgcgcgcggataaagttcgtgagattgccgcaaaactggggcgtcatgtggctattctgggtgacctccaggggcccaaaatccgtgtatccacctttaaagaaggcaaagttttcctcaatattggggataaattcctgctcgacgccaacctgggtaaaggtgaaggcgacaaagaaaaagtcggtatcaactacaaaggcctgcctgctgacgtcgtgcctggtgacatcctgctgctggacgatggtcgcgtccagttaaaagtactggaagttcagggcatgaaagtgttcaccgaagtcaccgtcggtggtcccctctccaacaataaaggtatcaacaaacttggcggcggtttgtcggctgaagcgctgaccgaaaaagacaaagcagacattaagactgcggcgttgattggcgtagattacctggctgtctccttcccacgctgtggcgaagatctgaactatgcccgtcgcctggcacgcgatgcaggatgtgatgcgaaaattgttgccaaggttgaacgtgcggaagccgtttgcagccaggatgcaatggatgacatcatcctcgcctctgacgtggtaatggttgcacgtggcgacctcggtgtggaaattggcgacccggaactggtcggcattcagaaagcgttgatccgtcgtgcgcgtcagctaaaccgagcggtaatcacggcgrcccagatgatggagtcaatgattactaacccgatgccgacgcgtgcagaagtcatggacgtagcaaacgccgttctggatggtactgacgctgtgatgctgtctgcagaaactgccgctgggcagtatccgtcagaaactgttgcagccatggcgcgcgtttgcctgggtgcggaaaaaatcccgagcatcaacgtttctaaacaccgtctggacgttcagttcgacaatgtggaagaagctattgccatgtcagcaatgtacgcagctaaccacctgaaaggcgttacggcgatcattaccatgaccgaatcgggtcgtaccgcgctgatgacctcccgtatcagctctggtctaccaattttcgccatgtcgcgccatgaacgtacgctgaacctgactgctctctatcgtggcgttacgccggtgcactttgatagcgctaatgacggcgtagcagctgccagcgaagcggttaatctgctgcgcgataaaggttacttgatgtctggtgacctggtgattgtcacccagggcgacgtgatgagtaccgtgggttctactaataccacgcgtattttaacggtagagtaa

SEQ ID NO: 15615 - protein, 480 aa, Escherichia coli O157:H7 EDL933
  misc_feature (284)..(284): The Xaa at location 284 stands for Ala, or Thr.
MSRRLRRTKIVTTLGPATDRDNNLEKVIAAGANVVRMNFSHGSPEDHKMRADKVREIAAKLGRHVAILGDLQGPKIRVSTFKEGKVFLNIGDKFLLDANLGKGEGDKEKVGINYKGLPADVVPGDILLLDDGRVQLKVLEVQGMKVFTEVTVGGPLSNNKGINKLGGGLSAEALTEKDKADIKTAALIGVDYLAVSFPRCGEDLNYARRLARDAGCDAKIVAKVERAEAVCSQDAMDDIILASDVVMVARGDLGVEIGDPELVGIQKALIRRARQLNRAVITAXQMMESMITNPMPTRAEVMDVANAVLDGTDAVMLSAETAAGQYPSETVAAMARVCLGAEKIPSINVSKHRLDVQFDNVEEAIAMSAMYAANHLKGVTAIITMTESGRTALMTSRISSGLPIFAMSRHERTLNLTALYRGVTPVHFDSANDGVAAASEAVNLLRDKGYLMSGDLVIVTQGDVMSTVGSTNTTRILTVE

SEQ ID NO: 15616 - DNA, 1449 bp, Deinococcus radiodurans R1; identical to SEQ ID NO: 8415
  CDS (1)..(1449): transl_table=11

SEQ ID NO: 15617 - protein, 482 aa, Deinococcus radiodurans R1; identical to SEQ ID NO: 8416

SEQ ID NO: 15618 - DNA, 1419 bp, Mycobacterium leprae TN
  CDS (1)..(1419): transl_table=11
gtgacgagacgcgggaagatcgtctgtacccttggccctgcaacacaatcggacgagttaatccgggcgctggttgaagccggaatggacgttgcccgcatgaacttcagtcacggcgattactccgatcacaaggctgtttacgatcgggtgcgcgtcgcatctgatgcaaccggacgcgcggtcggcgtgctcgctgacctgcagggcccaaagatcaggctgggacgctttgccacggggtccacctactgggctgacggtgaaacggtaaggatcactgtggccgactgccacggtagccacgaccgggtatcaaccacctacaagaatttggccagggatgcggtggtcggtgaccgggttctggtcgacgacggcaaggtcggactggtggtctcggccatcgatggcgacgacgtggtctgtactgtcactgaaggcggcccggttagcaacaacaagggcatgtcgttgcccgggatgcacgtgtctgctccggctttgtcggacaaggacatcgaggacctcacgttcgcgctgaatctcggcgccgatctggtcgcgctgtcgtttgtgcgctcgccgtctgacgttgagctggtccacaaggcgatggatcgcgtcgggcggcgtgtaccggtgatcgccaagctggagaagccagaagccgtcgataacctcgaagctattgtgttggcattcgatgccatcatggtggctcgcggcgacctgggtgtcgagctgccacttgaagaggtcccactggtgcagaagcgggcaatccagatggcaagggagaatgcgaaacccgtcatcgtggctacccagatgctagactcgatgatcgaaaactcccggccgacccgagctgaggcctccgacgtcgctaatgcggtgctcgacggcgccgacgcgctcatgttgtctgaggaaacgtcggtggggaagtacccattggcagccgtgaagacgatgtcgcgcattgtgtgtgcggttgaggagaattccacggccgcgccgccgttgacacacgtacctcgcacgaagcggggggtgatctcgtacgctgcccgcgatatcggtgaaagactcgacgctaaggccttggttgcgttcactcaatccggtgacacggtgcggcgactggcgcgtctacataccccgctgccgctgcttgccttcaccgcgtggccagaggtgcgcagccaactcgctatgacttggggcaccgagacatttctcgtaccaaagatgctgtccactgacggtatgatacgccaggtggacaagtcactgctcgaacttggtcgctacaagcgtggtgacttggtggtgatcgtcgctggcacgccacctggcacagtaggatcgaccaacttgatccatgtgcaccggattggggaggacgacgtatag

SEQ ID NO: 15619 - protein, 472 aa, Mycobacterium leprae TN
MTRRGKIVCTLGPATQSDELIRALVEAGMDVARMNFSHGDYSDHKAVYDRVRVASDATGRAVGVLADLQGPKIRLGRFATGSTYWADGETVRITVADCHGSHDRVSTTYKNLARDAVVGDRVLVDDGKVGLVVSAIDGDDVVCTVTEGGPVSNNKGMSLPGMHVSAPALSDKDIEDLTFALNLGADLVALSFVRSPSDVELVHKAMDRVGRRVPVIAKLEKPEAVDNLEAIVLAFDAIMVARGDLGVELPLEEVPLVQKRAIQMARENAKPVIVATQMLDSMIENSRPTRAEASDVANAVLDGADALMLSEETSVGKYPLAAVKTMSRIVCAVEENSTAAPPLTHVPRTKRGVISYAARDIGERLDAKALVAFTQSGDTVRRLARLHTPLPLLAFTAWPEVRSQLAMTWGTETFLVPKMLSTDGMIRQVDKSLLELGRYKRGDLVVIVAGTPPGTVGSTNLIHVHRIGEDDV

SEQ ID NO: 15620 - DNA, 1359 bp, Sulfolobus solfataricus P2
  CDS (1)..(1359): transl_table=11
atgagaaagactaaaatagttgctactttaggtccttcctcagaggaaaaagtaaaagaactggcagaatacgttgatgtttttagaataaattttgcacatggagacgaaacatctcataggaagtattttgatcttattagaacatatgcaccggaatctagtattatagtagatttgccagggcctaagttgagactaggagaactcaaagaaccaatagaggtgaagaaaggagataagatagttttctctcaaaaagatggaattccagttgatgatgagttattttattcggctgtaaaagaaaactcggatatcttaattgcagacggaacaatacgtgtgagggttaagtcaaaagctaaggatagagtagagggaaccgtaatagagggtggaattttattatcgagaaaaggaataaatattcctaatgtcaatctaaaatctgggataacggacaacgatttaaaacttttaaaaagagctttagatctgggagcagattatataggactctcttttgtaataagtgagaatgatgtaaagaaggtaaaggaatttgtaggtgatgaagcttgggttatcgcgaagatagaaaaaagtgaggcattaaagaacttaaccaatatcgttaatgaatcggatggaataatggtagccagaggcgatttgggggttgagactggcttagaaaatctgcctttaattcaaaggagaatagtaaggacttcaagagtatttggcaaacccgtcattttagcaactcaagtattaacttcgatgataaacagccctatacctaccagagctgagattatagatatttctaactcgattatgcagggagtggactctataatgttaagcgatgaaacagccataggcaattatccagttgaaagcgtaagaactcttcataatatcataagtaatgtagaaaagagtgtaaaacatagaccaatcggaccactaaatagtgagagtgatgcgatagctctagctgctgtaaatgcaagtaaagtatctaaggcagatgtaatagtagtgtatagtagatcaggtaattcaatattgcgcgtatcgagactgagacctgaacgtaacataataggagtctctcctgatcctagactagctaaaaagtttaagctttgttatggtgtaatacccattagtataaacaaaaagatgcagtccatagacgagataatagacgtctcagccaagctaatgcaggaaaaaataaaggacttaaaatttaaaaaaatcgttatagtaggaggggatcctaaacaagaagcggggaagactaacttcgttatagttaagacactagaacaacaaaagaaatga

SEQ ID NO: 15621 - protein, 452 aa, Sulfolobus solfataricus P2
MRKTKIVATLGPSSEEKVKELAEYVDVFRINFAHGDETSHRKYFDLIRTYAPESSIIVDLPGPKLRLGELKEPIEVKKGDKIVFSQKDGIPVDDELFYSAVKENSDILIADGTIRVRVKSKAKDRVEGTVIEGGILLSRKGINIPNVNLKSGITDNDLKLLKRALDLGADYIGLSFVISENDVKKVKEFVGDEAWVIAKIEKSEALKNLTNIVNESDGIMVARGDLGVETGLENLPLIQRRIVRTSRVFGKPVILATQVLTSMINSPIPTRAEIIDISNSIMQGVDSIMLSDETAIGNYPVESVRTLHNIISNVEKSVKHRPIGPLNSESDAIALAAVNASKVSKADVIVVYSRSGNSILRVSRLRPERNIIGVSPDPRLAKKFKLCYGVIPISINKKMQSIDEIIDVSAKLMQEKIKDLKFKKIVIVGGDPKQEAGKTNFVIVKTLEQQKK

SEQ ID NO: 15622 - DNA, 1419 bp, Clostridium acetobutylicum ATCC 824
  CDS (1)..(1419): transl_table=11
gtgcaaaaaacaaaaatgatttttacaatagggccctctagtgattcagaggagaaattaaaagaattaatgaatgctggaatgaatgctgcaaggttaaatttttcacatggcactcatgaagatcacaaagaaaaaatagatattataaaaaaacttagaaaagaactgaacaaaaatgttgcaattgtagttgacatcaaaggaccaaaaattagaactcataattttgaaaatgacaaagctgaaataaaaaaaggtcaaaccttcacagtaatgtgtggaagcgaaattttgggaaattcagagaaatgctccgtttcttatgatgatctttataaagatgtaaaaaaaggtggattactccttgtcgatgatggtcttttagaatttgaaataactgatgtacaagacaaaaacattatttgtaaggcaaaaaataatggtattatttcaaatcataaaggtgtaaatgtacctggtgtttctataggtcttcctgctgtaactgaaaaagatgtattagatttaaaatttgcatgtaaaatgcaagctgatttagtagctgcttcttttataagaaaagcagaagatgtatctgtcgttagaaaggttcttaaagaaaatggtggagaagatataagagttatctctaagatagaaactcaagaaggtgttgataacatcgataagattctcgaactatctgatggaatcatggtagcaagaggagatatgggtgttgaaattccaatagaggatgttccttcaatacagaaaatgataataagaaaatgtaatgatgcaggcaaaatagttataacagctactcaaatgcttgattcaatgataagaaacccaagacctacaagagctgaggcatcagatgttgccaatgcaatatatgacggaacagatgctataatgctaagtggagaaagtgcaagtggtttatatccaattgaagctgctgaaactatggcaaagatagcacaaaaaacagaatctcaaatagactatactaaagctcttaatgaaagaaaaggtgaaattataacaaaaatttcagacgctataagtcttgctgcatgctcaactgctgctgaacttaaagctgctgctataataacagctactcaaagcggtataactgcaagaatggtatctaaattcagaccaacttgccctataatagctgttacacctcatgatgatgttgcaagaagacttgctctaaactttggtataacacctattacatctgaaaaagttgtttcaacagatgaacttatatctgtttcaataaaaagagcacttaacgagaatttaattaaaaaaggtgacttagttgttgtagttgcaggtgttcctgtaggcgaatctggaactactaatatgttaaaaattcaatacacataa

SEQ ID NO: 15623 - protein, 472 aa, Clostridium acetobutylicum ATCC 824
MQKTKMIFTIGPSSDSEEKLKELMNAGMNAARLNFSHGTHEDHKEKIDIIKKLRKELNKNVAIVVDIKGPKIRTHNFENDKAEIKKGQTFTVMCGSEILGNSEKCSVSYDDLYKDVKKGGLLLVDDGLLEFEITDVQDKNIICKAKNNGIISNHKGVNVPGVSIGLPAVTEKDVLDLKFACKMQADLVAASFIRKAEDVSVVRKVLKENGGEDIRVISKIETQEGVDNIDKILELSDGIMVARGDMGVEIPIEDVPSIQKMIIRKCNDAGKIVITATQMLDSMIRNPRPTRAEASDVANAIYDGTDAIMLSGESASGLYPIEAAETMAKIAQKTESQIDYTKALNERKGEIITKISDAISLAACSTAAELKAAAIITATQSGITARMVSKFRPTCPIIAVTPHDDVARRLALNFGITPITSEKVVSTDELISVSIKRALNENLIKKGDLVVVVAGVPVGESGTTNMLKIQYT

SEQ ID NO: 15624 - DNA, 1440 bp, Agrobacterium tumefaciens str. C58; identical to SEQ ID NO: 8419
  CDS (1)..(1440): transl_table=11

SEQ ID NO: 15625 - protein, 479 aa, Agrobacterium tumefaciens str. C58; identical to SEQ ID NO: 8420

SEQ ID NO: 15626 - DNA, 1758 bp, Listeria monocytogenes EGD-e; identical to SEQ ID NO: 8425
  CDS (1)..(1758): transl_table=11

SEQ ID NO: 15627 - protein, 585 aa, Listeria monocytogenes EGD-e; identical to SEQ ID NO: 8426

SEQ ID NO: 15628 - DNA, 1758 bp, Listeria innocua Clip11262
  CDS (1)..(1758): transl_table=11
atgaaaaaaacgaaaattgtttgtacaattggtcctgcaagtgagtcagttgacacattagttcagttgatcgaagcaggaatgaacgttgcacgtcttaatttctctcacggagattttgaagagcacggtgcgcgtattgtaaatatccgtgaagcatcgaaaaaaactggcaaacaagttgctatcttacttgatacaaaaggtccagaaatccgtacaaacgacatggtcggcggaaaattagaattccaaacaggtgacgttgtacgtgtatctatgactcctgttgaaggaacaaaagaaaaattctctgtaacttacggagaactttatgatgacgtagaaattggttcttccattttacttgatgacggtttaatcggtcttgaagtaatcgaaaaagacgaagctaatcgcgaactagtaactaaagtacttaacccaggtgtacttaaaaataaaaaaggtgttaacgtaccgaatgtttctatcaacctaccaggaatcacagaaaaagatgctgctgatatccgcttcggtttagaacaaggtattgactttatcgctgcatctttcgtacgtcgtgctacagatgttcttgaaattactaaaattttagaagagcataacgcaactcacgtacaaatcattcctaaaatcgaaaaccaagaaggcgttgacaacatcgacgaaatcttacaagtatctcaaggcttaatggttgctcgtggtgacctaggtgttgaaattccagctgaagaagttccgattgtacaaaaagaacttatcagaaaatgtaataaacttggtaaacctgttattactgctacacaaatgcttgattccatgcaacgtaacccacgtccaactcgcgctgaagcaagtgacgtagcgaatgcgatttttgatggaacagatgctattatgttatccggtgaaacagctgctggggattatccagtagaagcagttaaaatgatggcgaaaatcgctgttcgtactgaggaagttctagttgctcaagataaatttgcacttaaacttcatgaaaatacagatatgacagaagctatcggtcaagcagttggccatactgcgaaaaacctaaatgtacaaactatcgttgctgcgactcaaagtggtcacacagctcgtatgatttctaaataccgtccaaaatctcatatcgttgctgtaacattcaacgaacatgtatatcgcggattagctctttcttggggcgtatatcctcgtctagctactccagttagcaatacagacgaaatgtttgaccttgcagtaaaagaatctcttgcttcaggtgttgcgaaacaaggcgacctaatcatcatcactgctggtgttccagttacagaaagcggaacaacaaacgttatgaaaatccaattaattggtgaaaaagtagttaaaggccaaggtattggtagcaaatcagttattggtaaagcagtagttgctaaatccaatgcagaagctcttcaaaaagcagaagaaggcggaatcttaatcgttaaaacaactgataaagaaatccttcctgcattcgagaaaagtgctgcagttgttgtggaagaaggcggcttaactagccatgcagcagttgttggaatcaaccttggcattcctgtcatcgttggcgctaaagacgcaacatcccttgtaaaagacggtgaaatcatcactgttgattctcgtcaaggtgttgtatataacggcaaaacagcaactcactaa

SEQ ID NO: 15629 - protein, 585 aa, Listeria innocua Clip11262
MKKTKIVCTIGPASESVDTLVQLIEAGMNVARLNFSHGDFEEHGARIVNIREASKKTGKQVAILLDTKGPEIRTNDMVGGKLEFQTGDVVRVSMTPVEGTKEKFSVTYGELYDDVEIGSSILLDDGLIGLEVIEKDEANRELVTKVLNPGVLKNKKGVNVPNVSINLPGITEKDAADIRFGLEQGIDFIAASFVRRATDVLEITKILEEHNATHVQIIPKIENQEGVDNIDEILQVSQGLMVARGDLGVEIPAEEVPIVQKELIRKCNKLGKPVITATQMLDSMQRNPRPTRAEASDVANAIFDGTDAIMLSGETAAGDYPVEAVKMMAKIAVRTEEVLVAQDKFALKLHENTDMTEAIGQAVGHTAKNLNVQTIVAATQSGHTARMISKYRPKSHIVAVTFNEHVYRGLALSWGVYPRLATPVSNTDEMFDLAVKESLASGVAKQGDLIIITAGVPVTESGTTNVMKIQLIGEKVVKGQGIGSKSVIGKAVVAKSNAEALQKAEEGGILIVKTTDKEILPAFEKSAAVVVEEGGLTSHAAVVGINLGIPVIVGAKDATSLVKDGEIITVDSRQGVVYNGKTATH

SEQ ID NO: 15630 - DNA, 1431 bp, Nostoc sp. PCC 7120
  CDS (1)..(1431): transl_table=11
atgcgtcgaactaaaattatctgtactgtaggcccggctacatctgcaccagaacgtttagaagcgttggtagaagctgggatgaatgtagcacggctgaatttttctcatggagcttatgacttccatgcccaaactgctcagtatttgcggcaaatcagtgctgacagacaaaagcctgtggcgattatgcaagacctatgcgggccgaagattcgcttgggaactttaccaccagaagggttaatggtagaggctggtcaggaagtgacttttgtcttgcaagaaaagggtagtagtcttgatgaattgcctttacctttgccgaccttgttcgcaatggtacgacctggggaaccaatcttaattaatgatggtcgtgtcaagttgattgtgacagatcgcgatgccgatcgcattcgggctattgccaaaatcgggggtcttctttctacccgtaagggtgttaacctgccagcgactcgtttacctgtcagttccatcaccgaaaaggacttgcaggatttgcgttttggcatcgatttgagtgtagattgggtggcggtgtcttttgtgcgatcgccttatgacctcgaaccagcgcaacggatgattgaagcggcggggaaaactattcgggtaatcgccaaaattgaacgtccagaagccgttgagcaaattgattctatcatcgacgttgctgatgcgattatgattgctcgtggtgacttgggtgtggaaatgcctatccatgaagtcccattgattcaaaaggacatcattcgccgttgcaaccaagctggtaagcccgtgattacagcaacgcaaatgctagagtcgatgattagcgctcccgatcccacccgtgcggaggctacagacgttgctaactctattctcgatggtacagatgccgtcatgctctctggggaaacggctgtaggacaatatcccgtcgccgccgtccaggttatgcacgatatcgccgtgactacagaaaagtctttgcaagagggtagtaaacattgcttatcccatgaagcaggtggtctgagtgtcaccgaatctgtagctgaagcggtctgtcgtatcgcctacgaaacaggcgcaaaagcgattctttgcaacaccacatcagggagtacagcaaagctcgtgtcgaaatatcgtccgactacacccatttttgcgttgacccccgacgaaaccgcctaccatcagttagcactttcttggggtgtggaacctttattaaccccaccagtccacaatgcggaagaaatgtttatgaatctcatcaacaccgccgtgagaacgggtttggtgcatgacggtgacaaggtagttattacttctggagtgccaattggtaaatcaggcacaactagtttaattaaagtgcattctattggacaaccaatcaccgcctaa

SEQ ID NO: 15631 - protein, 476 aa, Nostoc sp. PCC 7120
MRRTKIICTVGPATSAPERLEALVEAGMNVARLNFSHGAYDFHAQTAQYLRQISADRQKPVAIMQDLCGPKIRLGTLPPEGLMVEAGQEVTFVLQEKGSSLDELPLPLPTLFAMVRPGEPILINDGRVKLIVTDRDADRIRAIAKIGGLLSTRKGVNLPATRLPVSSITEKDLQDLRFGIDLSVDWVAVSFVRSPYDLEPAQRMIEAAGKTIRVIAKIERPEAVEQIDSIIDVADAIMIARGDLGVEMPIHEVPLIQKDIIRRCNQAGKPVITATQMLESMISAPDPTRAEATDVANSILDGTDAVMLSGETAVGQYPVAAVQVMHDIAVTTEKSLQEGSKHCLSHEAGGLSVTESVAEAVCRIAYETGAKAILCNTTSGSTAKLVSKYRPTTPIFALTPDETAYHQLALSWGVEPLLTPPVHNAEEMFMNLINTAVRTGLVHDGDKVVITSGVPIGKSGTTSLIKVHSIGQPITA

SEQ ID NO: 15632 - DNA, 1716 bp, Arabidopsis thaliana; identical to SEQ ID NO: 8433
  CDS (1)..(1716)

SEQ ID NO: 15633 - protein, 571 aa, Arabidopsis thaliana; identical to SEQ ID NO: 8434

SEQ ID NO: 15634 - DNA, 1584 bp, Arabidopsis thaliana; identical to SEQ ID NO: 8435
  CDS (1)..(1584)

SEQ ID NO: 15635 - protein, 527 aa, Arabidopsis thaliana; identical to SEQ ID NO: 8436

SEQ ID NO: 15636 - DNA, 1791 bp, Arabidopsis thaliana; identical to SEQ ID NO: 8437
  CDS (1)..(1791)

SEQ ID NO: 15637 - protein, 596 aa, Arabidopsis thaliana; identical to SEQ ID NO: 8438

SEQ ID NO: 15638 - DNA, 1584 bp, Arabidopsis thaliana; identical to SEQ ID NO: 8439
  CDS (1)..(1584)

SEQ ID NO: 15639 - protein, 527 aa, Arabidopsis thaliana; identical to SEQ ID NO: 8440

SEQ ID NO: 15640 - DNA, 1428 bp, Fusobacterium nucleatum subsp. nucleatum ATCC 25586; identical to SEQ ID NO: 8443
  CDS (1)..(1428): transl_table=11

SEQ ID NO: 15641 - protein, 475 aa, Fusobacterium nucleatum subsp. nucleatum ATCC 25586; identical to SEQ ID NO: 8444

SEQ ID NO: 15642 - DNA, 1665 bp, Drosophila melanogaster
  CDS (1)..(1665)
atgtcgttgtccgcgaaatccgtgctaaaggagggctccacacagctgagccacatctgcgagctggatcttgcccagcaggcgtcccaccagcgcctcgtttccctgatcgcaaccatatcggtcagttcccggaacgcggacaccatatacaccatgataatgcgcggagtgaacatattccgtctgaacttctcccacgaatcgcacgagatgcactcgaaaacgatcgagctgatcaacgaggcgctggagaggattcataaggagacgggccaaatccgaacggtcgccattgcggcggacacgcgtggaccccagattcgtactggcctactggatggagatgtgttcctgcgcagcggcgacaatctgcgtctctcgatcaatcgggatctttacgacaagggcaacaaggaggcggtctacgtggactacccgaacatcatcaacctgaccaagaccggcgatcgcctgttcatcgacgacggcaggctgctgctccacatcttggaagtgggagtggatggtctgctgtgcgaggtcatccatggcggccagctgaacaacaactgcaacgtgatcctgccggagatcgagatcgatttgcccgccgtctccgagaaggatatgtttgacatccagttcagcataaaggccaacgtggacttcctcttcgcctccgccgtgcgcagtgccaagaacgtcaaggagctgcgaacggtgctcggcgagaagggcaagcacatcaagatcatcgccaagatggacagcaagatagctctgagcaggttctcggagattctgcgtgcggcggatggattgctgctttcgcgagcggatctgggcacccagatacccattgaaaagctcttcatcacccagaagagcatactgggccaatgcaacaaggtgggcaagccggtcatagtggcctcccacatcctcgagtccatgcgcaccctgccccatcccacacgggccgagtgcttcgatttggccaacgccatcatcgatggagcagactgcatcatgctgtcgtcggaagtggccattgggtcgtttcccaaggagacggtggccacctgcgacacattgtgccgggaggccgagaaggtgctctggtttcgagacctcttctccgacctggtcagcgaggtgcgtggcgagctggacgcggcacactcgctggccattgcagccgtggagacggccaagcgcaccaatgccaccctgatcatcgtgctgaccacctcgggccgctcggccactctggtcagcaagttccgaccccgctgtcccatcatggctatcacgcgctgcgaacggaccgcccgctgggtctatctgcatcgcggagtcctgccgatactgtacaccttggagcccagcacggactacgccaccgatgtggacgctcgggtgcagttcgccatgacctctgccaagaagtggggcatcatcgacgacggcgatcccattgtgatagtgagtgcctggaaggatggcggcgggttcaccaacaatgtccgtgtggtctacgctttcttcgaggcggatcgcgtggactgcctgttccggtcggacaggcggcattctcgaaagaacaccaacctgcagatggcaaatcgggagcctgctgataagaaaagtggtaatgcgtag

SEQ ID NO: 15643 - protein, 554 aa, Drosophila melanogaster
MSLSAKSVLKEGSTQLSHICELDLAQQASHQRLVSLIATISVSSRNADTIYTMIMRGVNIFRLNFSHESHEMHSKTIELINEALERIHKETGQIRTVAIAADTRGPQIRTGLLDGDVFLRSGDNLRLSINRDLYDKGNKEAVYVDYPNIINLTKTGDRLFIDDGRLLLHILEVGVDGLLCEVIHGGQLNNNCNVILPEIEIDLPAVSEKDMFDIQFSIKANVDFLFASAVRSAKNVKELRTVLGEKGKHIKIIAKMDSKIALSRFSEILRAADGLLLSRADLGTQIPIEKLFITQKSILGQCNKVGKPVIVASHILESMRTLPHPTRAECFDLANAIIDGADCIMLSSEVAIGSFPKETVATCDTLCREAEKVLWFRDLFSDLVSEVRGELDAAHSLAIAAVETAKRTNATLIIVLTTSGRSATLVSKFRPRCPIMAITRCERTARWVYLHRGVLPILYTLEPSTDYATDVDARVQFAMTSAKKWGIIDDGDPIVIVSAWKDGGGFTNNVRVVYAFFEADRVDCLFRSDRRHSRKNTNLQMANREPADKKSGNA

SEQ ID NO: 15644 - DNA, 1752 bp, Thermoanaerobacter tengcongensis MB4; identical to SEQ ID NO: 8445
  CDS (1)..(1752): transl_table=11

SEQ ID NO: 15645 - protein, 583 aa, Thermoanaerobacter tengcongensis MB4; identical to SEQ ID NO: 8446

SEQ ID NO: 15646 - DNA, 1437 bp, Streptomyces coelicolor A3(2); identical to SEQ ID NO: 8447
  CDS (1)..(1437): transl_table=11

SEQ ID NO: 15647 - protein, 478 aa, Streptomyces coelicolor A3(2); identical to SEQ ID NO: 8448

SEQ ID NO: 15648 - DNA, 1431 bp, Streptomyces coelicolor A3(2); identical to SEQ ID NO: 8449
  CDS (1)..(1431): transl_table=11

SEQ ID NO: 15649 - protein, 476 aa, Streptomyces coelicolor A3(2); identical to SEQ ID NO: 8450

SEQ ID NO: 15650 - DNA, 1434 bp, Methanosarcina mazei Go1
  CDS (1)..(1434): transl_table=11
atggaaatcccggatcataaaacaaagatcgtctgtacaataggacctgcctcttcttctgaagagatgataaggaagcttatgcttgcgggcatgaacgtggcaaggataaatttttctcacggagactttgagagccactcaagggttgtccgaattatccgtaaggttgcagatgaacttggcaggacaattgcaatccttgcagacctgcctggcccgaaaatacgcataggcaaactcgaaaaagagcctgttatgctccataaagggaacccgataacccttacaattgacgacactccgggaaacgaagagagaatccctgtcagttacaaacagcttccggaaagcgtaacccctgggagccttatctacctcagtgacgggttcatacagctcctctgcaaggaggttacaggaaaagacgttctctgtgaagtccttatcggaggagagctttattcgcacaaagggctgaaccttccaggggcaaagatctttcttgacgctgtgactgaaaaagatttcaggatcctggaatttgcccttgaagaggacattgacactttcagcatctcttttgtagaaaatgcagaagatatccgaaaagtaagaaattttgccgcttccagaggaaagcaggtaaatatagtatcaaaaatagaacgcaggcaggctgtagaaaatataggagaaatccttgacgagaccgatgcccttatggttgcaaggggagacctgggagttgaaattcctatccaggaagtcccttcggtccagaaagaacttatccagagggcaaagctccttggggttcctgtgattactgcaacccatatgctggcttccatgacagataatataagacccacgcgtgccgaagccacggatgttgcaaacgctatccttgacggcacggatgctgttatgctctcggaagaaacagcagtcggaaactaccccgtggaagctgtcgagatgatggcaaagattgcaaagaccactgaaaactggcgctcccggactaaatgggggcttgacacaatgatcaaatccataactgccagggagatgtcagtggatgaggtaatcaccttacaggtttatgaagccctgcagaaactgcctgttgcagccgtacttaccccgacaaggagcggagcgactccccgcaggatttcgcgctttaatcctgacccctggattctggctttcagccgcgttcctaagacctgcaggttcctttccctgtcttacggggtttatcctgttgccgtaaacgaatctattgaaagctgggaaaaagagacaacggaaagaacaaaagaattgggatttgcgaaaagtaaagatctcgtgatttttacccagggccctgcttccggaaaacccggaggtacgaatatgctcaagatcctgacccttgactga

SEQ ID NO: 15651 - protein, 477 aa, Methanosarcina mazei Go1
MEIPDHKTKIVCTIGPASSSEEMIRKLMLAGMNVARINFSHGDFESHSRVVRIIRKVADELGRTIAILADLPGPKIRIGKLEKEPVMLHKGNPITLTIDDTPGNEERIPVSYKQLPESVTPGSLIYLSDGFIQLLCKEVTGKDVLCEVLIGGELYSHKGLNLPGAKIFLDAVTEKDFRILEFALEEDIDTFSISFVENAEDIRKVRNFAASRGKQVNIVSKIERRQAVENIGEILDETDALMVARGDLGVEIPIQEVPSVQKELIQRAKLLGVPVITATHMLASMTDNIRPTRAEATDVANAILDGTDAVMLSEETAVGNYPVEAVEMMAKIAKTTENWRSRTKWGLDTMIKSITAREMSVDEVITLQVYEALQKLPVAAVLTPTRSGATPRRISRFNPDPWILAFSRVPKTCRFLSLSYGVYPVAVNESIESWEKETTERTKELGFAKSKDLVIFTQGPASGKPGGTNMLKILTLD

SEQ ID NO: 15652 - DNA, 1527 bp, Xanthomonas campestris pv. campestris str. ATCC 33913
  CDS (1)..(1527): transl_table=11
atgccatcctcggtacgtgacgcgtgtgttaagtttcgcggcttttacagggaggccatcatgaaagaacgtcaacgccgcaccaagatcctcgccacgctgggaccggccacggatccgcctggtgtgctggacgccttgttcaaggcgggcgtcaacgtggtgcgcctcaacttcagccacggcgacccgtccggccaggccaagcgcgctgccgaagtgcgtgccgccgccgtccgcgtcggcgccgaagtgggcatcctggccgacctgccgggcccgaagatccgcatcgagcgctttgccggaggcaagatcaagctgaccatgggcgatcgtttcgacctggtggccgatatcaatgcgccggccggcgatcagcatcaggtgggcgtgagctacctgggcctgccgcaggatgtcaccgccggtgacgtgctgctgctcgacgatggcctggtgcagctgcaggtcaccgacgtgcagggcgcgcgcatcgtcaccaccgtgctcaacgatggtgtgttgtccgaccgcaagggcctcaacaagcagggcggcggtctgtcgctgggcgcgttgaccgagcgcgacaaggagctgatcggcatcgtggccaagatcggcgtggacttcatcgcggtgtcgttctgccgtaacgcgcaggacatgcacgacgcccgccagatcgcccagcagcacggctgcgatgcgcagttggtgtccaagatcgagcgcaccgaagcgatcgagaacctggtcgaaatcgtcgaagcctccgacgtggtgatggtggcgcgtggcgatctgggcgtggaaatcggcgatgccgaattgccgggcctgcagaagaagatcattcgcgagtcgctggcgcagaacaaggtggtgatcacggccacccagatgctgcagtcgatggtggaaagcccgatcccgacccgcgccgaagtactcgacgtggccaacgcggtcatcgacggcaccgatgcggtgatgctctcggccgaaaccgctgccggtgcgtatccggtgcgtgcagtggaagcgatggcgcgcatctgcctgggcgccgagcaccagttcgagttcgataccgacttcgaagcggcgcaacgcaacctgcagcgcgccgaccaggcgatcgcaatggcgaccatgttcctgtccgagcacatcggtctgggcggcgtggtggcgttgaccgaatccggcggcacgccgcgttacctgtcgcgcttccgttccaatatgccgatctatgcattcacccgtcatgacggcgcgcgtcgccagatggcgatgatgcgtggcgtgttcccgatcggtttcgacagccgtggcctgaccccacgcgaagccgcgcgcgcagcgatccgcctgctggtggagaacgagcgcatggggcctggcgaccgcgtggtgttcaccagcggcgagcacatggaaacccatggcgccaccaacacgctgcgtctgctggaagtgggcgaagacggccgcgccagcggtctgggcgagctgtag

SEQ ID NO: 15653 - protein, 508 aa, Xanthomonas campestris pv. campestris str. ATCC 33913
MPSSVRDACVKFRGFYREAIMKERQRRTKILATLGPATDPPGVLDALFKAGVNVVRLNFSHGDPSGQAKRAAEVRAAAVRVGAEVGILADLPGPKIRIERFAGGKIKLTMGDRFDLVADINAPAGDQHQVGVSYLGLPQDVTAGDVLLLDDGLVQLQVTDVQGARIVTTVLNDGVLSDRKGLNKQGGGLSLGALTERDKELIGIVAKIGVDFIAVSFCRNAQDMHDARQIAQQHGCDAQLVSKIERTEAIENLVEIVEASDVVMVARGDLGVEIGDAELPGLQKKIIRESLAQNKVVITATQMLQSMVESPIPTRAEVLDVANAVIDGTDAVMLSAETAAGAYPVRAVEAMARICLGAEHQFEFDTDFEAAQRNLQRADQAIAMATMFLSEHIGLGGVVALTESGGTPRYLSRFRSNMPIYAFTRHDGARRQMAMMRGVFPIGFDSRGLTPREAARAAIRLLVENERMGPGDRVVFTSGEHMETHGATNTLRLLEVGEDGRASGLGEL

SEQ ID NO: 15654 - DNA, 1785 bp, Thermosynechococcus elongatus BP-1; identical to SEQ ID NO: 8455
  CDS (1)..(1785): transl_table=11

SEQ ID NO: 15655 - protein, 594 aa, Thermosynechococcus elongatus BP-1; identical to SEQ ID NO: 8456

SEQ ID NO: 15656 - DNA, 1761 bp, Oceanobacillus iheyensis HTE831; identical to SEQ ID NO: 8457
  CDS (1)..(1761): transl_table=11

SEQ ID NO: 15657 - protein, 586 aa, Oceanobacillus iheyensis HTE831; identical to SEQ ID NO: 8458

SEQ ID NO: 15658 - DNA, 1530 bp, Bifidobacterium longum NCC2705; identical to SEQ ID NO: 8459
  CDS (1)..(1530): transl_table=11

SEQ ID NO: 15659 - protein, 509 aa, Bifidobacterium longum NCC2705; identical to SEQ ID NO: 8460

SEQ ID NO: 15660 - DNA, 1413 bp, Shigella flexneri 2a str. 301
  CDS (1)..(1413): transl_table=11
atgaaaaagaccaaaattgtttgcaccatcggaccgaaaaccgaatctgaagagatgttagctaaaatgctggacgctggcatgaacgttatgcgtctgaacttctctcatggtgactatgcagaacacggtcagcgcattcagaatctgcgcaacgtgatgagcaaaactggtaaaaccgccgctatcctgcttgataccaaaggtccggaaatccgcaccatgaaactggaaggcggtaacgatgtttctctgaaagctggtcagacctttactttcaccactgataaatctgttatcggcaacagcgaaatggttgcggtaacgtatgaaggtttcactactgacctgtctgttggcaacaccgtactggttgacgatggtctgatcggtatggaagttaccgccattgaaggtaacaaagttatctgtaaagtgctgaacaacggtgacctgggcgaaaacaaaggtgtgaacctgcctggcgtttccattgctctgccagcactggctgaaaaagacaaacaggacctgatctttggttgcgaaaaaggcgtagactttgttgctgcttcctttattcgtaagcgttctgacgttatcgaaatccgtgagcacctgaaagcgcacggcggcgaaaacatccacatcatctccaaaatcgaaaaccaggaaggcctcaacaacttcgacgaaatcctcgaagcctctgacggcatcatggttgcgcgtggcgacctgggtgtagaaatcccggtagaagaagttatcttcgcccagaagatgatgatcgaaaaatgtatccgtgcacgtaaagtcgttatcactgcgacccagatgctggattccatgatcaaaaacccacgcccgactcgcgcagaagccggtgacgttgcaaacgccatcctcgacggtactgacgcagtgatgctgtctggtgaatccgcaaaaggtaaatacccgctggaagcggtttctatcatggcgaccatctgcgaacgtaccgaccgcgtgatgaacagccgtctcgagttcaacaatgacaaccgtaaactgcgcatcaccgaagcggtatgccgtggtgccgttgaaactgctgaaaaactggatgctccgctgatcgtggttgctacccagggcggtaaatctgctcgcgcagtacgtaaatacttcccggatgccaccatcctggcactgaccaccaacgaaaaaacggctcatcagttggtactgagcaaaggcgttgtgccgcagctggttaaagagatcacttctactgatgatttctaccgtctgggtaaagaactggctctgcagagcggtctggcacacaaaggtgacgtcgtagttatggtttctggtgcactggtaccgagcggcactactaacaccgcatctgttcacgtcctgtaa

SEQ ID NO: 15661 - protein, 470 aa, Shigella flexneri 2a str. 301
MKKTKIVCTIGPKTESEEMLAKMLDAGMNVMRLNFSHGDYAEHGQRIQNLRNVMSKTGKTAAILLDTKGPEIRTMKLEGGNDVSLKAGQTFTFTTDKSVIGNSEMVAVTYEGFTTDLSVGNTVLVDDGLIGMEVTAIEGNKVICKVLNNGDLGENKGVNLPGVSIALPALAEKDKQDLIFGCEKGVDFVAASFIRKRSDVIEIREHLKAHGGENIHIISKIENQEGLNNFDEILEASDGIMVARGDLGVEIPVEEVIFAQKMMIEKCIRARKVVITATQMLDSMIKNPRPTRAEAGDVANAILDGTDAVMLSGESAKGKYPLEAVSIMATICERTDRVMNSRLEFNNDNRKLRITEAVCRGAVETAEKLDAPLIVVATQGGKSARAVRKYFPDATILALTTNEKTAHQLVLSKGVVPQLVKEITSTDDFYRLGKELALQSGLAHKGDVVVMVSGALVPSGTTNTASVHVL

SEQ ID NO: 15662 - DNA, 1437 bp, Leptospira interrogans serovar Lai str. 56601; identical to SEQ ID NO: 8463
  CDS (1)..(1437): transl_table=11

SEQ ID NO: 15663 - protein, 478 aa, Leptospira interrogans serovar Lai str. 56601; identical to SEQ ID NO: 8464

SEQ ID NO: 15664 - DNA, 1440 bp, Shewanella oneidensis MR-1; identical to SEQ ID NO: 8371
  CDS (1)..(1440): transl_table=11

SEQ ID NO: 15665 - protein, 479 aa, Shewanella oneidensis MR-1; identical to SEQ ID NO: 8372

SEQ ID NO: 15666 - DNA, 1539 bp, Drosophila melanogaster
  CDS (1)..(1539)
atggccgcaggagctgatacccaactggagcacatgtgccgtctgcagttcgactcgccagtgccccatgtgcgtctgtccggaatcgtgtgcaccatcggacctgcctccagcagcgtggagatgctggagaagatgatggccaccggcatgaacatcgcgcgcatgaacttctctcacggatcgcacgagtaccatgccgccaccgtggccaatgtgcgccaggcggtgaagaactactcggccaagctgggctacgaacaccccgtggccattgccctggacaccaaggggcccgagatccgtaccggtctgatcggaggcagcggcaccgccgagattgagctgaagaagggcgagaagatcaagctgaccaccaacaaggaattcctggagaagggctctctggagattgtgtacgtggactacgagaacattgtcaatgtggtgaagcccggcaaccgggtgttcgtcgatgacggtctgatctcactgattgtccgcgaggtaggcaaggattccctcacctgcgaggtggagaacggcggctctctgggttcccgcaagggtgtgaacctgccaggcgtgcccgtcgatctgcctgccgtctccgagaaggataagagcgatctgctgttcggtgtggagcaggaagtggacatgatctttgcttcgttcatccgcaacgccgctgctttgaccgagatccgtaaggttcttggcgagaagggcaagaacatcaagatcatttccaagatcgagaaccagcagggcatgcacaacctggacgagatcatcgaggccggtgatggcattatggtggcccgtggagatctgggtattgagattcccgccgagaaggtgttcctcgcccagaaggccatgattgcccgctgcaacaaggctggcaagcctgtgatctgcgccactcagatgttggagtcaatggtgaagaagccacgtcccactcgcgctgagatctctgatgtggccaacgctgtgctcgatggtgctgattgcgtcatgttgtctggtgagaccgccaagggcgagtacccgctggagtgcgtcctgaccatggccaagacctgcaaggaggccgaggctgccctctggcaccagaacctctttaacgacttggttcgcggcgctggtaccatcgatgcctctcacgcggctgccatcgctgccgttgaggctgccaccaaggccaaggcctccgccatcgtggtgatcaccaccagcggcaagtcggccttccaggtgagcaagtaccgcccacgctgccccatcatcgcggtcacccgtttcgcgcagaccgcccgacaggcccatctctaccgtggactggtgccactcatctacaaggagcccggtcttggtgactggctgaaggacgtggacgtgcgcgtgcagttcggtctgcaggtcggaaagaagaacggcttcatcaagaccggcgattccgtcgtggtggttaccggctggaagcagggctccggcttcaccaacaccatccgcattgtcaccgtcgaataa

SEQ ID NO: 15667 - protein, 512 aa, Drosophila melanogaster
MAAGADTQLEHMCRLQFDSPVPHVRLSGIVCTIGPASSSVEMLEKMMATGMNIARMNFSHGSHEYHAATVANVRQAVKNYSAKLGYEHPVAIALDTKGPEIRTGLIGGSGTAEIELKKGEKIKLTTNKEFLEKGSLEIVYVDYENIVNVVKPGNRVFVDDGLISLIVREVGKDSLTCEVENGGSLGSRKGVNLPGVPVDLPAVSEKDKSDLLFGVEQEVDMIFASFIRNAAALTEIRKVLGEKGKNIKIISKIENQQGMHNLDEIIEAGDGIMVARGDLGIEIPAEKVFLAQKAMIARCNKAGKPVICATQMLESMVKKPRPTRAEISDVANAVLDGADCVMLSGETAKGEYPLECVLTMAKTCKEAEAALWHQNLFNDLVRGAGTIDASHAAAIAAVEAATKAKASAIVVITTSGKSAFQVSKYRPRCPIIAVTRFAQTARQAHLYRGLVPLIYKEPGLGDWLKDVDVRVQFGLQVGKKNGFIKTGDSVVVVTGWKQGSGFTNTIRIVTVE

SEQ ID NO: 15668 - DNA, 1455 bp, Pseudomonas putida KT2440
  CDS (1)..(1455): transl_table=11
atgagcatccgccgcaccaaaatcgtcgccacccttggccccgccagcaactcgccggaagtgatcgaacaactgatcctcgccggcctggacgtggcacgtctgaacttctcccacggcacgccggacgagcacaaggcccgcgcgcgcctgatccgtgacatcgccgccaagaatggccgccatgttgcactgctgggcgacctgcagggtccgaagatccgcatcgccaagttcgccaacaagcgcatcgaactgaagatcggtgacaagttcaccttctccaccgcccacccgctgaccgaaggcaaccaggacatcgtcggtatcgactaccccgacctggtcaaggactgcggcgttggtgacgaactgctgctcgacgatggccgcgtggtcatgcgcgtcgaaaccgccactgcagatgccctgcactgcgtggtgatcatcggtggcccactgtcggaccacaaaggcatcaaccgtaaaggtggcggcctgaccgcaccggccctgaccgaaaaagacaaggccgacatcaaactggctgcggaaatggacctggactacctggccgtatccttcccgcgtgacgccagcgatatggaatacgcgcgcaagctgcgtgacgaagccggcggcagcgcctggctggtagccaagatcgaacgcgccgaagcggtggccgatgacgagaccctcgacaagctgatcgccgcctccgacgctgtgatggttgcccgtggtgacctgggcgtggaaatcggcgacgccgagctgatcgctatccagaagaagatcatccagcacgcccgccgcaacaacaaggccgtgatcgtggcgacccagatgatggagtcgatgatccagaacccgatgccgacccgcgcggaagtgtccgacgtggccaacgccgtgctggacaacaccgatgcggtgatgctgtcggccgaaagcgccgccggttcctacccgatcgaagctgtccaggccatggcacgcatctgcctgggtgccgaaaagcacccgaccagccagaagtccagccatcgcctgcacaccaccttccagcgctgcgacgaaagcatcgccttggcggccatgtacactgccaaccacttcccgggcgtaaaggcgatcatcgccctgaccgaaagcggctacaccccgctgatcatgtcgcgcctgcgttcgcatgtaccgatcttcgccctgtcgccgcaccgcgccacccaggcgcgcgcctcgatgttccgtggcgtgtacccgattgccttcgacccggccgcgctgccggccgataaggtgagccaggcggcggtcgacgaactgctcaaacgtggcctggtggagcaaggtgactgggtgatcctgaccaagggtgacagctaccacaccatcggtggcaccaatggcatgaagatcctgcacgtcggtgatccgctggtcggttga

SEQ ID NO: 15669 - protein, 484 aa, Pseudomonas putida KT2440
MSIRRTKIVATLGPASNSPEVIEQLILAGLDVARLNFSHGTPDEHKARARLIRDIAAKNGRHVALLGDLQGPKIRIAKFANKRIELKIGDKFTFSTAHPLTEGNQDIVGIDYPDLVKDCGVGDELLLDDGRVVMRVETATADALHCVVIIGGPLSDHKGINRKGGGLTAPALTEKDKADIKLAAEMDLDYLAVSFPRDASDMEYARKLRDEAGGSAWLVAKIERAEAVADDETLDKLIAASDAVMVARGDLGVEIGDAELIAIQKKIIQHARRNNKAVIVATQMMESMIQNPMPTRAEVSDVANAVLDNTDAVMLSAESAAGSYPIEAVQAMARICLGAEKHPTSQKSSHRLHTTFQRCDESIALAAMYTANHFPGVKAIIALTESGYTPLIMSRLRSHVPIFALSPHRATQARASMFRGVYPIAFDPAALPADKVSQAAVDELLKRGLVEQGDWVILTKGDSYHTIGGTNGMKILHVGDPLVG

SEQ ID NO: 15670 - DNA, 1416 bp, Pseudomonas putida KT2440
  CDS (1)..(1416): transl_table=11
atgacgcctgataaaaaagttaagatccttgccacccttggccctgcgatcaacggcatcgacgatatccgccagctggtcgaagccggggtgaacatcttccgcctcaacttcagccacggcgaacatgccgaccacgccctgcgctaccagtggatccgcgaagtcgagcaacagctgaactacccgctgggcatcctcatggacctgcaagggccgaagctgcgcgttggccgcttcgccgaaggcaaggtgcagttgcaacgcgggcaggccctgcgcctggatctggacaagaccccgggcgacagccgccgggtcaacctgccgcaccccgaaatcatcgccgccctcgaacccggcatggacctgctgctggacgacggcaagctgcgcctgcgcgtgaccgccaagcacagcgacgccatcgacaccgaggtgctgaatggtggcgagctttccgaccgcaagggcgtcaacgtaccgcaagcggtgctcgacctctccccgctcaccgaaaaagaccgccgcgacctggcctttggcctggagctgggtgtggactgggtcgccctgtcgttcgtgcagcgccctgaggacatcgtcgaagcgcgccagctgattggcgaccgcgcctacctgatggccaaaatcgagaaaccatcggcagtcgagcaactgcaagccatcgccgagctggcagacgcgatcatggtggcccgtggtgacctgggcgtggaagtaccggccgagagcgtgccgcagatccagaagcgcatcatcggcacctgccgccagctaggcaaacccgtggtggtggccacgcagatgctcgagtcgatgcgtttctcgccagcgccaacccgcgccgaagtcacggacgtggccaacgcggtggccgaaggtgccgatgcagtgatgctgtcggccgaaaccgcctcgggtgattacccgctggaagccgtgcagatgatgagcaagatcatccgccaggttgagaacggcccggactaccaggcccagctcgacgtcggccggccaaaggccgaagccaccgtgtcggatgccatcagctgcgccatccgccgcatcagcggcatcctgccagtggcggtgctggtcaactacagcgagtcgggtgcctcgaccctgcgcgcggcacgtgaacggccacgggcaccgatcctcaacctgacgccgaacctgaacaccgcgcgccgcctgagcgtggcttggggtgtgcattcggtggtcaacgaccgcctgcgtcaggtcgacgaggtggtttccaccgccctggagattgcccaggcgcaaggcatggccagccgtggcgacacgctgctgatcaccgctggcgtgcctttcggcaagccgggtacgactaacacgctgcggatcgagactttgatctga

SEQ ID NO: 15671 - protein, 471 aa, Pseudomonas putida KT2440
MTPDKKVKILATLGPAINGIDDIRQLVEAGVNIFRLNFSHGEHADHALRYQWIREVEQQLNYPLGILMDLQGPKLRVGRFAEGKVQLQRGQALRLDLDKTPGDSRRVNLPHPEIIAALEPGMDLLLDDGKLRLRVTAKHSDAIDTEVLNGGELSDRKGVNVPQAVLDLSPLTEKDRRDLAFGLELGVDWVALSFVQRPEDIVEARQLIGDRAYLMAKIEKPSAVEQLQAIAELADAIMVARGDLGVEVPAESVPQIQKRIIGTCRQLGKPVVVATQMLESMRFSPAPTRAEVTDVANAVAEGADAVMLSAETASGDYPLEAVQMMSKIIRQVENGPDYQAQLDVGRPKAEATVSDAISCAIRRISGILPVAVLVNYSESGASTLRAARERPRAPILNLTPNLNTARRLSVAWGVHSVVNDRLRQVDEVVSTALEIAQAQGMASRGDTLLITAGVPFGKPGTTNTLRIETLI

SEQ ID NO: 15672 - DNA, 1629 bp, Escherichia coli CFT073
  CDS (1)..(1629): transl_table=11
atggtttcagcactttggactgtagaactcaacgactcaaaaacaggcactcacgttgggctgagacacaagcacacattcctctgcacgctttttcgatgtcacctatccttagagcgaggcacaaccactttcgtaataccggattcgctttccggcagtgcgcccagaaagcaagtttctcccatccttctcaacttaaagactaagactgtcatgaaaaagaccaaaattgtttgcaccatcggaccgaaaaccgaatctgaagagatgttagctaaaatgctggacgctggcatgaacgttatgcgtctgaacttctctcatggtgactatgcagaacacggtcagcgcattcagaatctgcgcaacgtgatgagcaaaactggtaaaaccgccgctatcctgcttgataccaaaggtccagaaatccgcaccatgaaactggaaggcggtaacgacgtttctctgaaagcgggtcagtcctttactttcactactgataaatctgttatcggcaacagcgaaatggttgcggtaacgtatgaaggtttcactactgacctgtctgttggcaacaccgtactggttgacgacggtctgatcggtatggaagttaccgccattgaaggtaacaaagttatctgtaaagtgctgaacaatggcgacctgggcgaaaacaaaggtgtgaacctgcctggcgtttccattgccctgccagcactggctgaaaaagacaaacaggacctgatctttggttgcgaacaaggcgtagactttgttgctgcttcctttattcgtaagcgttctgacgttatcgaaatccgtgagcacctgaaagcgcacggcggcgaaaacatccacatcatctccaaaatcgaaaaccaggaaggcctcaacaacttcgacgaaatcctcgaagcctctgacggcatcatggttgcgcgtggcgacctgggtgtagaaatcccggtagaagaagttatcttcgcccagaagatgatgatcgaaaaatgtatccgtgcacgtaaagttgttatcactgcgacacagatgctggattccatgatcaaaaacccacgcccgactcgcgcagaagccggtgacgttgcaaacgccatcctcgacggtactgacgcagtgatgctgtctggtgaatccgcaaaaggtaaatacccgctggaagcggtttctatcatggcgaccatctgcgaacgtaccgaccgcgtgatgaacagccgtctcgagttcaacaatgacaaccgtaaactgcgtattaccgaagcggtatgccgtggtgccgttgaaactgctgaaaaactggatgctccactgatcgtggttgctactcagggcggtaaatctgctcgcgcagtacgtaaatacttcccggatgccaccatcctggcactgaccaccaacgaaaaaacggctcaccagttagtactgagcaaaggtgttgtgccgcagctggttaaagagatcacatctactgatgacttctaccgtctgggtaaagaactggctctgcagagcggtctggcacacaaaggtgatgtcgtagttatggtttctggtgcactggtaccgagcggcactactaacaccgcatctgttcacgtcctgtaa

SEQ ID NO: 15673 - protein, 542 aa, Escherichia coli CFT073
MVSALWTVELNDSKTGTHVGLRHKHTFLCTLFRCHLSLERGTTTFVIPDSLSGSAPRKQVSPILLNLKTKTVMKKTKIVCTIGPKTESEEMLAKMLDAGMNVMRLNFSHGDYAEHGQRIQNLRNVMSKTGKTAAILLDTKGPEIRTMKLEGGNDVSLKAGQSFTFTTDKSVIGNSEMVAVTYEGFTTDLSVGNTVLVDDGLIGMEVTAIEGNKVICKVLNNGDLGENKGVNLPGVSIALPALAEKDKQDLIFGCEQGVDFVAASFIRKRSDVIEIREHLKAHGGENIHIISKIENQEGLNNFDEILEASDGIMVARGDLGVEIPVEEVIFAQKMMIEKCIRARKVVITATQMLDSMIKNPRPTRAEAGDVANAILDGTDAVMLSGESAKGKYPLEAVSIMATICERTDRVMNSRLEFNNDNRKLRITEAVCRGAVETAEKLDAPLIVVATQGGKSARAVRKYFPDATILALTTNEKTAHQLVLSKGVVPQLVKEITSTDDFYRLGKELALQSGLAHKGDVVVMVSGALVPSGTTNTASVHVL

SEQ ID NO: 15674 - DNA, 1413 bp, Vibrio vulnificus CMCP6
  CDS (1)..(1413): transl_table=11
atgaaaaagaccaaaatcgtatgtacgattggcccaaaaactgagtctgtagagaaactgactgaactagtcaactcaggtatgaacgtaatgcgcctgaacttttctcacggtgactacgtagagcacggcactcgtatcgcgaacttccgccaagtaatggaaaacacaggtaagcaacttgctatcttactagacactaaaggtccagaaatccgcactatcaaactagaaaacggcgacgacgttgatctagtagctggtcaagaattcactttcacgactgatacttctgttgttggtaacaaagacatcgtagcagtaacttacccaggttttgctgcggatctatctgctggtaacactatcctagttgacgatggtctaatcgagatggaagttatcgcaacgactgcgactgaagttaagtgtaaagtactgaacaacggtgctctaggcgaaaacaaaggtgttaacctaccaggcgtttctgtaaacctacctgcactatctgaaaaagacaaaaacgaccttaaatttggttgtgagcaaggcgttgacttcgttgcagcatctttcatccgtaaagcatctgacgtaaaagaaatccgtgaagttctagcagcaaacggcggcgcgaacattcagatcatttctaagattgaaaaccaagaaggtgttgataacttcgacgaaatcctagagctttctgacggtatcatggttgctcgtggtgacctaggtgtagaaatccctgcagaagaagttatcttcgcacagaagatgatgatcgaaaaatgtaaccgcgcacgtaaagtggttatcactgcaactcaaatgctagattctatgatcaagaacccacgtccaactcgtgctgaagcgggtgacgttgcgaacgcaatcatggatggtactgatgcagtcatgctttctggcgaaacagcgaaaggtaaataccctgttgaagcggtaactatcatggcgcaaatcgctaaccgtactgattctgtactaaaagcagagctaggctctcgtctagacagcccacgcctacgtatcactgaagcggtatgtaaaggtgcagtagacacagctgagaaactagcagcaccactgatcatcgttgcaactgaaggtggtaagtctgcacgctctgtacgtaagtacttcccaactgcaaacattcttgcgctaacgacgaacaagaagacagcagctcaacttgtactgactaaaggtgttacacctgttgttgttgattcaatcgacaacacggatgcgttctacgtaaccggtaaagagcttgctcttgaatctggcctaggtagcaaaggcgacatcgttgtgatggtatctggtgctcttgttgcatctggtacaacgaatactgcgtcagtacacgtactataa

SEQ ID NO: 15675 - protein, 470 aa, Vibrio vulnificus CMCP6
MKKTKIVCTIGPKTESVEKLTELVNSGMNVMRLNFSHGDYVEHGTRIANFRQVMENTGKQLAILLDTKGPEIRTIKLENGDDVDLVAGQEFTFTTDTSVVGNKDIVAVTYPGFAADLSAGNTILVDDGLIEMEVIATTATEVKCKVLNNGALGENKGVNLPGVSVNLPALSEKDKNDLKFGCEQGVDFVAASFIRKASDVKEIREVLAANGGANIQIISKIENQEGVDNFDEILELSDGIMVARGDLGVEIPAEEVIFAQKMMIEKCNRARKVVITATQMLDSMIKNPRPTRAEAGDVANAIMDGTDAVMLSGETAKGKYPVEAVTIMAQIANRTDSVLKAELGSRLDSPRLRITEAVCKGAVDTAEKLAAPLIIVATEGGKSARSVRKYFPTANILALTTNKKTAAQLVLTKGVTPVVVDSIDNTDAFYVTGKELALESGLGSKGDIVVMVSGALVASGTTNTASVHVL

SEQ ID NO: 15676 - DNA, 1755 bp, Clostridium tetani E88
  CDS (1)..(1755): transl_table=11
atgcaaaaaactaaaatggtgtttaccataggaccagctagtgatagcgaagaagtattaagtgagttaataaaagcaggaatgagtgcatcaaggcataacttttcacatgggacccatgaagaacataaaataaggattgatttaataagaaaattaagtgacaaatttaataagaatattgctgtaatattagacacaaaaggacctgaaataagaacaggagattttaaagataaaactgtacaattaaaagaaggaaataaattcactatatactgtggggaagaaattttaggagatgaaacaaagtgttctataacttataatgatttgcataatgatgtaaaaacaggagattccatactaatagatgatggacttgtaggattagaagttgaagaagtagagggaagtaaagtacattgtgtagttaaaaatagtggtgctgtaagtaaccataagggtgtaaatgtacctggagtagatgtttcattaccttcattaacagaaaaagataaaagtgatcttgaatttggatgtaaagtaggagtagattttattgcagcatcttttattagaaaaggttcagacgtattggaaataagaaaggttctagaagaaaacggcggtacagatatacaaatattttctaaaatagaaaatcaacaaggggtagaaaatatagatgaaataataaagttttctgatggaataatggtagctagaggagatatgggtgtagaattacaaatggaacaagtacctataattcaaaaaatgattatagagaaatgtaacaaagctggcaaacctgttatcacagctactcaaatgttagactctatgattagaaatccaagaccaacaagagcagaagtttcagatgtagccaatgctatatttgatggaactgatgcggtaatgttaagtggtgaaacagcaggaggaaaatatcctatagaagctgctaaagctatggctaagattgctagaactgcagaagaaacaatggattatgatgaaatatttaacagaaaaagagaagcgcgtgtattaagtgtggctaatgcgataagcatagcaacctgtacaacagcttcagagttaaatgcatctgctatattaacagctactcaaacaggatatacagctagagcagtttccaaatatagaccagcatgtcctattatagcgattacaccaagtaagaatgtagcaagaaagttagcattgagttggggtgtgttcccaatacttactactaaatttacatccacagatgctttaatagaaaactctgttgatatagcattgacagcagaatatataagaaaaggagatttggttgtaatagcagctggaatacctgtaagttattcaggaacaactaacatgctaaaggttcatgtagttggagatatccttgttcagggaagaggtgctggaaatagtgcaggttatggtatagctaaagttgtaaatagtacagaagaagcagaaagggttatagaaagtggagatatattagttgtaaaagatgcagatatagattatgtttctatactaaatagagtatcaggagttataactgaaagaggaggattgacttctcacttagcaatagaatgtataaccaatgaaataccatttatatgtggggcaggtggggcaacagatgtattaaaaagtggatatttcataaccatggatgtaaaaagaggaatagtatataacggtaggattactatataa

SEQ ID NO: 15677 - protein, 584 aa, Clostridium tetani E88
MQKTKMVFTIGPASDSEEVLSELIKAGMSASRHNFSHGTHEEHKIRIDLIRKLSDKFNKNIAVILDTKGPEIRTGDFKDKTVQLKEGNKFTIYCGEEILGDETKCSITYNDLHNDVKTGDSILIDDGLVGLEVEEVEGSKVHCVVKNSGAVSNHKGVNVPGVDVSLPSLTEKDKSDLEFGCKVGVDFIAASFIRKGSDVLEIRKVLEENGGTDIQIFSKIENQQGVENIDEIIKFSDGIMVARGDMGVELQMEQVPIIQKMIIEKCNKAGKPVITATQMLDSMIRNPRPTRAEVSDVANAIFDGTDAVMLSGETAGGKYPIEAAKAMAKIARTAEETMDYDEIFNRKREARVLSVANAISIATCTTASELNASAILTATQTGYTARAVSKYRPACPIIAITPSKNVARKLALSWGVFPILTTKFTSTDALIENSVDIALTAEYIRKGDLVVIAAGIPVSYSGTTNMLKVHVVGDILVQGRGAGNSAGYGIAKVVNSTEEAERVIESGDILVVKDADIDYVSILNRVSGVITERGGLTSHLAIECITNEIPFICGAGGATDVLKSGYFITMDVKRGIVYNGRITI

SEQ ID NO: 15678 - DNA, 1761 bp, Lactobacillus plantarum WCFS1
  CDS (1)..(1761): transl_table=11
atgaaaaaaaccaagattgtttcaacacttggtcctgccagcaccgatactgacactattgttaaattaatcgaagccggcgcaaatattttccgctttaacttttcacatggtgatcatgaagaacatttagatcgcttaaacaaagttcacgaagcagaaaagattacgggtaagaccgttggtatcatgcttgatactaagggtgctgaaattcggacgaccgttcaagctaacggaaaatctgaatacaagatcggtgacaaggttcgtatcaccatggatgattcattagatacgacccatgataagattgccgttacttacaagaacctctatgatgatgttcatgtaggtggccatgtcctctttgatgatggtttattagatatgaagatcgacgaaaaggacgaagctaaccgcgaattggttacaactgttcaaaacgccggcgttttaggctcacgtaagggtgttaacgctcctggcgtttcaatcaacttacctgggatcactgaaaaagactcaagtgatattcgctttggtttggatcatgaaatcaactacatcgctgcttcattcgttcgtaagccacaagatgtcttagacattcgtgaattacttgaagaaaagcacatggaacacgttcaaatcttccctaagatcgaatcacaagaaggtatcgacaacgccgatgaaattcttaaggtttgtgatggtttgatggttgctcgtggtgacatgggtgttgaaattcctgctgaaaatgtgccattggtacaaaagagtttaatcaagaagtgtaatgctttaggtatgcctgttatcacggctactcaaatgttagactcaatgcaagaaaacccacgtcctactcgtgccgaagcttctgacgttgccaacgctgtctttgatggtactgacgcaacgatgctttctggtgaaagtgctaacggtctttaccctgttgaatctgttgccatgatggctaagattgacgaaaaggctgaaaacactttggctgaaaacggtacgttacaattaaaccgtttcgacaagactagtgttactgaaacaatcggtattgcgattgctcgggcagctaagaacttgaacattaagacgattgttgctgcgactgaatctggctacactgctaagatgatttcgaagtaccgtccaaatgctgatatcttagcaatcacttttgacgaacggactcaacgtggcttaatggttaactggggtgttcaaccaatcgtggctgaaaaaccagaaaccactgatgacatgtttgatttagctgcttctaaggctgttgaacttggctttgccaaggaaggcgacttaatcttgattactgccggtgtgccagttggcgaacgcggtacgactaacatcatgaagatccaattaattggttctaagttagctgatggtcaaggtgtcggtgatgaaacggttatcggtaaagccgtaatcgcaacgtctgctcaagaagctatcgacaaggccgttgaaggtggcgtcttagttactaagacgactgacaaagactacttaccagcaatcgaaaagtctagtgctttagttgttgaaaacggtggtttaacttcacacgctgctgttgttggtatctcaatgggaattcctgttatcgttggtgttaaggacgctactagtgttattgctgatggtcaattgatcacagttgattcacgtcgtggccttgtataccgcggtgcttcaaacgccctttaa

SEQ ID NO: 15679 - protein, 586 aa, Lactobacillus plantarum WCFS1
MKKTKIVSTLGPASTDTDTIVKLIEAGANIFRFNFSHGDHEEHLDRLNKVHEAEKITGKTVGIMLDTKGAEIRTTVQANGKSEYKIGDKVRITMDDSLDTTHDKIAVTYKNLYDDVHVGGHVLFDDGLLDMKIDEKDEANRELVTTVQNAGVLGSRKGVNAPGVSINLPGITEKDSSDIRFGLDHEINYIAASFVRKPQDVLDIRELLEEKHMEHVQIFPKIESQEGIDNADEILKVCDGLMVARGDMGVEIPAENVPLVQKSLIKKCNALGMPVITATQMLDSMQENPRPTRAEASDVANAVFDGTDATMLSGESANGLYPVESVAMMAKIDEKAENTLAENGTLQLNRFDKTSVTETIGIAIARAAKNLNIKTIVAATESGYTAKMISKYRPNADILAITFDERTQRGLMVNWGVQPIVAEKPETTDDMFDLAASKAVELGFAKEGDLILITAGVPVGERGTTNIMKIQLIGSKLADGQGVGDETVIGKAVIATSAQEAIDKAVEGGVLVTKTTDKDYLPAIEKSSALVVENGGLTSHAAVVGISMGIPVIVGVKDATSVIADGQLITVDSRRGLVYRGASNAL

SEQ ID NO: 15680 - DNA, 1422 bp, Tropheryma whipplei str. Twist
  CDS (1)..(1422): transl_table=11
ttgtttatgcgtagggccaagattgttgttactctcggtccggcagtatcagatcttgattctgtgagagatcttatatccgctggtgccgacgtctttcgcatgaatctcagccacggatcgttggattttcacagggaggtatttctgaatgttaggacggctgctgctgagctagacaggcatattgctatatttgctgatcttcagggtccaaaaatacgtttagggcgttttgcttctgggccgtataccctacaagagggtgatatctttacaatcacaaccgagcaggtgttgggaacgaaagagctttccagcacaactttgccgacattaccagataatgtctcagagggggatttgcttttaattgatgatggcaaagttgccctgagggcgattgggaatgacggggttcggatcactacacgtgttgaagttccgggaaaggtctcgaataataagggtattaaccttccgggtgttggagttaaagttccggccttatctgaaaaggatattgactcactccgctgggccctttctcttccagttgatatgattgccttgagttttgtgcgctgcgcatcagatgtggatgctgtgcacaaggttatggatgaagagggtattcgccttcctgttattgcaaagatagaaaagcctcaagcagtatctgccatagaggagattgcactgcggtttgatgcgattatggtagcaaggggtgatcttggggttgaactgccgcttgaagatgtgccggtagcccagaaggaaattgttaaggttgcacgcaggtttgctcggccggttattatcgcaacccagatgcttgagtcaatgatctcttcctcgcggcccaccagggctgaggcgagtgatgttgcaaacgctgttcttgatggagccgatgcactgatgctaagcggtgagacaagtgttggtgagtggcccgttgaagctgtgcgggtcatgtcgagggttattgaaaaaacagaggaaaaggcaatttcacaaatagtcggttttggtacaactccaaaaacacagggtggtgccctcgcctgggccgcagcaaaggttgctgagtttatcgatgcgcgttatctgtgtgtctttagtgaaagtggagattcaataagacgggtgtcgcgactgcgtcatgatatacccattattggatttagtccggttgggtccgttgtccgacaggtctctctctcttggggtgttcgatgttttttgatagagaggctccatcagactgatcagatgatgcgtaaggctgaacatgttctcctcacaaacaatttggccgagattggagagaagattgtgattatttcaggatcaccagttggggtgccggggagtacaaaccatatgagaatccacgagcttggaagcacgtcctag

SEQ ID NO: 15681 - protein, 473 aa, Tropheryma whipplei str. Twist
MFMRRAKIVVTLGPAVSDLDSVRDLISAGADVFRMNLSHGSLDFHREVFLNVRTAAAELDRHIAIFADLQGPKIRLGRFASGPYTLQEGDIFTITTEQVLGTKELSSTTLPTLPDNVSEGDLLLIDDGKVALRAIGNDGVRITTRVEVPGKVSNNKGINLPGVGVKVPALSEKDIDSLRWALSLPVDMIALSFVRCASDVDAVHKVMDEEGIRLPVIAKIEKPQAVSAIEEIALRFDAIMVARGDLGVELPLEDVPVAQKEIVKVARRFARPVIIATQMLESMISSSRPTRAEASDVANAVLDGADALMLSGETSVGEWPVEAVRVMSRVIEKTEEKAISQIVGFGTTPKTQGGALAWAAAKVAEFIDARYLCVFSESGDSIRRVSRLRHDIPIIGFSPVGSVVRQVSLSWGVRCFLIERLHQTDQMMRKAEHVLLTNNLAEIGEKIVIISGSPVGVPGSTNHMRIHELGSTS

SEQ ID NO: 15682 - DNA, 1413 bp, Vibrio parahaemolyticus RIMD 2210633
  CDS (1)..(1413): transl_table=11
atgaaaaagaccaaaatcgtttgtacgattggccctaaaactgaatctgtagagaagctaactgaactagtaaacgcaggcatgaacgtaatgcgtcttaacttctctcacggtgactacgaagaacacggcactcgtatcgcgaacttccgcaaagtaatggaagctactggcaaacaactagcaatccttctagatactaaaggtccagaaatccgcactatcaaactagaaggcggtaacgacgttgatctagtagctggtcaagaattcactttcacaactgacacttcagttgtaggtaacaaagacaaagttgcagtaacttacgctggcttcgcagctgacctaaacgttggtaacactatcctagtagacgacggtctaatcgagatggaagttatcgcaacaactgacactgaagttaaatgtaaagttcttaacaacggtgctctaggcgaaaacaaaggtgttaaccttcctggcgtttctgtaaacctacctgctctatctgaaaaagataagaacgaccttaaattcggttgtgagcaaggcgttgatttcgtagctgcatctttcatccgtaaagcttctgacgttcaagaaatccgtgaagttctagctgcaaacggcggcgagaacatccacatcatctctaagatcgaaaaccaagaaggtgttgataacttcgatgagatcctagaactttctgacggcatcatggttgctcgtggcgacctaggtgttgaaatcccagctgaagaagtaatcttcgctcagaaaatgatgatcgagaagtgtaaccgtgcacgtaagatggttatcactgcaactcaaatgcttgattctatgatcaacaacccacgtcctactcgtgcggaagcaggcgacgttgcaaacgcagtaatggacggcacagacgcagtaatgctttctggcgaaacagcaaaaggtaaataccctgttgaagcggtaactatcatggctcaaatcgctaagcgtactgactctgtacttaaagctgaactaggttctcgtctagacagcccacgtctacgcatcactgaagcagtatgtaaaggcgcagtagacacagctgaaaaactggctgctccactgatcgttgttgcaactgaaggcggtaagtctgcacgttcagtacgtaagtacttcccaactgcaaacatcctagcgctaacaactaacaagaaaactgcagcacaactagttctaactaagggtgttactccagttgttgttgacgctatcgaaagcactgacgcattctacgtagcaggtaaagaacttgctctagaatctggtctaggtaacaaaggcgatatcgtagtaatggtttctggtgctctagtcgcttcaggtactacgaacacagcttctgtacacgtactataa

SEQ ID NO: 15683 - protein, 470 aa, Vibrio parahaemolyticus RIMD 2210633
MKKTKIVCTIGPKTESVEKLTELVNAGMNVMRLNFSHGDYEEHGTRIANFRKVMEATGKQLAILLDTKGPEIRTIKLEGGNDVDLVAGQEFTFTTDTSVVGNKDKVAVTYAGFAADLNVGNTILVDDGLIEMEVIATTDTEVKCKVLNNGALGENKGVNLPGVSVNLPALSEKDKNDLKFGCEQGVDFVAASFIRKASDVQEIREVLAANGGENIHIISKIENQEGVDNFDEILELSDGIMVARGDLGVEIPAEEVIFAQKMMIEKCNRARKMVITATQMLDSMINNPRPTRAEAGDVANAVMDGTDAVMLSGETAKGKYPVEAVTIMAQIAKRTDSVLKAELGSRLDSPRLRITEAVCKGAVDTAEKLAAPLIVVATEGGKSARSVRKYFPTANILALTTNKKTAAQLVLTKGVTPVVVDAIESTDAFYVAGKELALESGLGNKGDIVVMVSGALVASGTTNTASVHVL

SEQ ID NO: 15684 - DNA, 1758 bp, Enterococcus faecalis V583; identical to SEQ ID NO: 8473
  CDS (1)..(1758): transl_table=11

SEQ ID NO: 15685 - protein, 585 aa, Enterococcus faecalis V583; identical to SEQ ID NO: 8474

SEQ ID NO: 15686 - DNA, 1434 bp, Coxiella burnetii RSA 493; identical to SEQ ID NO: 8475
  CDS (1)..(1434): transl_table=11

SEQ ID NO: 15687 - protein, 477 aa, Coxiella burnetii RSA 493; identical to SEQ ID NO: 8476

SEQ ID NO: 15688 - DNA, 1446 bp, Chlamydophila caviae GPIC
  CDS (1)..(1446): transl_table=11
atgatcgcaagaacgaaaatcatttgtactataggtccagcaacaaacactccagaaatgcttgagaagcttttagatgcgggtatgaatgttgctaggttgaattttagtcatggtactcatgaaagtcatggtgagacaattcgtcttcttaaggaattgcgagaaaagaaaggggctcctttagcgattatgttggataccaagggtccagaaattcgtttagggaatattcccacaccaattcaggtatctcgaggtcagaaaattaccttagtaggaaaagaggtagagggatctgccgaaggtggcgttaccttacatcctcaatgtgttttcccttatgtgcgtgagggtgttgatgtcttgatagacgatggttatattcaagctgttgtgacctctgttggtgaggatcatctagaattagagtttattaactctggagaattaaagtcgcacaagtctttaagcataagagaaattgatttagctcttccttttatgacggataaggatatcaatgatcttcagtttggcgttgcgcagggcgttgatgttattgctgcttcttttgtccgttatgctgaggatatcgaaagtatgcgcaagtgcttagcagatgctggccgtccggatatgcccattattgctaagatagaaaatcgtttgggagtagagaatttttctcagattgctaaagcttccgatgggattatgattgcccgtggagatttagggattgagctttctgttgttgaggtccctaatttacagaagtttatggcaaagatgtctcgtgaaatgggacgtttttgcattaccgctacgcaaatgttagaatctatgattcgcaatgttttaccgacacgagcagaagtttctgatgttgctaatgctatttatgatggtacctcagcagtaatgttatctggggaaacggcctcgggaagttatcctgtcgcggctgtgaaaattatgcgttctgtgattcaagagacagaaaaaaatcttaattataagtctttcttagaacttagcgatagtgaatgtgctgttaaggtatccccttatcttaagtctataggtttatcaggaattcaaattgctgagaaagctgatgctaaagccattatcgtttacacggaatccggaggatcacccattttcctttctaaataccgtccgcgttttccaattattgctgttacaccaaatctatctgtgtattacaggcttgctttagagtggggagtctatcctatgcttacgcaagagtcagaccgtgcagtatggagacatcaagcttgtatttatggaatcgaaagaggaattttatcaaattatgataagattttagttttgagtcgtggcgctcaaatgaaagatactaataatcttaccttaacaacggtaaatgatatcatcacagcatcagctaaataa

SEQ ID NO: 15689 - protein, 481 aa, Chlamydophila caviae GPIC
MIARTKIICTIGPATNTPEMLEKLLDAGMNVARLNFSHGTHESHGETIRLLKELREKKGAPLAIMLDTKGPEIRLGNIPTPIQVSRGQKITLVGKEVEGSAEGGVTLHPQCVFPYVREGVDVLIDDGYIQAVVTSVGEDHLELEFINSGELKSHKSLSIREIDLALPFMTDKDINDLQFGVAQGVDVIAASFVRYAEDIESMRKCLADAGRPDMPIIAKIENRLGVENFSQIAKASDGIMIARGDLGIELSVVEVPNLQKFMAKMSREMGRFCITATQMLESMIRNVLPTRAEVSDVANAIYDGTSAVMLSGETASGSYPVAAVKIMRSVIQETEKNLNYKSFLELSDSECAVKVSPYLKSIGLSGIQIAEKADAKAIIVYTESGGSPIFLSKYRPRFPIIAVTPNLSVYYRLALEWGVYPMLTQESDRAVWRHQACIYGIERGILSNYDKILVLSRGAQMKDTNNLTLTTVNDIITASAK

SEQ ID NO: 15690 - DNA, 1758 bp, Bacillus cereus ATCC 14579
  CDS (1)..(1758): transl_table=11
atgcgtaaaactaaaattgtatgtactataggtcctgctagtgaaagtattgaaaaattagagcaattaatcgaagcaggtatgaacgttgctcgtttaaacttctctcatggtagccatgaagagcacggagctcgtattaaaaacattcgtgaagcttcaaagaaaactggtaaaacagttggtatcttacttgatacaaaaggtccagaaatccgtactcacgacttcgtagacggacaagctgagcttgtaacaggtgcagaagtagttctttctactgagcaagtattaggtactgcagagaagttctctgtatcttatgctggtctttatgacgatgtagacccaggttctcgtattctaatcgatgacggtcttatcgaactagaagtaatcgaaaaagctgatggaaacatccgtacaaaagttcttaacagcggaactgtaaaaaataaaaaaggtgttaacgtaccaaacgtaagcattaagcttcctggtatcactgaaaaagacgtaaaagatatcatcttcggtatcgagcaaaaagttgatttcattgcagcttcattcgtacgtaaagcgtctgacgtattagaaatccgtgaattattagaagagcataacgctcaatacatccaaatcgtaccaaaaatcgagaaccaagaaggtatcgacaacatcgattcaatcttagaagtttctgacggtttaatggtagctcgtggtgacatgggtgtagaaattccaccagaagaagtaccgttagtacaaaaacgtctaattaaaaaatgtaacgtgttaggtaaaccagttattactgcaacacaaatgttagattctatgcaacgtaacccacgtccaactcgtgcggaagcaagtgacgtagctaacgcaatcttcgatggtacagatgcaatcatgctttcaggtgaaacagctgctggacaatacccagtagaagcagtaacaatgatggctaacattgcggtacgtgttgaaaaatcattacaatatgaagatatgttcaaaaaacgtattaaagagttcactccaacaattacagatgcaattagccaatctgttgcacatacagcacttgctcttgatgtagctgcaatcgtagctccaacagaaagtggatatactgcgaaaatgatctctaaataccgtccaaaatctccaatcgtagctgtaacatctgacgagcaagtaggacgtcgtcttgcacttgtttggggtgtacaagcatttatggctgagaagcgcgcagcttcaactgacgaaatgttagatacagcaattcaaacaggtatggatgcaggtctaatcggacttggagatactgtagtgattactgctggtgttccagttgctgaaactggtacaacaaacttaatgaaaatccacgttgttggtgaagaaattgctaaaggacaaggaatcggtcgtaaagctgcaaaaggtaaagtagttgtagcaaaaacagctgctgaagctgtagcgaacgtaaacgaaggtgatatccttgttacaacaagcactgataaagatatgattcctgcaatcgaaaaagctgcagctttagttgtagaagaaggtggcttaacaagccatgcagctgttgtaggtgtatcaatcggtattcctgttatcgttggtgtaaacggcgtaacagcaactttaaaaaatggccaagaagtaacagttgatgcagcacgcggaattgtttataatggacatgcggaagtgctataa

SEQ ID NO: 15691 - protein, 585 aa, Bacillus cereus ATCC 14579
MRKTKIVCTIGPASESIEKLEQLIEAGMNVARLNFSHGSHEEHGARIKNIREASKKTGKTVGILLDTKGPEIRTHDFVDGQAELVTGAEVVLSTEQVLGTAEKFSVSYAGLYDDVDPGSRILIDDGLIELEVIEKADGNIRTKVLNSGTVKNKKGVNVPNVSIKLPGITEKDVKDIIFGIEQKVDFIAASFVRKASDVLEIRELLEEHNAQYIQIVPKIENQEGIDNIDSILEVSDGLMVARGDMGVEIPPEEVPLVQKRLIKKCNVLGKPVITATQMLDSMQRNPRPTRAEASDVANAIFDGTDAIMLSGETAAGQYPVEAVTMMANIAVRVEKSLQYEDMFKKRIKEFTPTITDAISQSVAHTALALDVAAIVAPTESGYTAKMISKYRPKSPIVAVTSDEQVGRRLALVWGVQAFMAEKRAASTDEMLDTAIQTGMDAGLIGLGDTVVITAGVPVAETGTTNLMKIHVVGEEIAKGQGIGRKAAKGKVVVAKTAAEAVANVNEGDILVTTSTDKDMIPAIEKAAALVVEEGGLTSHAAVVGVSIGIPVIVGVNGVTATLKNGQEVTVDAARGIVYNGHAEVL

SEQ ID NO: 15692 - DNA, 1431 bp, Rhodopirellula baltica SH 1
  CDS (1)..(1431): transl_table=11
gtgcaggactaccgtcacacaaaaatcattgccacgatcggcccggcaaccgagtcccccgaaaaactagcggcgttgatcgaagcgggcgtcgatgtcatgcgactcaatatggcacacggaacgcctgaatgggtcggcgaaatcgtcgcacggatccgaaaggtttccaaggatattagtcgtcacgttgcggtgatgatggacgtcaaaggcccagagattcgaaccggtgcggtggaggatgcgatcgaattgaaagccggcgacgagctggtcctgttcaccgaagactgcgcggatcaatcggcggtcgaatccgacggaactccgcgggtcagtgtgaactatctgggcctgcccggtgcgatcgacttggacagcacgattttggtcgacagcggtttgttgcattggcatgtactgaagaaagacgccaccaccgttcgctgccgcgtgatcacgcccggcgttctggaatctcgacgtcacatcaacttgcctggcgtccaagtcaacttgcccgcgatcacggacaaagaccgcaccgatttggcggcgggcgtcaaagcgggcatcgacttcgttgcgctttcgtttgttcgccaagcggaagacgtccgcacgctgcgtgcattcttagacgaacacggctcacccgcacgaatcatttcaaagatcgaagaccaagccggtgttcgcaacatgaaggcgatcatccggcaatccgatgcgatcatggtcgctcgtggtgacctcggcgttgaaattgattaccaccgattgccgcttgttcaaaccgatttgattcgtgcctgccaagaagatggcaagcccgtcatcatcgccacgcacctgctcgagtcgatgattcaatcgccggttccaactcgtgcggaagtgtcggacgtctccaacgcaattcgcgaacaagccgatgcggtgatgctgtctggtgaaacgaccacgggtaaatacccgctggagtccgttggtgtgctgcaaaacattgtcgccagcatcgagccaacggtcagccgccaactgaactcaaagatcgtgcttcgagagcccaaatcgatgatgctgcgatcggcgtgcaccttggcacaggagatgggtgattcaggaatcgttgtcttcacccgcagcggttttctcgcttacgtcctgggggccctgaggcctcggggtgtgccaattttcgccttcaccgatgtcgagcatacgttccgtcacttaatgttgccgtggggtgtggagccgttcttcatggagttctccgaagatcacgatcaaaccatcaccaacgcattggaagttctgaaggagagcggttggtgcaaaccgggcgtttggttgggggtcatcaccaacgctttggccgacgaaaaaatcatcgacacgcttcagttgcgtcaggtccagtaa

SEQ ID NO: 15693 - protein, 476 aa, Rhodopirellula baltica SH 1
MQDYRHTKIIATIGPATESPEKLAALIEAGVDVMRLNMAHGTPEWVGEIVARIRKVSKDISRHVAVMMDVKGPEIRTGAVEDAIELKAGDELVLFTEDCADQSAVESDGTPRVSVNYLGLPGAIDLDSTILVDSGLLHWHVLKKDATTVRCRVITPGVLESRRHINLPGVQVNLPAITDKDRTDLAAGVKAGIDFVALSFVRQAEDVRTLRAFLDEHGSPARIISKIEDQAGVRNMKAIIRQSDAIMVARGDLGVEIDYHRLPLVQTDLIRACQEDGKPVIIATHLLESMIQSPVPTRAEVSDVSNAIREQADAVMLSGETTTGKYPLESVGVLQNIVASIEPTVSRQLNSKIVLREPKSMMLRSACTLAQEMGDSGIVVFTRSGFLAYVLGALRPRGVPIFAFTDVEHTFRHLMLPWGVEPFFMEFSEDHDQTITNALEVLKESGWCKPGVWLGVITNALADEKIIDTLQLRQVQ

SEQ ID NO: 15694 - DNA, 1440 bp, Wigglesworthia glossinidia endosymbiont of Glossina brevipalpis; identical to SEQ ID NO: 8481
  CDS (1)..(1440): transl_table=11

SEQ ID NO: 15695 - protein, 479 aa, Wigglesworthia glossinidia endosymbiont of Glossina brevipalpis; identical to SEQ ID NO: 8482

SEQ ID NO: 15696 - DNA, 1440 bp, Haemophilus ducreyi 35000HP; identical to SEQ ID NO: 8369
  CDS (1)..(1440): transl_table=11

SEQ ID NO: 15697 - protein, 479 aa, Haemophilus ducreyi 35000HP; identical to SEQ ID NO: 8370

SEQ ID NO: 15698 - DNA, 1422 bp, Gloeobacter violaceus PCC 7421
  CDS (1)..(1422): transl_table=11
atgcagcctttagaccgtcgaacgaaagtcgtcgcgacgatcggtcctgcgagcagttcgccggaagtgcttcggcagctggtgaaggcaggaatcaacgtcgcgcgcttgaatttttcccacggcagctacgaagaccacgcgcgcatggtcaagctgctgcgggaggtctccgaggaactcgacaccccgattacgctattgcaggatttgcaggggccgaagatccgcgtgggccagatgcccgagggcgggctggctttaggggagggcgacgagctgacgctgttgccggtggcggaatttgcgggcgaacccggcacggtatccatcgactacccgtatcttgtggaggaggcgacgccgggtacccaggtgctcctggacgacggcttgctcgaatttgccgtggttgaggtgaagggcaacgccgtgcgctgccgggtggtgcgcgggggggtgctcaaaagccgcaagggggtcaacctgcccagtctggatttgcgcctgccctcgatgaccgaaaaggacaagcaagatctcgaatttggactggagcagggggtcgattgggtgtctttgagcttcgtgcgccggggcgaggacattcgcgtgctcaaaggactgctcgctgaacacggggccgccgatgtgccggtgatcgccaagattgagaaaccccaggcgatcgccaatctggaggagattctcgatgaagtgcagggaatcatggtggccaggggcgatctgggcgttgagatgagcccggagaaggtgccgctgctgcaaaagcggatcattcggctttgtaaccggcggggcattccggtgatcaccgccacccagatgctcgacagcatgatccgcaatccccggccgacccgcgctgaggcgagtgatgtcgccaacgccatcctggacggcagcgacgcggtgatgctctcgggcgaatcggcggtgggcgattttccggtgcagtcggtggagatgctcgtgcgcatcgccaaagaagtcgagcgggagtttaccttcgacaacaatccgcccgccaaatccgatgaaatccacgccctgtgcgaatcgctgggcaccatcgacaagatcttggccctgcactgtattgccacttttactaccaccggcttcagcgcttcgatcgcggccgcggagcggccgaaggcgccggtggtcgccttcacccccgacttgaaggtgtatcaccggttgaatctggtctggggcgtgaagcccttgctgttggagcacccggcggcggaactcgaaaaactgatcgagcagatggaaagctgccttgtcgaacgcaacctcgccgcccccggcgaccggatgctggtgctgggaggtagccccgtccagagggcgggcggcacgaattttctgaagatccatacgctgcactaa

SEQ ID NO: 15699 - protein, 473 aa, Gloeobacter violaceus PCC 7421
MQPLDRRTKVVATIGPASSSPEVLRQLVKAGINVARLNFSHGSYEDHARMVKLLREVSEELDTPITLLQDLQGPKIRVGQMPEGGLALGEGDELTLLPVAEFAGEPGTVSIDYPYLVEEATPGTQVLLDDGLLEFAVVEVKGNAVRCRVVRGGVLKSRKGVNLPSLDLRLPSMTEKDKQDLEFGLEQGVDWVSLSFVRRGEDIRVLKGLLAEHGAADVPVIAKIEKPQAIANLEEILDEVQGIMVARGDLGVEMSPEKVPLLQKRIIRLCNRRGIPVITATQMLDSMIRNPRPTRAEASDVANAILDGSDAVMLSGESAVGDFPVQSVEMLVRIAKEVEREFTFDNNPPAKSDEIHALCESLGTIDKILALHCIATFTTTGFSASIAAAERPKAPVVAFTPDLKVYHRLNLVWGVKPLLLEHPAAELEKLIEQMESCLVERNLAAPGDRMLVLGGSPVQRAGGTNFLKIHTLH

SEQ ID NO: 15700 - DNA, 1818 bp, Gloeobacter violaceus PCC 7421; identical to SEQ ID NO: 8487
  CDS (1)..(1818): transl_table=11

SEQ ID NO: 15701 - protein, 605 aa, Gloeobacter violaceus PCC 7421; identical to SEQ ID NO: 8488

SEQ ID NO: 15702 - DNA, 1410 bp, Photorhabdus luminescens subsp. laumondii TTO1
  CDS (1)..(1410): transl_table=11
atgaaaaaaaccaaaattgtttgtactatcggaccaaaaacagaatccgaagaaaaactggccgaactgttgaatgccggcatgaatgttatgcgcctcaacttttcacacggagactatgaagagcacggccagcgtattcaaaatatccattcagttatgactaagacaggtaaacaagccgctattttgctggatactaaaggccctgaaattcgaactatgaagctggaaggcggtaacgatgtctctctaaccgcaggtcagaccttcacttttaccactgacacttccgttatcggtaataaagaccgtgttgctgtcacttaccgcggtttccccgcggatctggctcccggtaataccgtgctagttgatgacggcttgatcggcatgacagttaaagaagtcactaagtcagaggttatttgccaagttttgaataacggtgatttgggggaaaataaaggtgttaatctgccgggtatttccatcagcctgcctgccctggctgaaaaagataagcaagatttgatctttggttgccaacaaggtgttgatttcgtcgccgcttcttttatccgcaagcgctccgatgttctggaaatccgtgaacatctgaaagcgcacggcggtgaaaacattcaaatcatctctaagattgaaaatcaggaaggtctgaacaattttgatgaaattctggaagcttctgacgggatcatggttgctcgtggtgatcttggcgttgaaattccggttgaagaagtgatcttcgcccagaagatgatgattcaaaaatgtaatatcgctcgcaaagttgttatcactgcaactcaaatgctcgattctatgattaaaaacccgcgccctacccgtgcggaagccggtgacgtcgctaacgctattttggatggtactgatgcagttatgctttctggcgaaagtgcaaaaggcaaatatccaatagaagcagtgactatcatggcaacgatttgtgaacgtacagaccgcgttatgccaagccgtatcgaagccgtccattgccgtaacctgcgcgtgaccgaagcggtgtgtcgtggtgccgttgaaacagcagaaaaactggaagcccctctgattgtggtcgcaacctatggcggtaaatctgccaaatccattcgtaagtatttccctgacgcgcccattctggcattaacgactaatgaagtgactgcccgccaattactgcttgttaagggtgtttttacccaaattgttaaagaaatcgcctctaccgacgatttctaccgcattggtaaagaagcggcgctagcaagtggcctagcgaagaaaggtgaaatcgtggttatggtatctggtgccctggttccaagcggcacaaccaacacgtcgtctgttcacgtcctttaa

SEQ ID NO: 15703 - protein, 469 aa, Photorhabdus luminescens subsp. laumondii TTO1
MKKTKIVCTIGPKTESEEKLAELLNAGMNVMRLNFSHGDYEEHGQRIQNIHSVMTKTGKQAAILLDTKGPEIRTMKLEGGNDVSLTAGQTFTFTTDTSVIGNKDRVAVTYRGFPADLAPGNTVLVDDGLIGMTVKEVTKSEVICQVLNNGDLGENKGVNLPGISISLPALAEKDKQDLIFGCQQGVDFVAASFIRKRSDVLEIREHLKAHGGENIQIISKIENQEGLNNFDEILEASDGIMVARGDLGVEIPVEEVIFAQKMMIQKCNIARKVVITATQMLDSMIKNPRPTRAEAGDVANAILDGTDAVMLSGESAKGKYPIEAVTIMATICERTDRVMPSRIEAVHCRNLRVTEAVCRGAVETAEKLEAPLIVVATYGGKSAKSIRKYFPDAPILALTTNEVTARQLLLVKGVFTQIVKEIASTDDFYRIGKEAALASGLAKKGEIVVMVSGALVPSGTTNTSSVHVL

SEQ ID NO: 15704 - DNA, 1488 bp, Vibrio vulnificus YJ016
  CDS (1)..(1488): transl_table=11
gtgggacatgtaaaggcattaggctacaaacaccgactttcaaattgtaactatattgaccggagagtatcttccatgaaaaagaccaaaatcgtatgtacgattggcccaaaaactgagtctgtagagaaactgactgaactagtcaactcaggtatgaacgtaatgcgcctgaacttttctcacggtgactacgtagagcacggcactcgtatcgcgaacttccgccaagtaatggaaaacacaggtaagcaacttgctatcctactagacactaaaggtcctgaaatccgcactatcaaactagaaaacggcgacgacgttgatctagtagctggtcaagagttcactttcacgactgatacttctgttgttggtaacaaagacatcgtagcagtaacttacccaggttttgctgcggatctatctgctggtaacactatcctagttgacgatggtctaatcgagatggaagttatcgcaacgactgcgactgaagttaagtgtaaagtactgaacaacggtgctctaggcgaaaacaaaggtgttaacctaccaggcgtttctgtaaacctacctgcactatctgaaaaagacaaaaacgaccttaaatttggttgtgagcaaggcgttgacttcgttgcagcatctttcatccgtaaagcatctgacgtgaaagaaatccgtgaagttctagcagcaaacggcggcgcgaacattcagatcatttctaagattgaaaaccaagaaggtgttgataacttcgacgaaatcctagagctttctgacggtatcatggttgctcgtggtgacctaggtgtagaaatccctgcagaagaagttatcttcgcacagaagatgatgatcgaaaaatgtaaccgcgcacgtaaagtggttatcactgcaactcaaatgctagattctatgatcaagaacccacgtccaactcgtgctgaagcgggtgacgttgcgaacgcaatcatggatggtactgatgcagtcatgctttctggcgaaacagcgaaaggtaaataccctgttgaagcggtaactatcatggcgcaaatcgctaaccgtactgattctgtactaaaagcagagctaggctctcgtctagacagcccacgcctacgtatcactgaagcggtatgtaaaggtgcagtagacacagctgagaaactagcagcaccactgatcatcgttgccactgaaggtggtaagtctgcacgttctgtacgtaagtacttcccaactgcaaacattcttgcgctaacgaccaacaagaagacagctgctcaacttgtactgactaaaggtgttacacctgttgttgttgattcaatcgataacacggatgcgttctacgtagccggtaaagagcttgctcttgaatctggcctaggtagcaaaggcgacatcgttgtgatggtatctggtgctcttgttgcatctggtacaacgaatactgcgtcagtacacgtactataa

SEQ ID NO: 15705 - protein, 495 aa, Vibrio vulnificus YJ016
MGHVKALGYKHRLSNCNYIDRRVSSMKKTKIVCTIGPKTESVEKLTELVNSGMNVMRLNFSHGDYVEHGTRIANFRQVMENTGKQLAILLDTKGPEIRTIKLENGDDVDLVAGQEFTFTTDTSVVGNKDIVAVTYPGFAADLSAGNTILVDDGLIEMEVIATTATEVKCKVLNNGALGENKGVNLPGVSVNLPALSEKDKNDLKFGCEQGVDFVAASFIRKASDVKEIREVLAANGGANIQIISKIENQEGVDNFDEILELSDGIMVARGDLGVEIPAEEVIFAQKMMIEKCNRARKVVITATQMLDSMIKNPRPTRAEAGDVANAIMDGTDAVMLSGETAKGKYPVEAVTIMAQIANRTDSVLKAELGSRLDSPRLRITEAVCKGAVDTAEKLAAPLIIVATEGGKSARSVRKYFPTANILALTTNKKTAAQLVLTKGVTPVVVDSIDNTDAFYVAGKELALESGLGSKGDIVVMVSGALVASGTTNTASVHVL

SEQ ID NO: 15706 - DNA, 1341 bp, Onion yellows phytoplasma OY-M
  CDS (1)..(1341): transl_table=11
atgaacaaaactaaaataatttgtaccttaggacctgcttcttatgataaaaacattttacaagccttaattcaaacaggtttgaatgtagcaagatttaatttttctcacgctcaatacgaacaaactaaacttttaatgaaaaccattaaaactattagcgataaattagacaaaaacacaggacttatgttagatactaaaggacctgaaattagaactcacgaatttgatggtgtagtaacaattcaaaaagattctgaagtaaaaatatctatgacagaagttttaggtaatgctaaacttttttcagttagttattctaatttatacaatgaattaaaagttggcgatatggttaatattgatgatggatacttatctttggaagttgtaggcaaagacgaagccaaacaacaattagttactaaagccaaaaatactcactccatcaaatctcgtagaggtgtaaatgttcctaaagttaatttagaaatggattttatttctcctaaagattatcaagatattgtttttgctgcccaacaagattttgattatattgctgcttcatttgttagaagagctcaagatgtcaaagatattagaaaaattttacaagaacaaggaaattccaacatccaaattatttctaaaatagaaaatcaagaaggtgttgataatttagaagaaatcattcaagaatcagacggtattatggttgcaagaggtgatttaggaatagaagttgatggtgaattagtaccactttaccaaacgcgtatgattactaaatgtttagaatacggcaaaccagttgtagtagctactcaaatgttagaatctatgcaaagaaatccgcgcccaaccaaagctgaaacttctgatgtctttaatgcagttagagaaggcaccacctttactatgctatcgggcgaaagtgcttcaggtgaatatcctgtagaagctgtaacttatatgaaaaaaattaattatcaagctgaaaaagtagttaattatcaagctttatcacaagtataccaacctaaaaactccaaagaaaaccttttattaagtgctgtggaattggctttacgcaccgatgttaaagcaattgttgtctatgacttaaaagatgcttataatgtttctaaatttcatccatccgttcctgttttggctttagttaaaactgaacaagaagctcgtcgtttagtactaaattttggggtttgtccttttgtttctgaaaccaaattacaaactaaattggaagaacttacccaaaatcaaagtagtaattgtcttgttgttaaagatgggatgctttattttaaataa

SEQ ID NO: 15707 - protein, 446 aa, Onion yellows phytoplasma OY-M
MNKTKIICTLGPASYDKNILQALIQTGLNVARFNFSHAQYEQTKLLMKTIKTISDKLDKNTGLMLDTKGPEIRTHEFDGVVTIQKDSEVKISMTEVLGNAKLFSVSYSNLYNELKVGDMVNIDDGYLSLEVVGKDEAKQQLVTKAKNTHSIKSRRGVNVPKVNLEMDFISPKDYQDIVFAAQQDFDYIAASFVRRAQDVKDIRKILQEQGNSNIQIISKIENQEGVDNLEEIIQESDGIMVARGDLGIEVDGELVPLYQTRMITKCLEYGKPVVVATQMLESMQRNPRPTKAETSDVFNAVREGTTFTMLSGESASGEYPVEAVTYMKKINYQAEKVVNYQALSQVYQPKNSKENLLLSAVELALRTDVKAIVVYDLKDAYNVSKFHPSVPVLALVKTEQEARRLVLNFGVCPFVSETKLQTKLEELTQNQSSNCLVVKDGMLYFK

SEQ ID NO: 15708 - DNA, 1770 bp, Lactobacillus johnsonii NCC 533
  CDS (1)..(1770): transl_table=11
atgaagaaaactaaaattgttagtactttagggccagcctcaaacgatgttgagactattactaaattagctgaagcaggtgcaaacgtattccgtttcaacttctcacacggtgaccacgaagaacaccgtgcacgtatgaacatggttcgtgaggttgaaaagaagactggtaaacttcttggcattgctcttgatactaagggtgccgaaattagaactactgaacaagaaggcggcaagttcactattaacactggtgacactatccgtatttctatggacgacactaagaagggtaacaaggacatgatccacgttacctacgatggtctttacgacgatactcacgttggtggtcacgtattaatcgatgatggtttagttgaccttttgattaaggacaaagatgacgctaagagagaattagtttgtgaagctcaaaacactggtgtaatcggttctaagaagggtgttaacgctcctggcgttgaaatccgcctcccaggtattactgaaaaagatactaacgatattaagttcggtttgaaggaaggtatcaacttcatctttgcttcattcgttcgtaaagcacaagatgttcttgacattcgtcaattgcttgaagaagcacattgtgaatacgtaaagatcttccctaagattgaatcacaagaaggtattgacaacatcgacgaaatcttaaaggtttctgatggtttaatggttgctcgtggtgacatgggtgttgaaattccatttatcaatgttccatttgtacaaaaagaattgatcaagagatgtaacgctttaggtaagccagttattactgctactcaaatgcttgactcaatgcaagaaaacccacgtcctactcgtgccgaagttactgacgttgccaacgctgttcttgatggtactgacgcaactatgctttcaggtgaatctgcaaacggtctttacccagttaaagctgttaaggctatggctgaaatcgacatgcgtactgaaaagcaacttgctaagcgtaacaagttagctcttcaaagattcgaagaatacaagggttcaaacgttactgaagctatcggtgaatcagttgttagaactgctgaagaattgggcgttaagactattattgctgcaactgaatctggttacactgcacgtatgatttctaagtaccgtccaaacgcagacattattgctatgactttcaacgacaagattcaacactcattaggtgttgtttggggtgtaaagccaatgttgactgaaaagcctaagtctactgaagaaatgtttgaaaaggcagctgaacttgctaaagaaactggtcttgcaaaagacggtgacttagtaattatcgttgctggtgttcctttgggcgaaactggtactactaacttgatgaagttacaattaatcggtacccaacttgttaaaggtttaggtgttggtgaacaatcagttattggtaaagctgtagttgcaacttctgctgaagaagctaacagcaaagttcaagatggtgacatcttagttgctaagactactgataaggattacttaccagcaatcaagaaggcttcaggtatggtagttgaagcttctggtttaactagccatgcagctgttgttggtctttcacttggtatcccagttatcgttggtgctactgatgcagtagaaaagatcaaggatggttctaagattactgttgatgctcgtcgcggtgctgtttaccaaggcgaagcaactaacctttaa

SEQ ID NO: 15709 - protein, 589 aa, Lactobacillus johnsonii NCC 533
MKKTKIVSTLGPASNDVETITKLAEAGANVFRFNFSHGDHEEHRARMNMVREVEKKTGKLLGIALDTKGAEIRTTEQEGGKFTINTGDTIRISMDDTKKGNKDMIHVTYDGLYDDTHVGGHVLIDDGLVDLLIKDKDDAKRELVCEAQNTGVIGSKKGVNAPGVEIRLPGITEKDTNDIKFGLKEGINFIFASFVRKAQDVLDIRQLLEEAHCEYVKIFPKIESQEGIDNIDEILKVSDGLMVARGDMGVEIPFINVPFVQKELIKRCNALGKPVITATQMLDSMQENPRPTRAEVTDVANAVLDGTDATMLSGESANGLYPVKAVKAMAEIDMRTEKQLAKRNKLALQRFEEYKGSNVTEAIGESVVRTAEELGVKTIIAATESGYTARMISKYRPNADIIAMTFNDKIQHSLGVVWGVKPMLTEKPKSTEEMFEKAAELAKETGLAKDGDLVIIVAGVPLGETGTTNLMKLQLIGTQLVKGLGVGEQSVIGKAVVATSAEEANSKVQDGDILVAKTTDKDYLPAIKKASGMVVEASGLTSHAAVVGLSLGIPVIVGATDAVEKIKDGSKITVDARRGAVYQGEATNL

SEQ ID NO: 15710 - DNA, 1416 bp, Treponema denticola ATCC 35405; identical to SEQ ID NO: 8495
  CDS (1)..(1416): transl_table=11

SEQ ID NO: 15711 - protein, 471 aa, Treponema denticola ATCC 35405; identical to SEQ ID NO: 8496

SEQ ID NO: 15712 - DNA, 1437 bp, Mycoplasma mycoides subsp. mycoides SC str. PG1
  CDS (1)..(1437): transl_table=4
atgactaaagaaaaattacaaaagagaatgaagcgaaccaaagtaattacaacaattggtccttcaactcactctgcagaagctattaaagaattatttaacaatggaatgacaactattcgtttaaatttttcacatggtagttatgaagaacacggttatagaattaaagctgcaaaaaaaatctctaaagctttaaataagccaatctcaataatgttagacactaaaggtcctgaaataagattaggaaaatttaaagataataaacaagaagtagtaaaaggtcaagcaattactatttatacagataattattcttatttaaacaaagaatgtgttcaaggtgaaatgactgttgcttatgatatgtcagttgatttaaaacctgaagatatgattttaattgatgatggtaaattagaattaacagttgattcagttgaacctcaaattattaaagcaactgcatttaatcatcacattgtaaaaactaataaacgtgttaacttacctggaattgatttttcattaccatttttatctgaaaaagatgaaaaagatattttatttggatgtgaacaagatgttgattatatagctgcatcatttgtaaatacagctgaaaatgtaagacaaattaaagaaatcttaactaaagctaatgcaaatcatattcaaattatttcaaaaatagaatcacaagttggattagataatattgatgaaattattgaagaatctgatggaattatgattgcgcgtggtgatttaggattagaaattccatattatgatgtaccttattgagaaaaaattatcatcagaaaatgtagagaaaaaggaaaaatcgttattgttgctactcaaatgttagaaacaatgacagaaaatccatcaccaactagagctgaagtaactgatgtttattatgcaactgaacttggtgctgatgctacaatgttatctggtgaatcagctgctggagattatccatttttaacagttcatacaatgtcaacaattaataaaagagcagaagttgaattctacaacaaaatttactaccaagtacaattagataatgcaagaaactcaacatcaggacctagagctgaaatcgcagacttattagctacaaaaacaaaagatggtgaatataagtatgcaattgttttatcaaaaacaggtgaattattaaaaaccatttctaaatttagaccaaatgtaacaattttaggagttagtccagataagaaattgtgaacttcatttggtgtatgacattcaatttttatgaataaagttgatactttagataatttagataataatgttgaaaaactatcagaaattgctaagtcttgaggagctaagtttggtgaaaaagttttagttgtaagaagtacagctataaaagaaatagaagttatttaa

SEQ ID NO: 15713 - protein, 478 aa, Mycoplasma mycoides subsp. mycoides SC str. PG1
MTKEKLQKRMKRTKVITTIGPSTHSAEAIKELFNNGMTTIRLNFSHGSYEEHGYRIKAAKKISKALNKPISIMLDTKGPEIRLGKFKDNKQEVVKGQAITIYTDNYSYLNKECVQGEMTVAYDMSVDLKPEDMILIDDGKLELTVDSVEPQIIKATAFNHHIVKTNKRVNLPGIDFSLPFLSEKDEKDILFGCEQDVDYIAASFVNTAENVRQIKEILTKANANHIQIISKIESQVGLDNIDEIIEESDGIMIARGDLGLEIPYYDVPYWEKIIIRKCREKGKIVIVATQMLETMTENPSPTRAEVTDVYYATELGADATMLSGESAAGDYPFLTVHTMSTINKRAEVEFYNKIYYQVQLDNARNSTSGPRAEIADLLATKTKDGEYKYAIVLSKTGELLKTISKFRPNVTILGVSPDKKLWTSFGVWHSIFMNKVDTLDNLDNNVEKLSEIAKSWGAKFGEKVLVVRSTAIKEIEVI

SEQ ID NO: 15714 - DNA, 1758 bp, Bacillus cereus ATCC 10987
  CDS (1)..(1758): transl_table=11
atgcgtaaaactaaaattgtatgtactataggtcctgctagtgaaagtattgaaaaattagagcaattaatcgaagcaggtatgaacgttgctcgtttaaacttctctcatggtagccatgaagaacacggcgctcgtattaaaaacattcgtgaagcttcaaagaaaactggtaaaacagttggtatcttacttgatacaaaaggtccagaaatccgtactcacgacttcgtagacggacaagctgagcttgtaacaggtgcagaagttgttatttctactgagcaagtattaggtactgcagagaagttctctgtatcttatgctggtctttatgacgatgtaaacccaggttctcgcattctaatcgatgatggtcttatcgagctagaagtaatcgaaaaagctgacggaaacatccgtacaaaagttcttaacagcggaactgtaaaaaataaaaaaggtgttaacgtaccaaacgtaagcattaagcttcctggtatcactgaaaaagacgtaaaagatatcatcttcggtatcgagcaaaaagttgatttcatcgcagcttcattcgtacgtaaagcagctgacgtattagaaatccgtgaattactagaagagcataacgctcaatacatccaaatcgtaccaaaaatcgaaaaccaagagggtatcgacaatatcgattcaatcttagaagtttctgacggtttaatggtagctcgtggtgacatgggtgtagaaattccaccagaagaagtaccattagtacaaaaacgtctaatcaaaaaatgtaacgtgttaggtaaaccagttattactgcaacacaaatgttagattctatgcaacgtaacccacgtccaactcgtgcggaagcaagtgacgtagctaacgcaatcttcgatggtacagacgcaatcatgctttcaggtgaaacagctgctggacaatacccagtagaagcagtaacaatgatggctaacattgcagtacgtgttgaaaaatcattacaatatgaagatatgttcaaaaaacgtattaaagagttcactccaacaattacagatgcaattagccaatctgttgcgcatacagcacttgctcttgatgtagctgcaatcgtagctccaacagaaagtggatatactgcgaaaatgatctctaaataccgtccaaaatctccaatcgtagctgtaacatctgacgagcaagtaggacgtcgtcttgcgcttgtttggggtgtacaagcatttatggctgagaagcgcgcagcttctactgacgaaatgttagatacagcgattcaaacaggtatggatgcaggtctaatcggacttggagacactgtagtaatcactgctggtgttccagttgctgaaactggtacaacaaacttaatgaaaatccacgttgttggtgaagaagttgctaaaggacaaggaatcggtcgtaaagctgcaaaaggtaaagtagttgtagcgaaaacagctgctgaagctgtagcgaacgtaaacgaaggtgatatccttgttacaacaagcactgataaagatatgatccctgcaatcgaaaaagctgctgctctagttgtagaagaaggcggtctaacaagccatgcggctgttgtaggtgtatcaatcggtattcctgttatcgttggtgtaaacggcgtaacagcaactttaaaaaatggccaagaagtaacagttgatgcagcacgcggaattgtttataatggacatgcggaagtgctataa

SEQ ID NO: 15715 - protein, 585 aa, Bacillus cereus ATCC 10987
MRKTKIVCTIGPASESIEKLEQLIEAGMNVARLNFSHGSHEEHGARIKNIREASKKTGKTVGILLDTKGPEIRTHDFVDGQAELVTGAEVVISTEQVLGTAEKFSVSYAGLYDDVNPGSRILIDDGLIELEVIEKADGNIRTKVLNSGTVKNKKGVNVPNVSIKLPGITEKDVKDIIFGIEQKVDFIAASFVRKAADVLEIRELLEEHNAQYIQIVPKIENQEGIDNIDSILEVSDGLMVARGDMGVEIPPEEVPLVQKRLIKKCNVLGKPVITATQMLDSMQRNPRPTRAEASDVANAIFDGTDAIMLSGETAAGQYPVEAVTMMANIAVRVEKSLQYEDMFKKRIKEFTPTITDAISQSVAHTALALDVAAIVAPTESGYTAKMISKYRPKSPIVAVTSDEQVGRRLALVWGVQAFMAEKRAASTDEMLDTAIQTGMDAGLIGLGDTVVITAGVPVAETGTTNLMKIHVVGEEVAKGQGIGRKAAKGKVVVAKTAAEAVANVNEGDILVTTSTDKDMIPAIEKAAALVVEEGGLTSHAAVVGVSIGIPVIVGVNGVTATLKNGQEVTVDAARGIVYNGHAEVL

SEQ ID NO: 15716 - DNA, 1344 bp, Methanococcus maripaludis S2
  CDS (1)..(1344): transl_table=11
ttggttgaaaaatcgacggaatataggaaaaccaaaattctggttactatggggccatctcttgacggaacttttgaaaaaagtcttgaatttattgatggaattcgctttaacatgtctcacacaaatacaaaacatattgaaaaatatctcgatattttaaataaaaaaaatattgcaaaactcatggatttaaagggaaacaagattaggataaaaaaatcaaatttttcagaactcattgaaaatcaggttgtaaaacttggaaaagatattctaatttcatatattccagaatgtattaaaaagggccaaaatatcctgattaatgatggaaaaataaaattaatcgttgaaagtgttgaaaaagatataactgcacgtgttttagttggaggacacataaaagaaaaaatgggagtaaactttcctgaaggatgctttccaaacgatttaacagatgaagatataaaaaacgtgaaatttgcagttgaaaatgaatttgaatacattgcactatctttcgttagaagtgaaacggatattttgaatttaaaaaatttaattaaagaatattctggaaattgctcagttattgcaaaaatcgagaccaaagaaggattgaaaaacattgatgagattttaaatcattcggatggcgtaatgattgcgagaggcgatcttggagttgaagttgccattgaatatctgccgataattcaaaaaaatattataaaacttgcaaatgagaagggaaaactcataattactgcaacccagatgctcgactcaatggtaaataatccgtatcccacaagagcagaagttacggatgttgcaaatgcaatatttgatggaaccgactgtttaatgctttcaaatgaaaccacaattggaaaatatccaatcgaatcaataaaaactctcgataatattgcaagagtttcagaaaatgatatttcaaaatacaaacaggaaatagaatttgaagaacattcaatctattcaggaattgcctatgcagttgaagctctttcaaaaaaattaaatcctaagatagtaattactccaacaacttcgggaaaaactccgctcagaatttcaaaattccggtttaattcaccaattattgcccttgctcctgaaaatatagtttttagaaaattaagattggtttggggagtaattccaataaaaattgatgaaataggagatgttgatgaagtacttgaaatatctaaaaaaattgcgaaaaatataattgacagcggtatttacgttgtaacgctcgggcacccaaaaggcgagaaaaaaacaaacgttataaaagttgagagcatataa

SEQ ID NO: 15717 - protein, 447 aa, Methanococcus maripaludis S2
MVEKSTEYRKTKILVTMGPSLDGTFEKSLEFIDGIRFNMSHTNTKHIEKYLDILNKKNIAKLMDLKGNKIRIKKSNFSELIENQVVKLGKDILISYIPECIKKGQNILINDGKIKLIVESVEKDITARVLVGGHIKEKMGVNFPEGCFPNDLTDEDIKNVKFAVENEFEYIALSFVRSETDILNLKNLIKEYSGNCSVIAKIETKEGLKNIDEILNHSDGVMIARGDLGVEVAIEYLPIIQKNIIKLANEKGKLIITATQMLDSMVNNPYPTRAEVTDVANAIFDGTDCLMLSNETTIGKYPIESIKTLDNIARVSENDISKYKQEIEFEEHSIYSGIAYAVEALSKKLNPKIVITPTTSGKTPLRISKFRFNSPIIALAPENIVFRKLRLVWGVIPIKIDEIGDVDEVLEISKKIAKNIIDSGIYVVTLGHPKGEKKTNVIKVESI

SEQ ID NO: 15718 - DNA, 1656 bp, Nasonia vitripennis
  CDS (1)..(1656)
atggtctggataaccgccgacgataagatggctggcaagccgaactttaccgcccagaacgcccagagtcatctcgaccacatgtgcgctctcgacatcgactctcacaccctcttcacccggctctccggcatcatctgcacgatcggaccggtctcccgttccgtcgagatgctggagcagatgatcgagaccggcatgaacgtcgcccgcatgaacttcagccacggctcgcacgagtaccacgcggagacgatcgccaacgtccgccaggcccagaagaatctcaccgaaaagaatggcttctgtgtaccagttgctattgcacttgacaccaagggacccgagatccgtactggcctcctcgaagggggtggctctgctgaagtcgaactgaagaagggccagaccttcaagttaacgacggacaaagcctacgcggagaaaggcaatgctgacaccgtctatgtcgactacgccaacatatctaaagttttgcaaaagggaaacagagtgtatgtcgacgatggcttgatgtcgttgatcgtcactggagtcagcgacaataccattacaacgactgtcgagaatggtggaactcttggctcgcgcaagggtgtcaatcttccgggagtcccagtcgacttgccagctgtctccgagaaggacaagtctgacttgcagttcggcgttgagcaagaggtcgacatgatttttgcgtccttcattcgtaacgctgctgctcttactgagattcgctctatccttggcgacaagggtaagaacattaaaatcatctcgaagatcgagaaccagcagggtatgaccaaccttgacgagatcattgaggcttctgacggtatcatggttgctcgtggtgatctgggtatcgagatcccacctgagaaggtgttccttgcccagaagtgcatgattagccgatgcaacaaggttggcaagcctgttatctgcgctactcagatgcttgagtctatggtgaagaaacctcgcgccaccagagccgagtcctccgatgtggctaatgctattcttgatggagccgattgcgttatgctttccggtgaaaccgccaagggagagtacccgttggaatgcgtgcgcacgatggctaatatctgcaaggaagcggaggctgtgatttggcaaaatcagctcttcgctgatctgtccaacaaggctgtgcctccgattgatgcgacgcacgcagtggctatcgcatctgtcgaagcggctgccaagtgtctcgctagtgccatcatagttatcaccacttctggtcggtctgcgcacttgatctccaagtacaggccacgctgccctattattgcggtcacgaggttccaccaggttgctcggcaagcgcatctttacagaggcattcttcctctccactacacagaggctccattatctgactggcttaaggatgttgatatccgtgtacaatatggtttaaactttggcaaaggtcgtggtttcgtacgaactggagattccgtcgtgattgttactggctggaagcagggctctggctttacgaatactttacgcattgtgtacgtagatccagaatttttagttgaacagacttgtgatatagttagtgattctgattcttacgaagatctttactag

SEQ ID NO: 15719 - protein, 551 aa, Nasonia vitripennis
MVWITADDKMAGKPNFTAQNAQSHLDHMCALDIDSHTLFTRLSGIICTIGPVSRSVEMLEQMIETGMNVARMNFSHGSHEYHAETIANVRQAQKNLTEKNGFCVPVAIALDTKGPEIRTGLLEGGGSAEVELKKGQTFKLTTDKAYAEKGNADTVYVDYANISKVLQKGNRVYVDDGLMSLIVTGVSDNTITTTVENGGTLGSRKGVNLPGVPVDLPAVSEKDKSDLQFGVEQEVDMIFASFIRNAAALTEIRSILGDKGKNIKIISKIENQQGMTNLDEIIEASDGIMVARGDLGIEIPPEKVFLAQKCMISRCNKVGKPVICATQMLESMVKKPRATRAESSDVANAILDGADCVMLSGETAKGEYPLECVRTMANICKEAEAVIWQNQLFADLSNKAVPPIDATHAVAIASVEAAAKCLASAIIVITTSGRSAHLISKYRPRCPIIAVTRFHQVARQAHLYRGILPLHYTEAPLSDWLKDVDIRVQYGLNFGKGRGFVRTGDSVVIVTGWKQGSGFTNTLRIVYVDPEFLVEQTCDIVSDSDSYEDLY

SEQ ID NO: 15720 - DNA, 1587 bp, Magnaporthe grisea 70-15; identical to SEQ ID NO: 8497
  CDS (1)..(1587)

SEQ ID NO: 15721 - protein, 528 aa, Magnaporthe grisea 70-15; identical to SEQ ID NO: 8498

SEQ ID NO: 15722 - DNA, 1554 bp, Apis mellifera
  CDS (1)..(1554)
atggtttccggaaaaacgatctctcatgcattatatgctcaaacccaactagatcatgtgtgtgctctggatatcgatgctcctataggagctgtccgtctttcagggattatttgtacaattggaccagcttcaagatctattgatatgcttgaaaaaatgatcgatacgggtatgaacattgctagattaaatttctcgcacggaactcatgaatatcatgctgagactattgctaatgtgcgacaagcacagaaaaacgtttcctctaaagctggattaagcattcctgtaggaattgctcttgatactaaaggtcctgaaatccgtactggacttttagaaggtggtggagctgctgaagtcgaattaaaaaaagatcaactttttaaattgtctactgataaagcatatgcagaaaaaggcacttcaagtattgtttatgttgattatgaaaatattactaaagttttgaagcctaatagtcgcgtttttgtcgatgatggtttaatttcccttaaagttactgccatccttgtaactgttgttgaaaatggtgggatgttgggttctcgtaaaggtgtcaatctaccaggtactcctgtagatttacctgctgtttctgaaaaagataagtctgatttaatattcggtgttgaacatgaagttgatatgatttttgcctcgtttatacgagatgcacacgctttgacagaaattcgaacaattcttggtgaaaaaggaaaaaatattaaagtaatatctaaaattgaaaatcatcagggcgtagtaaatattgatgaaattattgatgcttctgatggtattatggtagcacgtggtgatcttggtattgaaataccaccagagaaagtattcttagctcaaaaatctgctattagcaaatgtaataaagttggaaaaccaataatttgtgctacacaaatgcttgaatctatggtgaaaaaaccacgtgcaaccagagctgaatcatctgatgtagctaatgctattcttgatggagcagattgtgttatgttatcaggagaaactgctaaaggagattatccattggaatgtgtactcacaatggctaatatttgtaaagaagcagagtctgcaatctggcaaacacaattatttcacgagctttcaatgaaagcaatacctccaattgatgctacacatgccgtagcgattgctgttgtagaagcatctgtgaaatgtttagctagtgctattatagtaattacaactaccggccattccgcgtatttaatttctaaatacagaccacgttgcccaattattacagttactagacactcccagactgcacgacaatcacatctttatcgtgggattttgccacttcactttgaagaaccacgattagctgattgggtaaaagatgttgatgtacgtgttcagtttggtatgaaatttggcaaaaatcaaggtttcattaaacctggagatgcagttatagtagtcactggatggagaaaaggcgccggatttacgaactcacttcgtattgtgacggtcgaataa

SEQ ID NO: 15723 - protein, 517 aa, Apis mellifera
MVSGKTISHALYAQTQLDHVCALDIDAPIGAVRLSGIICTIGPASRSIDMLEKMIDTGMNIARLNFSHGTHEYHAETIANVRQAQKNVSSKAGLSIPVGIALDTKGPEIRTGLLEGGGAAEVELKKDQLFKLSTDKAYAEKGTSSIVYVDYENITKVLKPNSRVFVDDGLISLKVTAILVTVVENGGMLGSRKGVNLPGTPVDLPAVSEKDKSDLIFGVEHEVDMIFASFIRDAHALTEIRTILGEKGKNIKVISKIENHQGVVNIDEIIDASDGIMVARGDLGIEIPPEKVFLAQKSAISKCNKVGKPIICATQMLESMVKKPRATRAESSDVANAILDGADCVMLSGETAKGDYPLECVLTMANICKEAESAIWQTQLFHELSMKAIPPIDATHAVAIAVVEASVKCLASAIIVITTTGHSAYLISKYRPRCPIITVTRHSQTARQSHLYRGILPLHFEEPRLADWVKDVDVRVQFGMKFGKNQGFIKPGDAVIVVTGWRKGAGFTNSLRIVTVE

SEQ ID NO: 15724 - DNA, 1515 bp, Candida albicans SC5314; identical to SEQ ID NO: 8501
  CDS (1)..(1515): transl_table=12

SEQ ID NO: 15725 - protein, 504 aa, Candida albicans SC5314; identical to SEQ ID NO: 8502

SEQ ID NO: 15726 - DNA, 1587 bp, Ustilago maydis 521; identical to SEQ ID NO: 8503
  CDS (1)..(1587)

SEQ ID NO: 15727 - protein, 528 aa, Ustilago maydis 521; identical to SEQ ID NO: 8504

SEQ ID NO: 15728 - DNA, 1590 bp, Cryptococcus neoformans var. neoformans B-3501A
  CDS (1)..(1590)
atggccggtaccccctcttcccagctcgcttggctctctggtctcagcaccaatttcaatgagatgtccgccgaccagaagttcctccgcaagacttccatcattgctaccattggccccaaaaccaacaacgtcgagactctcgtgcagctcgctgatgcgggcatgaacatcgttcgaatgaacttttctcatggctcctatgagtaccatcaatctgtcattgacaatgctcgtgctgctgctgccaagagcccttctggccgacccattgccatcgctctcgacaccaaaggtccagagattaggactggcttgatgaaggatgacaccgatgtccccatttctgctggccacgaattctgggtcaccaccgacaaggcttatgcagaggctggtactgccgagcacatctatattgactataccaacatcgtcaaggtcactgccccgggcaagctcatctacgttgacgatggtattctttctctccaagtcatctctatccaaggcgaaaagatccgtgtcaagtctctcaactcgggcgttctctcctctcgcaagggtgttaacctgcccaagaccgctgtggatcttcccgctctttctgaaaaggacaagtctgatcttgccttcggtgtcaagaacggtgtcgacatgatcttcgcttctttcatccgttctgccaacgatgtcaaggagattcgaaaggtcctcggccctgaaggcgccgacatcaaaatcattgtcaagattgagaacgagcagggagtgatgaacttcgatgagattctcagggagactgacggcgtcatggtcgcccgaggtgatttgggtattgaaatccccgcaagtcaggtattcatggcccaaaagatgatgattgccaagtgcaacgtcgccggcaagcctgtcatttgtgctactcagatgcttgagtccatgacttacaaccctcgacccactcgtgccgaagtttccgatgttgccaacgcggtcatcgacggtgctgactgtatcatgctttccggcgagactgccaagggcaagtatcccattgaagctgtcaagatgatggctgagactgctttccttgctgagtcttctatcgcctaccctcctcttttcgaccagctccgagctcttactcctcgacctaccgagaccgctgagactcttgctctttctgctgttgccgctgctatcgaacaggatgccggcgctatcattgtgctttcaacttccggtgtttccgccaggttgatttccaagtacaggcctgcttgtcccatcatctgtgtgacccgaaacgaacaaaccgctcgacagctccacctttcgcgaggtgtttaccccgtctggttccctgaaccccgcggtattcctgctgagaagtggcagattgacgttgacaacaggattcgatatggtctcaggatggctctcggtttgggcatcattaagcctgaggctaccgtcatggctgtccaaggatggaagggcggtcttggccacactaacacgcttcgtatcctctccgttccttctgaccccgctgacctcgacctccactctatcgagcgcgactaa

SEQ ID NO: 15729 - protein, 529 aa, Cryptococcus neoformans var. neoformans B-3501A
MAGTPSSQLAWLSGLSTNFNEMSADQKFLRKTSIIATIGPKTNNVETLVQLADAGMNIVRMNFSHGSYEYHQSVIDNARAAAAKSPSGRPIAIALDTKGPEIRTGLMKDDTDVPISAGHEFWVTTDKAYAEAGTAEHIYIDYTNIVKVTAPGKLIYVDDGILSLQVISIQGEKIRVKSLNSGVLSSRKGVNLPKTAVDLPALSEKDKSDLAFGVKNGVDMIFASFIRSANDVKEIRKVLGPEGADIKIIVKIENEQGVMNFDEILRETDGVMVARGDLGIEIPASQVFMAQKMMIAKCNVAGKPVICATQMLESMTYNPRPTRAEVSDVANAVIDGADCIMLSGETAKGKYPIEAVKMMAETAFLAESSIAYPPLFDQLRALTPRPTETAETLALSAVAAAIEQDAGAIIVLSTSGVSARLISKYRPACPIICVTRNEQTARQLHLSRGVYPVWFPEPRGIPAEKWQIDVDNRIRYGLRMALGLGIIKPEATVMAVQGWKGGLGHTNTLRILSVPSDPADLDLHSIERD

SEQ ID NO: 15730 - DNA, 1719 bp, Cryptococcus neoformans var. neoformans B-3501A
  CDS (1)..(1719)
atggttcttggacatttctctccccaaacgaacaccactgttccccctcctccccatccttctgcctttgtgcccctgtttcaaacaaatacttccgtcgtttctggtaaacccaacgcctttagcaccatggccggtaccccctcttcccagctcgcttggctctctggtctcagcaccaatttcaatgagatgtccgccgaccagaagttcctccgcaagacttccatcattgctaccattggccccaaaaccaacaacgtcgagactctcgtgcagctcgctgatgcgggcatgaacatcgttcgaatgaacttttctcatggctcctatgagtaccatcaatctgtcattgacaatgctcgtgctgctgctgccaagagcccttctggccgacccattgccatcgctctcgacaccaaaggtccagagattaggactggcttgatgaaggatgacaccgatgtccccatttctgctggccacgaattctgggtcaccaccgacaaggcttatgcagaggctggtactgccgagcacatctatattgactataccaacatcgtcaaggtcactgccccgggcaagctcatctacgttgacgatggtattctttctctccaagtcatctctatccaaggcgaaaagatccgtgtcaagtctctcaactcgggcgttctctcctctcgcaagggtgttaacctgcccaagaccgctgtggatcttcccgctctttctgaaaaggacaagtctgatcttgccttcggtgtcaagaacggtgtcgacatgatcttcgcttctttcatccgttctgccaacgatgtcaaggagattcgaaaggtcctcggccctgaaggcgccgacatcaaaatcattgtcaagattgagaacgagcagggagtgatgaacttcgatgagattctcagggagactgacggcgtcatggtcgcccgaggtgatttgggtattgaaatccccgcaagtcaggtattcatggcccaaaagatgatgattgccaagtgcaacgtcgccggcaagcctgtcatttgtgctactcagatgcttgagtccatgacttacaaccctcgacccactcgtgccgaagtttccgatgttgccaacgcggtcatcgacggtgctgactgtatcatgctttccggcgagactgccaagggcaagtatcccattgaagctgtcaagatgatggctgagactgctttccttgctgagtcttctatcgcctaccctcctcttttcgaccagctccgagctcttactcctcgacctaccgagaccgctgagactcttgctctttctgctgttgccgctgctatcgaacaggatgccggcgctatcattgtgctttcaacttccggtgtttccgccaggttgatttccaagtacaggcctgcttgtcccatcatctgtgtgacccgaaacgaacaaaccgctcgacagctccacctttcgcgaggtgtttaccccgtctggttccctgaaccccgcggtattcctgctgagaagtggcagattgacgttgacaacaggattcgatatggtctcaggatggctctcggtttgggcatcattaagcctgaggctaccgtcatggctgtccaaggatggaagggcggtcttggccacactaacacgcttcgtatcctctccgttccttctgaccccgctgacctcgacctccactctatcgagcgcgactaa

SEQ ID NO: 15731 - protein, 572 aa, Cryptococcus neoformans var. neoformans B-3501A
MVLGHFSPQTNTTVPPPPHPSAFVPLFQTNTSVVSGKPNAFSTMAGTPSSQLAWLSGLSTNFNEMSADQKFLRKTSIIATIGPKTNNVETLVQLADAGMNIVRMNFSHGSYEYHQSVIDNARAAAAKSPSGRPIAIALDTKGPEIRTGLMKDDTDVPISAGHEFWVTTDKAYAEAGTAEHIYIDYTNIVKVTAPGKLIYVDDGILSLQVISIQGEKIRVKSLNSGVLSSRKGVNLPKTAVDLPALSEKDKSDLAFGVKNGVDMIFASFIRSANDVKEIRKVLGPEGADIKIIVKIENEQGVMNFDEILRETDGVMVARGDLGIEIPASQVFMAQKMMIAKCNVAGKPVICATQMLESMTYNPRPTRAEVSDVANAVIDGADCIMLSGETAKGKYPIEAVKMMAETAFLAESSIAYPPLFDQLRALTPRPTETAETLALSAVAAAIEQDAGAIIVLSTSGVSARLISKYRPACPIICVTRNEQTARQLHLSRGVYPVWFPEPRGIPAEKWQIDVDNRIRYGLRMALGLGIIKPEATVMAVQGWKGGLGHTNTLRILSVPSDPADLDLHSIERD

SEQ ID NO: 15732 - DNA, 1560 bp, Encephalitozoon cuniculi GB-M1
  CDS (1)..(1560)
atgtggctcgttgaagagaaatatcttgttcctttctatgaatatcattacgacatgctttgccgaccctatcaatgcacctgttgccagatccttggtggatgggattttgtcatccagagacctcatcacaacggctatagtcttcatgcggcccgtggctgcatgctggattatatctactcctttgggcaggattacgtctcctatctgcagagcacctatcattggtctcaaaagcttgataaatttggaaagtgtttggcgcaagcaatgagaatggtgctgacaaagatagtctgcacgattggacccagaacatcttctagggagaagatcaaggagctgatagatgctgggatgtcgattgcaagactgaacttcagccatggatcaagggaagcacatctggaagtgattaggaacatcagagactccagaagtggtgcagggaggcatgtttcaatagcactggacacaagggggcctgaggtgaggcttaggacaccggagatgaaggatatcaaggtggagggtggagaagttctccggttctcccttctttcttctgaaaaggacatctggatacccggtgttgaccttaagtctctgggtgtagacaacagggtgtttattgacgacggggcaatcgaactgagggtagtcaatgtggaagaagatggatttgaatgcgaggtgctgaacagtggcatgatcaagagcaataagtccatgaacttccctggcacggacattggagatagggctctgggggatgaggacaagaatgatatcgcctttgggttggagaatgggatagatatggtttttgcatcttttgtgagctgccgggcggatgtcgaggagataagaaggcttgtcggaagcaaggtcccggttgtatccaagatagagtcgtgtctagggatgaggaatctgaaggaaatagccctatgctctgacggggtgatgatagcaaggggagatcttggagttgagattgggctggaaaacatgttcagtgcccagaagagaatactttacgaagtgaagagggaggggaggcctgtgatctgtgcaacacaaatgatggagagcatgactttgaagaatgcgccgaaccggtcagaaatttctgatgttggaaatgcagttcttgatggatgcgactgtgtgatgttgagtgcagagtcggctgttgggatgttccctgtcgagactgttaaattcatgaggagcatctgtgctgatgcagagagatatgacatggagagcaggaagggggcaggggcttgcggggtgtcttcctatgtggatggagttgtgatatgctctggtacggagtcacagatagagaagatctacctgagcaagcctgaaactcccattattgtgatttccgagtccctgtggattctcaggaggttcagcatctatcgaggaatcattcctgtgtatggtaaggggtctgaggacgcggaagctactctgcgaaggctaggactgaggggaagattcctagctgtcggcagagaagatgtgaggatggtgagtgtttga

SEQ ID NO: 15733 - protein, 519 aa, Encephalitozoon cuniculi GB-M1
MWLVEEKYLVPFYEYHYDMLCRPYQCTCCQILGGWDFVIQRPHHNGYSLHAARGCMLDYIYSFGQDYVSYLQSTYHWSQKLDKFGKCLAQAMRMVLTKIVCTIGPRTSSREKIKELIDAGMSIARLNFSHGSREAHLEVIRNIRDSRSGAGRHVSIALDTRGPEVRLRTPEMKDIKVEGGEVLRFSLLSSEKDIWIPGVDLKSLGVDNRVFIDDGAIELRVVNVEEDGFECEVLNSGMIKSNKSMNFPGTDIGDRALGDEDKNDIAFGLENGIDMVFASFVSCRADVEEIRRLVGSKVPVVSKIESCLGMRNLKEIALCSDGVMIARGDLGVEIGLENMFSAQKRILYEVKREGRPVICATQMMESMTLKNAPNRSEISDVGNAVLDGCDCVMLSAESAVGMFPVETVKFMRSICADAERYDMESRKGAGACGVSSYVDGVVICSGTESQIEKIYLSKPETPIIVISESLWILRRFSIYRGIIPVYGKGSEDAEATLRRLGLRGRFLAVGREDVRMVSV

SEQ ID NO: 15734 - DNA, 1539 bp, Tribolium castaneum
  CDS (1)..(1539)
atgagtacgcagccgaaaacaaacctcctggactacatcagtagtttggacattacagccaaaccgaaatatctgcggctaacgggaatcgtgtgtacgatcggaccagcatgccagaaggtagagattttggagaaaatgctcgaagctggaatgaacgtggcacgtttgaacttctctcacggtactcacgagtaccacgtcgatttgatcaaaaacataaggaccgctgtggacaactacagcaagagaataggccgctactgcccccttgccatcgccatcgacaccaaaggctccgaaatccgaactggagtactagaagggggcatctctgccgaagtggtcctggagaaagggtcaaaagtgaccgtgacaaccgacgaaaagtatgccaaaaagtgcaccaagagcgtcatctacgtcgattataaaaacatcaccaaggtgcagaaacccggaaaccagattttcatcgacgacggtttgattaccctcaactgtgagaaaatccaaggctcggagatcacttgctcggttgccaatgggggaaaactggggagtagtaaaggggtgaacctgccaggcgtcgagaaagacctgcccacggtttcggaaaaggacaagaaggatttgaaattcgcagttgagcagaacgtcgactgtgttttcgcctcgttcacacgaaacgccgaagaagtgcgccagattcgctccattttaggcgacagcaacattcgggtgattgccaagatcgagaacacgcaaggtgtgaagaacatggacgagattattgaagctgccgatgggattctcatcgatcggggcgacctggggatggaaatctccttccagaaggtgttcctcgcccagaaagccatcatcgcgaggtgtaacaaggttggaaagcccattattatcgccacccatttgctggaatcaatggttgataaaccaaggcctacgagagccgagagctcggatgtggccaatgctgtgctggacggtgccgactgtgtgatgctagcaggggagacggccaagggcttgtaccctgtggagtgtgtggagaccatggctttgatttgcaaagaggccgaggcagcggtgtggcaaaaacagctctttaacgacctcaaaagccagcctaaagtaccgcttgacatcgtccaaactaccgcaatatccacagttgaagcctcgatgaactcgctagccacggccatcatcgtggtcacgaaaacgggaaaatcggcacaattgttgtcaaaatacaagccaaagtgcccgattattgcagtgacgaggaatgcgcaagttgcgcgccagttacacttgttcagggcgattatgcccttgtattttgacggccaaagcccaaccgagtggttgaaaaatgtggaagtccgggttaaagccggagttagttatggaaagtcgttggggtttgttaaatcaggggatactgtaattattgtgacgggtttgcatcaagggcctggctctacaaacactcttacgttgatgactgtccaatga

SEQ ID NO: 15735 - protein, 512 aa, Tribolium castaneum
MSTQPKTNLLDYISSLDITAKPKYLRLTGIVCTIGPACQKVEILEKMLEAGMNVARLNFSHGTHEYHVDLIKNIRTAVDNYSKRIGRYCPLAIAIDTKGSEIRTGVLEGGISAEVVLEKGSKVTVTTDEKYAKKCTKSVIYVDYKNITKVQKPGNQIFIDDGLITLNCEKIQGSEITCSVANGGKLGSSKGVNLPGVEKDLPTVSEKDKKDLKFAVEQNVDCVFASFTRNAEEVRQIRSILGDSNIRVIAKIENTQGVKNMDEIIEAADGILIDRGDLGMEISFQKVFLAQKAIIARCNKVGKPIIIATHLLESMVDKPRPTRAESSDVANAVLDGADCVMLAGETAKGLYPVECVETMALICKEAEAAVWQKQLFNDLKSQPKVPLDIVQTTAISTVEASMNSLATAIIVVTKTGKSAQLLSKYKPKCPIIAVTRNAQVARQLHLFRAIMPLYFDGQSPTEWLKNVEVRVKAGVSYGKSLGFVKSGDTVIIVTGLHQGPGSTNTLTLMTVQ

SEQ ID NO: 15736 - DNA, 1611 bp, Tribolium castaneum
  CDS (1)..(1611)
atggttttcacgacaatttacgacaatgacgagcgcgagatggcctcttccagcgttccgcccctgcagatggaggcggccgacgccagcacccacctggaccacatgtgcgctctggacatccaatcgaaggcgccctttgtgcgcctttctggcattatttgcaccattgggccggcctcgcgcgaccccgcaatgttggagaaaatgatggagactggcatgaatatcgcacgcttgaatttctcgcacggctcgcacgagtaccacgccgagactattaaaaatataaggacggctgtggcgaattatagcaaaaaaattggaatgtcgtatcctttggccattgcgctcgacaccaaagggcccgagatcaggaccgggctgctcgaagggggcggttcagcggaagtcgaactgaaacgcggcgaaaaaatcaccctcaccaccaacaaagcgtacgctgaaaaaggcaccgccagcatcgtctacgtcgactacgaaaacatccaaaaagtgctgaaggtcggcaatcgcgtctacgtcgacgacggcctcatgtcgctcgtttgcaccgaaatcaaaggcgccgacttgatctgcaccatcgaaaacggcggaatgctgggcagtcgcaaaggcgtcaacctgcccggcgtccccgtcgacctccccgccgtttcggaaaaagacaaatccgatctgaaattcggcgtggaacaaggcgtcgacatgattttcgcctcgtttatccgaaacggaagtgcacttagcgagattcgcaatatcctcggccccgaaggcaaaaacatcctcatcatctccaaaatcgaaaaccagcaagggatgcaacacctggatgagataatcaaggctagtgacggcatcatggtggcgagaggtgacttaggcattgaaataccgacggagaaagtcttccttgcgcaaaaggccatgattgccaagtgcaacaaagtgggaaaacctgtcatttgcgccacccagatgctggaaagcatggtgaaaaagccacggcccactcgggccgaaagctccgacgttgccaatgccatcctggatggggctgattgtgtgatgctgtcgggggagacggccaagggggattaccccttggagtgtgtgcacacaatggcgaatatttgtaaagaggcagaggcggcgatttggcagaaacagttgtttcaagatcttacaagcaaggctgtgcctccaatggatgctgctcatactgtggccattgcagcagctgaggcttcgtccaagtgtttggcggctgcgattgttgtggtgacaacatcaggacgctctgcacatctcatctccaagtatagaccgaggtgtcccattattgcagttacaaggaatgcgcaaactgcaagacaggcacacttgtatagggcgattttgccgctccattacgaagccgagaggaaggacgactggctgaaggatgtcgaggctcgtgttaacacgtccatcgagttcggcaaagctcgaggtttcataaaacaaggtgacccggtgattatcgtcacagggtggaagcaaggatccggattcaccaacacgatgcgcattgtgaacgtctaa

SEQ ID NO: 15737 - protein, 536 aa, Tribolium castaneum
MVFTTIYDNDEREMASSSVPPLQMEAADASTHLDHMCALDIQSKAPFVRLSGIICTIGPASRDPAMLEKMMETGMNIARLNFSHGSHEYHAETIKNIRTAVANYSKKIGMSYPLAIALDTKGPEIRTGLLEGGGSAEVELKRGEKITLTTNKAYAEKGTASIVYVDYENIQKVLKVGNRVYVDDGLMSLVCTEIKGADLICTIENGGMLGSRKGVNLPGVPVDLPAVSEKDKSDLKFGVEQGVDMIFASFIRNGSALSEIRNILGPEGKNILIISKIENQQGMQHLDEIIKASDGIMVARGDLGIEIPTEKVFLAQKAMIAKCNKVGKPVICATQMLESMVKKPRPTRAESSDVANAILDGADCVMLSGETAKGDYPLECVHTMANICKEAEAAIWQKQLFQDLTSKAVPPMDAAHTVAIAAAEASSKCLAAAIVVVTTSGRSAHLISKYRPRCPIIAVTRNAQTARQAHLYRAILPLHYEAERKDDWLKDVEARVNTSIEFGKARGFIKQGDPVIIVTGWKQGSGFTNTMRIVNV

SEQ ID NO: 15738 - DNA, 1674 bp, Tribolium castaneum
  CDS (1)..(1674)
atggtttggtacacgcgcgaaaatgacgatagcgagcaaattaaaccgttgcattgttcacccccgaaacaactcacagcaggagccgcttacacacaactcgaccacaactcgctgcttgacattcaatcacatccaccacaagtgcgtctcactggaataatctgcactttgggaccttcaacgacagatgtcgaaacgttggaaagaatgatcgaagctggaatgaacattgcccgcctaacactctcccacggcacccaggaaatgcacaccgaactgatccaaaacgtgagaaccgccgtcgaaaattacagcaaaagactgggagtcatgtaccccttatccctcgccctcgatatcaaaggacccgaagtccggaccggttacatggaaggcggcatcgccgccgaagtcgagctgaaaaagggcgaacaaatcaaactgacaacagacaaagcgtatctggagaagggcagctcgagcgtgatctacgtcgactacgacaacatccagaaggtggtccaacccgggaaccgtattttcctggacgatggtctcatctccctgatttgcacaagcgtccaaggctcggtcctgacatgtagtgtggaaaacgggggaatgcttggcagttgcaaaaacgtgaacctccccggaatcgatatcgacttacccgtggtgtccgaaaaagacaaggaggatttgcttttcggcgtcgaacacggcattgacaccgttcacgcctcattcatccgcaatgctgtcgatgtgtcggaggttcgagacgtgctagggcgggccggtaacaagatcttgatcatttcgaaaatcgaaaaccaccaaggtgtgcacaacatcgacgaaataatcaaagcttccgacggcattatgatcgggcgaggcgacctagcggtggaaatcggccctgagaagcttttcctcgcccagaagagcatcatagctaagtgtaacaaagcggggaaaccggtcatttgcgccaatcagctgctctactcgatgataaaacgtccaagacccactcgggccgaatgcaccgatgttgcaaacgcggtgcttgacggtgttgactgcgtgatgttgacgggggaaacttttcttggccagcacccgatcgagtgcattcgggccgcgtccaaaatttgcaaagaggccgaaggggccatttggtacaaacaccactttcgggaattgatcgggcatgcgagacctccgctagagacgtcgcatacaatttgcatagctgcagtcgaagctgcaaatcagtgtctagcagctgcgattattgtcacgtcagtttcgggacgttcggcccattcactggcaaagtatcggcccaactgccctattattttagtgacacgtgatccgactgtcgccaaacaagcgaacttattccggggaatcatcccccttttttacgaagtcgagaggaaagacgattggaggcgagatattgaagctaggatcagtttcgggatcagttttggaaagtggagggggtttgtaaggtcgggggaccccatcgtggcagtgaatgggtcacaaagggggtcggggtacactgatacgatccgagtcctgtacgttatgaggcccatagtggaaggggactgcacgtgtgataagaaaacgggtgaccaaaacgtatag

SEQ ID NO: 15739 - protein, 557 aa, Tribolium castaneum
MVWYTRENDDSEQIKPLHCSPPKQLTAGAAYTQLDHNSLLDIQSHPPQVRLTGIICTLGPSTTDVETLERMIEAGMNIARLTLSHGTQEMHTELIQNVRTAVENYSKRLGVMYPLSLALDIKGPEVRTGYMEGGIAAEVELKKGEQIKLTTDKAYLEKGSSSVIYVDYDNIQKVVQPGNRIFLDDGLISLICTSVQGSVLTCSVENGGMLGSCKNVNLPGIDIDLPVVSEKDKEDLLFGVEHGIDTVHASFIRNAVDVSEVRDVLGRAGNKILIISKIENHQGVHNIDEIIKASDGIMIGRGDLAVEIGPEKLFLAQKSIIAKCNKAGKPVICANQLLYSMIKRPRPTRAECTDVANAVLDGVDCVMLTGETFLGQHPIECIRAASKICKEAEGAIWYKHHFRELIGHARPPLETSHTICIAAVEAANQCLAAAIIVTSVSGRSAHSLAKYRPNCPIILVTRDPTVAKQANLFRGIIPLFYEVERKDDWRRDIEARISFGISFGKWRGFVRSGDPIVAVNGSQRGSGYTDTIRVLYVMRPIVEGDCTCDKKTGDQNV

SEQ ID NO: 15740 - DNA, 1593 bp, Tribolium castaneum
  CDS (1)..(1593)
atggcaagccccccgaaaaagatggcctcttccagcgttccgcccctgcagatggaggcggccgacgccagcacccacctggaccacatgtgcgctctggacatccaatcgaaggcgccctttgtgcgcctttctggcattatttgcaccattgggccggcctcgcgcgaccccgcaatgttggagaaaatgatggagactggcatgaatatcgcacgcttgaatttctcgcacggctcgcacgagtaccacgccgagactattaaaaatataaggacggctgtggcgaattatagcaaaaaaattggaatgtcgtatcctttggccattgcgctcgacaccaaagggcccgagatcaggaccgggctgctcgaagggggcggttcagcggaagtcgaactgaaacgcggcgaaaaaatcaccctcaccaccaacaaagcgtacgctgaaaaaggcaccgccagcatcgtctacgtcgactacgaaaacatccaaaaagtgctgaaggtcggcaatcgcgtctacgtcgacgacggcctcatgtcgctcgtttgcaccgaaatcaaaggcgccgacttgatctgcaccatcgaaaacggcggaatgctgggcagtcgcaaaggcgtcaacctgcccggcgtccccgtcgacctccccgccgtttcggaaaaagacaaatccgatctgaaattcggcgtggaacaaggcgtcgacatgattttcgcctcgtttatccgaaacggaagtgcacttagcgagattcgcaatatcctcggccccgaaggcaaaaacatcctcatcatctccaaaatcgaaaaccagcaagggatgcaacacctggatgagataatcaaggctagtgacggcatcatggtggcgagaggtgacttaggcattgaaataccgacggagaaagtcttccttgcgcaaaaggccatgattgccaagtgcaacaaagtgggaaaacctgtcatttgcgccacccagatgctggaaagcatggtgaaaaagccacggcccactcgggccgaaagctccgacgttgccaatgccatcctggatggggctgattgtgtgatgctgtcgggggagacggccaagggggattaccccttggagtgtgtgcacacaatggcgaatatttgtaaagaggcagaggcggcgatttggcagaaacagttgtttcaagatcttacaagcaaggctgtgcctccaatggatgctgctcatactgtggccattgcagcagctgaggcttcgtccaagtgtttggcggctgcgattgttgtggtgacaacatcaggacgctctgcacatctcatctccaagtatagaccgaggtgtcccattattgcagttacaaggaatgcgcaaactgcaagacaggcacacttgtatagggcgattttgccgctccattacgaagccgagaggaaggacgactggctgaaggatgtcgaggctcgtgttaacacgtccatcgagttcggcaaagctcgaggtttcataaaacaaggtgacccggtgattatcgtcacagggtggaagcaaggatccggattcaccaacacgatgcgcattgtgaacgtctaa

SEQ ID NO: 15741 - protein, 530 aa, Tribolium castaneum
MASPPKKMASSSVPPLQMEAADASTHLDHMCALDIQSKAPFVRLSGIICTIGPASRDPAMLEKMMETGMNIARLNFSHGSHEYHAETIKNIRTAVANYSKKIGMSYPLAIALDTKGPEIRTGLLEGGGSAEVELKRGEKITLTTNKAYAEKGTASIVYVDYENIQKVLKVGNRVYVDDGLMSLVCTEIKGADLICTIENGGMLGSRKGVNLPGVPVDLPAVSEKDKSDLKFGVEQGVDMIFASFIRNGSALSEIRNILGPEGKNILIISKIENQQGMQHLDEIIKASDGIMVARGDLGIEIPTEKVFLAQKAMIAKCNKVGKPVICATQMLESMVKKPRPTRAESSDVANAILDGADCVMLSGETAKGDYPLECVHTMANICKEAEAAIWQKQLFQDLTSKAVPPMDAAHTVAIAAAEASSKCLAAAIVVVTTSGRSAHLISKYRPRCPIIAVTRNAQTARQAHLYRAILPLHYEAERKDDWLKDVEARVNTSIEFGKARGFIKQGDPVIIVTGWKQGSGFTNTMRIVNV

SEQ ID NO: 15742 - DNA, 1761 bp, Clostridium difficile 630; identical to SEQ ID NO: 8505
  CDS (1)..(1761): transl_table=11

SEQ ID NO: 15743 - protein, 586 aa, Clostridium difficile 630; identical to SEQ ID NO: 8506

SEQ ID NO: 15744 - DNA, 1419 bp, Bradyrhizobium sp. ORS278
  CDS (1)..(1419): transl_table=11
atgcgtcgtcaccgtcgagccaagatcgtcgcgaccgtcggtcccgccagcaattctcctgacatgctgaaggagctgttcctcgccggtgtcgatacgttccgtctcaacttcagccacggcacgcaggctgatcacgccaaggttcatgccgcgatccgcgcgctggaaaaggacgtgcagcgtccgatcggcatcctgatggatctgcagggaccgaagatccgcgtcggtaccctgcgcgacaagaagatccaggtcgaagcgggcgagacgattcgatttgtgttgaatgggaccgagggtgacaagacgtcgattccgttgccgcatccggagatctttgcggcggtcgcgcccggtcacgatcttctgatcgacgacggccgcgtgcgcgtgcgtgtcaccgggctcggcgacgactggatcgaagccaaggtgatcgtcagcggcgcgatctccaatcacaagggcgtcaacctgcccggcacgatcctcgaactgtcgccgctgaccgcgaaggatcgttccgatcttacgttcggcctcgacctcggcgtcgactgggtcgcgctgtccttcgtgcagaagccatccgacgtgatcgaggcgagggggctcatcgacggccgcgccggcatcatgtccaagatcgagaagcctgccgcgctcgaccgcatcgacgacatcatccagctgtcggatgcgatcatggtggcgcgcggggatctcggtgtcgaaattccgaatgaggatgtgccgggcaagcagaaggagctggtgcgcgcctgccggctcgcggtgaagccggtgatcgtcgcgacgcagatgctggactcgatggtcgccacacccacgccgacgcgcgcggaagtctccgacgtcgcgaccgcgatctatgacggcgccgatgcggtgatgctgtcggcggaatcggccagcggccagtatccgcgcgaggccgtggcgatgatggacagcatcatcaagtcgaccgagaagcacaagatgtacgcctcgattatccaggcgacgcagcccgacgaggagcagacgccgccgcatgcggtggcgaccgccgcggccgatctcgcctcggcgatccatgccaaggcgatcgtggcctacacgtcgagcggtacctcggcctcgcgcgtcgcgcgcaagcggccgagcctgccgatccttgcgatcacgccgaacgaggacacctcgcggcggatgtgcctgttgtggggcgcgcacagcgtgctgtcgcaggacgtgcagagctatgaggagatggtcgagcgcgcgacgtttttcgcggtccaggaggagttcgccgacaagggcgatctgctggtcgtcgtcgccggcatcccgttcgcgcaggccggcaccaccaacaatctacgcgtcgtcaccgtgcccagatag

SEQ ID NO: 15745 - protein, 472 aa, Bradyrhizobium sp. ORS278
MRRHRRAKIVATVGPASNSPDMLKELFLAGVDTFRLNFSHGTQADHAKVHAAIRALEKDVQRPIGILMDLQGPKIRVGTLRDKKIQVEAGETIRFVLNGTEGDKTSIPLPHPEIFAAVAPGHDLLIDDGRVRVRVTGLGDDWIEAKVIVSGAISNHKGVNLPGTILELSPLTAKDRSDLTFGLDLGVDWVALSFVQKPSDVIEARGLIDGRAGIMSKIEKPAALDRIDDIIQLSDAIMVARGDLGVEIPNEDVPGKQKELVRACRLAVKPVIVATQMLDSMVATPTPTRAEVSDVATAIYDGADAVMLSAESASGQYPREAVAMMDSIIKSTEKHKMYASIIQATQPDEEQTPPHAVATAAADLASAIHAKAIVAYTSSGTSASRVARKRPSLPILAITPNEDTSRRMCLLWGAHSVLSQDVQSYEEMVERATFFAVQEEFADKGDLLVVVAGIPFAQAGTTNNLRVVTVPR

SEQ ID NO: 15746 - DNA, 1455 bp, Dichelobacter nodosus VCS1703A; identical to SEQ ID NO: 8377
  CDS (1)..(1455): transl_table=11

SEQ ID NO: 15747 - protein, 484 aa, Dichelobacter nodosus VCS1703A; identical to SEQ ID NO: 8378

SEQ ID NO: 15748 - DNA, 1425 bp, Thermus thermophilus HB27; identical to SEQ ID NO: 8511
  CDS (1)..(1425): transl_table=11

SEQ ID NO: 15749 - protein, 474 aa, Thermus thermophilus HB27; identical to SEQ ID NO: 8512

SEQ ID NO: 15750 - DNA, 1797 bp, Candidatus Protochlamydia amoebophila UWE25; identical to SEQ ID NO: 8513
  CDS (1)..(1797): transl_table=11

SEQ ID NO: 15751 - protein, 598 aa, Candidatus Protochlamydia amoebophila UWE25; identical to SEQ ID NO: 8514

SEQ ID NO: 15752 - DNA, 1758 bp, Listeria monocytogenes str. 4b F2365
  CDS (1)..(1758): transl_table=11
atgaaaaaaacgaaaattgtttgtacaattggtcctgcaagtgagtcagttgacacattagttcagttgatcgaagcaggaatgaacgttgcacgtcttaatttctctcacggagattttgaagagcacggtgcgcgtattgtaaatatccgcgaagcatcgaaaaaaactggtaaacaagtggctatcttacttgatacaaaaggtccagaaatccgtacaaacgacatggtcggcggaaaattagaattccaaacaggtgatgttgtacgtgtttctatgactcctgttgaaggaacaaaagaaaaattctccgtgacttacggcgaactttacgatgatgtagaaattggttcttccattttacttgatgacggcttaatcggtcttgaagtaatcgaaaaagacgaagctaatcgcgaactagtaacaaaagtacttaacccaggtgtacttaaaaataaaaaaggtgttaacgtaccaaacgtttctatcaacctaccaggaatcacagaaaaagatgctgctgatatccgctttggtttagaacaaggtattgattttatcgctgcatctttcgtacgtcgtgctacagatgttcttgaaatcactaaaattctagaagagcacaatgcaactcacgtacaaatcattcctaaaatcgaaaaccaagaaggcgttgataatatcgacgaaatcttacaagtatctcaaggcctaatggttgctcgtggggaccttggtgttgaaattccagctgaagaagttccgattgtacaaaaagaacttatcagaaaatgtaataaacttggtaaacctgttattactgcaacacaaatgcttgattccatgcaacgtaacccacgtccaactcgcgctgaagcaagtgacgtagcgaatgcgatttttgatggaacagatgcaattatgttgtccggtgaaacagctgctggggattatccagtagaagcagttaaaatgatggcgaaaatcgctgttcgtacagaagaagtactagttgctcaagataaatttgcacttaaacttcacgaaaatacggatatgacagaagctatcggtcaagcagttggccatactgcgaaaaacctaaatgtacaaactattgttgctgcgactcaaagtggtcacacagcgcgtatgatctctaaataccgtcctaaatctcatatcgttgctgtaacattcaacgagcatgtataccgcggtttagcactttcatggggtgtttatcctcgcctagctactccagttagcaacacagatgaaatgttcgaccttgcagtgaaagaatctcttgcttctggcgttgcaaaacaaggcgacttaattatcatcactgctggtgttccagttactgaaagtggaacaacaaacgtaatgaaaatccaattaattggtgaaaaagttgttaaaggccaaggtattggcagcaaatctgttatcggtaaagcaatcgttgctaaatccaatgcagaagcacttgaaaaagcagaagaaggcggaatcttaatcgttaaaacaacggataaagaaatgctacctgcattcgagaaaagtgcagcagttgttgtggaagaaggcggcttgactagccacgcagcagttgtaggaatcaacctaggcattcctgtcatcgttggcgctaaagatgcaacatctcttgtaaaagacggtgaaatcattactgttgattctcgtcaaggtgttgtatataacggcaaaacagcaacacattaa

SEQ ID NO: 15753 - protein, 585 aa, Listeria monocytogenes str. 4b F2365
MKKTKIVCTIGPASESVDTLVQLIEAGMNVARLNFSHGDFEEHGARIVNIREASKKTGKQVAILLDTKGPEIRTNDMVGGKLEFQTGDVVRVSMTPVEGTKEKFSVTYGELYDDVEIGSSILLDDGLIGLEVIEKDEANRELVTKVLNPGVLKNKKGVNVPNVSINLPGITEKDAADIRFGLEQGIDFIAASFVRRATDVLEITKILEEHNATHVQIIPKIENQEGVDNIDEILQVSQGLMVARGDLGVEIPAEEVPIVQKELIRKCNKLGKPVITATQMLDSMQRNPRPTRAEASDVANAIFDGTDAIMLSGETAAGDYPVEAVKMMAKIAVRTEEVLVAQDKFALKLHENTDMTEAIGQAVGHTAKNLNVQTIVAATQSGHTARMISKYRPKSHIVAVTFNEHVYRGLALSWGVYPRLATPVSNTDEMFDLAVKESLASGVAKQGDLIIITAGVPVTESGTTNVMKIQLIGEKVVKGQGIGSKSVIGKAIVAKSNAEALEKAEEGGILIVKTTDKEMLPAFEKSAAVVVEEGGLTSHAAVVGINLGIPVIVGAKDATSLVKDGEIITVDSRQGVVYNGKTATH

SEQ ID NO: 15754 - DNA, 1758 bp, Bacillus thuringiensis serovar konkukian str. 97-27
  CDS (1)..(1758): transl_table=11
atgcgtaaaactaaaattgtatgtactataggtcctgctagtgaaagtattgaaaaattagagcaattaatcgaagcaggtatgaacgttgctcgtttaaacttctctcatggtagccatgaagagcacggtgctcgtattaaaaacattcgtgaagcttcaaagaaaactggtaaaacagttggtatcttacttgatacaaaaggtccagaaatccgtactcatgacttcgtagacggacaagctgagcttgtaacaggtgcagaagtagttctttctactgagcaagtattaggtactgcagagaagttctctgtatcttatgctggtctttatgacgatgtagatccaggttctcgcattctaatcgatgacggtcttatcgagctagaagtaatcgaaaaagctgacggaaacatccgtacaaaagttcttaacagcggaactgtaaaaaataaaaaaggtgttaacgtaccaaacgtaagcattaagcttcctggtatcactgaaaaagacgtaaaagatatcatcttcggtatcgagcaaaaagttgatttcatcgcagcttcattcgtacgtaaagcagctgacgtattagaaatccgtgaattattagaagagcataacgctcaatacatccaaatcgtaccaaaaattgaaaaccaagagggtatcgacaacatcgattcaatcttagaagtttctgacggcttaatggtagctcgtggtgacatgggtgtagaaattccaccagaagaagtaccattagtacaaaaacgtctaatcaaaaaatgtaacgtgttaggtaaaccagttattactgcaacacaaatgttagattctatgcaacgtaacccacgtccaactcgtgcggaagcaagtgacgtagctaacgcaatcttcgatggtacagatgcaatcatgctttcaggtgaaacggctgctggacaatacccagtagaagcagtaacaatgatggctaacattgcagtacgtgttgaaaaatcattacaatatgaagatatgttcaaaaaacgtattaaagagttcactccaacaattacagatgcaattagccaatctgttgcgcatacagcacttgctcttgatgtagctgcaatcgtagctccaacagaaagtggatatactgcgaaaatgatctctaaataccgtccaaaatctccaatcgtagctgtaacatctgatgagcaagtaggacgtcgtcttgcacttgtttggggtgtacaagcatttatggctgagaagcgtgcggcttctactgacgaaatgttagatacagcgattcaaacaggtatggatgcaggtctaatcggacttggagacactgtagtaatcactgctggtgttccagttgctgaaactggtacaacaaacttaatgaaaatccacgttgttggtgaagaagttgctaaaggacaaggaatcggtcgtaaagctgcaaaaggtaaagtagttgtagcgaaaacagctgctgaagctgtagcgaacgtaaacgaaggtgatatccttgttacaacaagcactgataaagatatgattcctgcaatcgaaaaagctgctgctttagttgtagaagaaggcggcctaacaagccatgcggctgttgtaggtgtatcaatcggtattcctgttatcgttggtgtaaacggcgtaacagcaactttaaaaaatggccaagaagtaacagttgatgcagcacgcggaattgtttataatggacatgcggaagtgctataa

SEQ ID NO: 15755 - protein, 585 aa, Bacillus thuringiensis serovar konkukian str. 97-27
MRKTKIVCTIGPASESIEKLEQLIEAGMNVARLNFSHGSHEEHGARIKNIREASKKTGKTVGILLDTKGPEIRTHDFVDGQAELVTGAEVVLSTEQVLGTAEKFSVSYAGLYDDVDPGSRILIDDGLIELEVIEKADGNIRTKVLNSGTVKNKKGVNVPNVSIKLPGITEKDVKDIIFGIEQKVDFIAASFVRKAADVLEIRELLEEHNAQYIQIVPKIENQEGIDNIDSILEVSDGLMVARGDMGVEIPPEEVPLVQKRLIKKCNVLGKPVITATQMLDSMQRNPRPTRAEASDVANAIFDGTDAIMLSGETAAGQYPVEAVTMMANIAVRVEKSLQYEDMFKKRIKEFTPTITDAISQSVAHTALALDVAAIVAPTESGYTAKMISKYRPKSPIVAVTSDEQVGRRLALVWGVQAFMAEKRAASTDEMLDTAIQTGMDAGLIGLGDTVVITAGVPVAETGTTNLMKIHVVGEEVAKGQGIGRKAAKGKVVVAKTAAEAVANVNEGDILVTTSTDKDMIPAIEKAAALVVEEGGLTSHAAVVGVSIGIPVIVGVNGVTATLKNGQEVTVDAARGIVYNGHAEVL

SEQ ID NO: 15756 - DNA, 1413 bp, Erwinia carotovora subsp. atroseptica SCRI1043
  CDS (1)..(1413): transl_table=11
atgaaaaagacaaaaattgtttgtaccatcgggccgaaaacagagtcagaagaaatgcttggcaacctgctgtctgccggcatgaatgttatgcgcctgaacttctctcacggggattacgtagaacatggccaacgcatcaagaacctgcgtgccgtcatggaaaaaaccggtcagcaagcggcgatcctgcttgacaccaaaggcccagaaatccgcaccatgaagctggaaaacggcgctgacgtaacgttgaccgccggtcaaacgttcacgttcaccaccgatcagagcatcgtgggtaacaaagatcgtgtcgcagtcacttatgctggattcaccgaagacctcagcgtcggtaacaccgttctggttgatgacggtttgatcggtatgcaggttacagcggtcagcggtaacgacgtcgtttgtaaggtgctgaacaatggcgatctgggcgagaataaaggcgttaacctgccaggcgtttccatccagttacctgctctggctgaaaaagacaaacgcgacctgattttcggttgcgaacaaggtgtcgatttcgtcgcagcttcctttattcgtaaacgttccgacgttgaagaaattcgcgctcacctgaaagcacacggtggcgagcacatccagatcatttccaaaatcgaaaatcaggaaggtctgaacaatttcgacgaaattctggaagcgtctgacggcatcatggttgctcgtggcgacctgggcgttgagatcccagttgaagaagtgatcttcgcacagaaaatgatgatcgaaaaatgtaacctggctcgcaaagtggtgatcaccgcaacgcaaatgctggattcaatgatcaaaaacccacgtcctacccgtgctgaagctggcgacgtggctaacgccatcatcgacggtaccgatgccgttatgctgtctggcgaaagtgcgaaaggtaaatacccgctggaatccgttaccattatggcgacgatctgtcagcgcaccgattccgtgatgaaaagccgtctggataccatcaagacaccaggaatactgcgtatcactgaagccgtctgccgtggtgcagtagaaaccgcagaaaaactggatgcaccgctgattgtggttgcgaccagcggcggcaagtcagccaaatcgatccgtaaatacttcccgaatgcgcgcattctggcgctgacgactaacgaagtcaccgcgcgccagcttctgctgagcaaaggcattgatacgctgctggtgaaggaaatcgcctctactgatgatttctaccgcattggtaaagaagccgcgctgaagaccggtcatgcgcaagctggtgatgttgtggtgatggtatctggtgcactggtttccagcggcacaaccaacactgcttccgtacatcgtctctga

SEQ ID NO: 15757 - protein, 470 aa, Erwinia carotovora subsp. atroseptica SCRI1043
MKKTKIVCTIGPKTESEEMLGNLLSAGMNVMRLNFSHGDYVEHGQRIKNLRAVMEKTGQQAAILLDTKGPEIRTMKLENGADVTLTAGQTFTFTTDQSIVGNKDRVAVTYAGFTEDLSVGNTVLVDDGLIGMQVTAVSGNDVVCKVLNNGDLGENKGVNLPGVSIQLPALAEKDKRDLIFGCEQGVDFVAASFIRKRSDVEEIRAHLKAHGGEHIQIISKIENQEGLNNFDEILEASDGIMVARGDLGVEIPVEEVIFAQKMMIEKCNLARKVVITATQMLDSMIKNPRPTRAEAGDVANAIIDGTDAVMLSGESAKGKYPLESVTIMATICQRTDSVMKSRLDTIKTPGILRITEAVCRGAVETAEKLDAPLIVVATSGGKSAKSIRKYFPNARILALTTNEVTARQLLLSKGIDTLLVKEIASTDDFYRIGKEAALKTGHAQAGDVVVMVSGALVSSGTTNTASVHRL

SEQ ID NO: 15758 - DNA, 1437 bp, Mesoplasma florum L1
  CDS (1)..(1437): transl_table=4
atgaacaagaaagaattacaagcacgtgtaaaacgtactaaaattattactacaactggtccatcaacaaatgaaccagaacaaataagagaattatttgaaaatggaatgacaacaatacgtttaaatttttcacatggtgattatgaagaacaaggttacagaattgctggagctaaaaaagttagagaagaattaggaaaacctgtttctattttattagatacaaaagggcctgaaattcgtgttggtaaatttgtagatggaaaacaagaagttactgcaaatcaatcaattacaatttacacagatgctgaatcattcaaaaacaaagaatgtttatcaggagaaatgactgttgcttatgacatgtcagttgatttaaaaattggtgatacaattttaatcgatgatggtaaattagaaatgactgttgaagaagttaaaccaggtgttgttaaagctatcgctttcaataaccacttagtaaaaactaacaaacgtgttaacttaccaggtgttgatttctcaatgccattcttagctcaaaaagatatcaatgatattaaatatggagttgaacaaggtgttgactacatcgctgcatcatttgttaactcagctgaaaatgtaaaagaaattcgtgatattttagcagaagctaatggatcagatattcaaattatttcaaaaattgaatcacaagttggaattgacaacattgatgcaattattgaagcatcagatggaattatgattgctcgtggtgacttaggattagaaattccttactacgacgtaccatactgagaaaaaataatgatcagaaaatgtcgtgaagctggtaaagttgttattgttgctactcaaatgttagaaacaatgacagaaaacccagcacctacaagagctgaagtaactgacgtttactttgctactgaattaggagcagatgcaacaatgttatctggagaatcagcagctggagattacccattcattactgttaacacaatggcaacaatcaacaaacgtgctgaaatagaattctacaaaaaagcatactaccaaactcaattagaaaacgctaaaaactcaactagtggaccacgtgcagatattgcaatggacttagctgaaagaactcgtgatggacaatatgaatttgctgttgttttatcaagaactggagctttattaaaaactatttctaaatttagaccaaatgtaacaattttaggtgtaagtgaatcagaaagattatgaactgcatttggtgtatgacactcaatcttcatgaacaaaactgctaacttattagaattagaagaaaatgttgctcaaatctcagaaattgcaaaattatgaggtgcaaaatcaggatcaaaaatcttagttgtaagaaacaaagatattcgtgaaattacagtagcttaa

SEQ ID NO: 15759 - protein, 478 aa, Mesoplasma florum L1
MNKKELQARVKRTKIITTTGPSTNEPEQIRELFENGMTTIRLNFSHGDYEEQGYRIAGAKKVREELGKPVSILLDTKGPEIRVGKFVDGKQEVTANQSITIYTDAESFKNKECLSGEMTVAYDMSVDLKIGDTILIDDGKLEMTVEEVKPGVVKAIAFNNHLVKTNKRVNLPGVDFSMPFLAQKDINDIKYGVEQGVDYIAASFVNSAENVKEIRDILAEANGSDIQIISKIESQVGIDNIDAIIEASDGIMIARGDLGLEIPYYDVPYWEKIMIRKCREAGKVVIVATQMLETMTENPAPTRAEVTDVYFATELGADATMLSGESAAGDYPFITVNTMATINKRAEIEFYKKAYYQTQLENAKNSTSGPRADIAMDLAERTRDGQYEFAVVLSRTGALLKTISKFRPNVTILGVSESERLWTAFGVWHSIFMNKTANLLELEENVAQISEIAKLWGAKSGSKILVVRNKDIREITVA

SEQ ID NO: 15760 - DNA, 1434 bp, Propionibacterium acnes KPA171202; identical to SEQ ID NO: 8521
  CDS (1)..(1434): transl_table=11

SEQ ID NO: 15761 - protein, 477 aa, Propionibacterium acnes KPA171202; identical to SEQ ID NO: 8522

SEQ ID NO: 15762 - DNA, 1467 bp, Leifsonia xyli subsp. xyli str. CTCB07; identical to SEQ ID NO: 8523
  CDS (1)..(1467): transl_table=11

SEQ ID NO: 15763 - protein, 488 aa, Leifsonia xyli subsp. xyli str. CTCB07; identical to SEQ ID NO: 8524

SEQ ID NO: 15764 - DNA, 1746 bp, Desulfotalea psychrophila LSv54; identical to SEQ ID NO: 8525
  CDS (1)..(1746): transl_table=11

SEQ ID NO: 15765 - protein, 581 aa, Desulfotalea psychrophila LSv54; identical to SEQ ID NO: 8526

SEQ ID NO: 15766 - DNA, 1755 bp, Symbiobacterium thermophilum IAM 14863; identical to SEQ ID NO: 8529
  CDS (1)..(1755): transl_table=11

SEQ ID NO: 15767 - protein, 584 aa, Symbiobacterium thermophilum IAM 14863; identical to SEQ ID NO: 8530

SEQ ID NO: 15768 - DNA, 1758 bp, Bacillus licheniformis ATCC 14580
  CDS (1)..(1758): transl_table=11
atgagaaagactaaaatagtttgtacaattggaccggccagcgaaagtgttgaaaagctcacccagctgatggaagccggaatgaacgtggcgcgcctgaacttttcccatggagatttcgaagagcacggcgcaagaattaaaaacattcgtgaagcagccggcaagctgggaaaagatatcggcatccttcttgacacgaaagggcctgaaatccgcacgcacacaatggaaaacggttcgatcgaactggcagcgggttctcagctgatcgtttcaatggacgaagtcatcggtacgcctgataaaatctcagttacatatgatgggttgattcacgatgtgtcagtcggttcaacgattttgcttgacgatggattggtcggacttgaagtcactgacataaacaaggacaagcgtgaaatcgtcacgaaagtgatgaacagcggaacgttgaaaaacaaaaaaggcgtgaatgtgccgggcgtcagcgtcaatcttccgggaattacggaaaaagatgcaaacgacatcgtattcggcatcgagcagggcgttgatttcatcgcggcatcctttgtgcgccgtccgtcggatgtccttgaaatccgcgaacttcttgaagagcacaatgcggcagatattcaaatcattccaaaaatcgaaaaccaggaaggcgttgacaacatcgatgccattcttgaagtatcagacggtctgatggttgcgcgtggagacctgggtgtagaaatccctgccgaagaagtgccgctcgttcaaaaagaactgatcaaaaaatgcaatgcgcttggcaagcctgtcatcacggctacccaaatgctcgacagcatgcagcgcaatccgcgcccgacacgcgcggaagcgagcgacgttgccaatgcgatctttgacggaactgacgcaatcatgctttcaggtgaaacggcagcgggaaattatcctgttgaagccgttcagacgatgcacaatatcgcttcccgttcagaagaagcgctcaaccataaaaagatcctttccgcacgaagcaagcaagtcagcatgtcaattacggatgcgatcggccaatctgtggcgcatacggcaatcaaccttgatgtgaatgccatcgtcacaccgacggaaagcggccatacggcgagaatgatttccaaatatcgcccgcaggcgccgattgtcgcagttacggtaaacgatgcggtgtcaagaaagctgtcacttgtgttcggggttttcgcaacaagcggacaaaaccacagctccactgacgaaatgcttgaaaaagcggtgcaaaaatctctcgatacaggcatcgtacgccacggcgacttgatcgttatcacggccggagctgtcggtgaagccggtacaacaaacttgatgaaagtgtatgttgtcggagacgtggtcgcaaaaggccagggcatcggacgcaaatccgcatttggtgaagtggtcatcgctcaaaacgcacaagaagcggccaaaaaaatgaaagatggcgccgttttagttacaaaaagcacggatcgtgacatgatggcatcccttgaaaaagccggctgcgctgattacggaagaaggcggcttaacaagccacgcgcagtcgtaggcttaagcctcggcatccctgtcatcgtcggaatggaaaatgcgacttccattctgaaagagggagaagacatcacggtcgactccgcccgcggagctgtatacaaaggacgtgcaagcgtgctttaa

SEQ ID NO: 15769 - protein, 585 aa, Bacillus licheniformis ATCC 14580
MRKTKIVCTIGPASESVEKLTQLMEAGMNVARLNFSHGDFEEHGARIKNIREAAGKLGKDIGILLDTKGPEIRTHTMENGSIELAAGSQLIVSMDEVIGTPDKISVTYDGLIHDVSVGSTILLDDGLVGLEVTDINKDKREIVTKVMNSGTLKNKKGVNVPGVSVNLPGITEKDANDIVFGIEQGVDFIAASFVRRPSDVLEIRELLEEHNAADIQIIPKIENQEGVDNIDAILEVSDGLMVARGDLGVEIPAEEVPLVQKELIKKCNALGKPVITATQMLDSMQRNPRPTRAEASDVANAIFDGTDAIMLSGETAAGNYPVEAVQTMHNIASRSEEALNHKKILSARSKQVSMSITDAIGQSVAHTAINLDVNAIVTPTESGHTARMISKYRPQAPIVAVTVNDAVSRKLSLVFGVFATSGQNHSSTDEMLEKAVQKSLDTGIVRHGDLIVITAGAVGEAGTTNLMKVYVVGDVVAKGQGIGRKSAFGEVVIAQNAQEAAKKMKDGAVLVTKSTDRDMMASLEKAGCADYGRRRLNKPRAVVGLSLGIPVIVGMENATSILKEGEDITVDSARGAVYKGRASVL

SEQ ID NO: 15770 - DNA, 1581 bp, Mannheimia succiniciproducens MBEL55E; identical to SEQ ID NO: 8531
  CDS (1)..(1581): transl_table=11

SEQ ID NO: 15771 - protein, 526 aa, Mannheimia succiniciproducens MBEL55E; identical to SEQ ID NO: 8532

SEQ ID NO: 15772 - DNA, 1449 bp, Azoarcus sp. EbN1
  CDS (1)..(1449): transl_table=11
atgccacgccacaccaagatcgtcgccactctcggccccgcctcgtccgacccgcaggtgcttgaacgcatggttcacgccggcgtcgacgtggtgcggatgaatttctcgcacggcaaggcggaggatcacgtcgcgcgggccgaggcgatccgcgaagcggcatcgctggcgggccggccggtcggcattctcgccgacctgcagggacccaagatccgtgtcggcaagttcgccgaagggcaggtcgaactgcagcgcgatgccggattcatcctcgatgcgcgctgcgagctgggcaacgccgagcgggtcgggctcgactacaaggacctgccgaaggacgtcaaggccggcgacgtgctgctgctcgacgacggacggctgaagctgacggtcacgcgcgtcatcggccacgagatccacaccgtcgtcaaggtcggcggcacgctgtcgaacaacaagggcatcaaccgccagggcggcggcctgactgcgcccgcactgaccgcgaaggacatggacgacatcaagacggcggcgaagatcggcgtcgatttcgtcgcggtgtcgttcccgaaaagcgcagccgacatgtacatggcgcgccagctgatgcgcgcgtcgggagtcgatgcgctgctgatcgcgaagatcgagcgcaccgaagcggtcgcgaacctcgacgagatcctcgatgcatccgacggcatcatggtcgcgcgcggcgatctcgcggtcgaagtgggggacgccgcagtgccggcgctgcagaagaagatgatccgtgcggcacgggaccgcaacaagctgacgatcaccgcgacgcagatgatggagtcgatgatcacgagtccggtgccgacgcgcgccgaagtctccgacgtcgccaacgcggtgctcgacggcaccgacgcggtgatgctgtcggccgaaaccgcgtccggcaggttccccgtcgaagtcgtcgaagcgatgagccgcgtgtgcctcgaagccgagaagtcgtccgacgtggcgctcgaccgcgacgtgctgaaccgcgtcttcacgcgcatcgaccagtcgatcgcgatggcggcgatctggacggcgtggcatctcaaggtcaaggcgatcgcgtcgctgacgcagaccggctcgaccgcactatggatgagccgcctcaacagcggagtgccgatctacgcgctcactcccgaagcgagcgcgcgcaaccagatgacgctgtatcgcgaagtgttcccgctgctgatgtcgcagacgcatcaggatcgcgacgtgctgctgtgggaggccgagcagatcctgatcgaccagggcgtcgccgagcgcggcgacctgatcgtgctgacgatcggcgagccgatcggcgcatccggcggcaccaacacgctgaagatcgtccgcgtcggcgaacatccgccgccgcacgtcaccgaccagtaa

SEQ ID NO: 15773 - protein, 482 aa, Azoarcus sp. EbN1
MPRHTKIVATLGPASSDPQVLERMVHAGVDVVRMNFSHGKAEDHVARAEAIREAASLAGRPVGILADLQGPKIRVGKFAEGQVELQRDAGFILDARCELGNAERVGLDYKDLPKDVKAGDVLLLDDGRLKLTVTRVIGHEIHTVVKVGGTLSNNKGINRQGGGLTAPALTAKDMDDIKTAAKIGVDFVAVSFPKSAADMYMARQLMRASGVDALLIAKIERTEAVANLDEILDASDGIMVARGDLAVEVGDAAVPALQKKMIRAARDRNKLTITATQMMESMITSPVPTRAEVSDVANAVLDGTDAVMLSAETASGRFPVEVVEAMSRVCLEAEKSSDVALDRDVLNRVFTRIDQSIAMAAIWTAWHLKVKAIASLTQTGSTALWMSRLNSGVPIYALTPEASARNQMTLYREVFPLLMSQTHQDRDVLLWEAEQILIDQGVAERGDLIVLTIGEPIGASGGTNTLKIVRVGEHPPPHVTDQ

SEQ ID NO: 15774 - DNA, 1755 bp, Bacillus clausii KSM-K16; identical to SEQ ID NO: 8537
  CDS (1)..(1755): transl_table=11

SEQ ID NO: 15775 - protein, 584 aa, Bacillus clausii KSM-K16; identical to SEQ ID NO: 8538

SEQ ID NO: 15776 - DNA, 1437 bp, Thermococcus kodakarensis KOD1
  CDS (1)..(1437): transl_table=11
atgcggctcccaggacagaaaaccaagataatagccaccctaggtcctgcgtctctcaacgaaaagaccataacggcaatggttcgagcggggatgagtgttgcaaggataaacttcgcccacggtgatctgaaacagcacgagaagtcgataaaactcgtgagaaaggtctctgagaggctcaacaggcccgttgcaattctcggagacctgcccggagtgaagatccgcgttggtgagattgagggcggctcagtgacgctgagacgctggcagacggtaacccttaccacgagggacgtaatcggcaacgaggccgttatacccgttgagttcaaggactttccaaggctcgtctcgaagggggacgtcatctatctcagcgacggtttcatagcgctaagggttgaagacgtcagggaccaggatgtcatctgtaaggtgctcgtcggaggaactctcttctcccgcaaaggaatcaacattcccaaggctcgcctggctatcgaagcaataaccgagaaggatttagaattcctggagttctctctggagcacggagttgacgccgtcggcataagcttcgtcggttccgcctacgacgttctaaaggcaaggcgattcgtcgaggaaaggaacggcaagctgttcctgatagccaaaatagaaaggcccgacgcggtgagaaacttcgacgagattctcagggcggcggacggggtcatggtagccaggggagacctcggagtggagatgcccatagaaaagctcccgattctccagaaaaagcttatccaaaaggcaaactgtgcgggaaagcccgtgataacagcgactcagatgctagagagcatgacccacgagaagctcccaacgagggctgaggtcaccgatgttgcgaacgcaatccttgatggaaccgacgccgtgatgctctccgaggagacggcggtcggaaagtacccggttgagaccgtcaaaatgatggccaggatagcgaagactaccgaggcatacagggactccaaatgggctgaaagaaccgtcgaatggaagatgagtgagttgaggggtacacggccgacaaagggtaccataaaggacgcaataacgaggagtataatagaggccctgaactccatagacattaaatacatactaacaccgaccaggatgggacaaactgcgaggctaatagcccgttttaagccaaagcagtgggtactggcatttgtaactgatgaatgggtcaaaaacactctgatgttctcctacggcgtttatccgttcctcgttgaggacaccagcgaagaggagatactgcgcgtgataaccgggctcggactggtagatgagggcgatacggtacttctgacgaagggaacgcccataggaaagaccgcggggacgaacaccatccgcatcttcaacgtttga

SEQ ID NO: 15777 - protein, 478 aa, Thermococcus kodakarensis KOD1
MRLPGQKTKIIATLGPASLNEKTITAMVRAGMSVARINFAHGDLKQHEKSIKLVRKVSERLNRPVAILGDLPGVKIRVGEIEGGSVTLRRWQTVTLTTRDVIGNEAVIPVEFKDFPRLVSKGDVIYLSDGFIALRVEDVRDQDVICKVLVGGTLFSRKGINIPKARLAIEAITEKDLEFLEFSLEHGVDAVGISFVGSAYDVLKARRFVEERNGKLFLIAKIERPDAVRNFDEILRAADGVMVARGDLGVEMPIEKLPILQKKLIQKANCAGKPVITATQMLESMTHEKLPTRAEVTDVANAILDGTDAVMLSEETAVGKYPVETVKMMARIAKTTEAYRDSKWAERTVEWKMSELRGTRPTKGTIKDAITRSIIEALNSIDIKYILTPTRMGQTARLIARFKPKQWVLAFVTDEWVKNTLMFSYGVYPFLVEDTSEEEILRVITGLGLVDEGDTVLLTKGTPIGKTAGTNTIRIFNV

SEQ ID NO: 15778 - DNA, 1458 bp, Bacteroides fragilis NCTC 9343
  CDS (1)..(1458): transl_table=11
atgttgctgaaacagactaaaatcgtagcttccatctcagacagacgttgcgatgtagattttataaaagagttgtttgatgcagggatgaatgtggttcgtatgaacacagcccacgccagtcgtgaaggttttgaggcgttgattgccaatgtgcgtgccgtatccaatcgcattgccatccttatggataccaagggaccggaagtgcgtaccactgccaatgcggaccccatactttatcagatcggtgagaaagttaaaatcgtaggagatcccgatcgtgagactacccgtgaatgcattgccgtttcatatccgaattttgtgcatgacctgaatgtaggggggactattttgatagatgatggtgaccttgaattgcgagttattgataaaacaaccgaatacttactttgtgaagtccagaacgaggcaactttggggagccgtaagagtgtaaacgttccgggtgttcgtatcaatctcccctctttaaccgagaaagatcgtaataacatcctttatgccatagagaaagatatcgatttcattgctcattcttttgtgcgtaaccgccaggatgtgcttgatatccgtggaatactggacgctcacaatagtgatatccgcattattgccaagatcgaaaatcaggaaggtgtcgataacattgatgagatcctggaagttgccgatggagtaatggtagctcgtggtgacttgggtattgaagtaccgcaggaacgtattccgggaattcagcgtatgttgatacgcaaatgtatccttgccaaaaaaccggtaatcgtggcaacacaaatgttgcatacgatgattaataatccacgtccgactcgtgcggaagtaaccgatattgccaatgcaatctattatcgtacagacgctttgatgttgagtggtgagactgcctatggcaaatatcctgtagaggccgtgaaaacgatgactaagattgctgcacaggctgagaaggacaagttggaggagaatgacattcgcattcctttggacgaaaacagtaatgatgtcacagctttccttgctaaacaagctgtaaaagcaactactaagctaaagatacgtgccatcattacggatagctatcaggggcgtactgcacgcaatttagcagctttccgtggtaaatatccggtacttgcaatttgttataaggagaagactatgcgtcaccttgcactttcttatggtgtggaagcgatttatatgcctgaacttgccaacgggcaggagtactattttgcagctctgcgccgtttgttgaaagaaggacgtttgcatccaactgatatggtgggttatctgagtagcggtaaagccggaacgcagacttctttcctcgaaatcaatgtcgtggaagatgctttgaagcatgccggtgatagtgtgttgcctaatagcaaccgttatttataa

SEQ ID NO: 15779 - protein, 485 aa, Bacteroides fragilis NCTC 9343
MLLKQTKIVASISDRRCDVDFIKELFDAGMNVVRMNTAHASREGFEALIANVRAVSNRIAILMDTKGPEVRTTANADPILYQIGEKVKIVGDPDRETTRECIAVSYPNFVHDLNVGGTILIDDGDLELRVIDKTTEYLLCEVQNEATLGSRKSVNVPGVRINLPSLTEKDRNNILYAIEKDIDFIAHSFVRNRQDVLDIRGILDAHNSDIRIIAKIENQEGVDNIDEILEVADGVMVARGDLGIEVPQERIPGIQRMLIRKCILAKKPVIVATQMLHTMINNPRPTRAEVTDIANAIYYRTDALMLSGETAYGKYPVEAVKTMTKIAAQAEKDKLEENDIRIPLDENSNDVTAFLAKQAVKATTKLKIRAIITDSYQGRTARNLAAFRGKYPVLAICYKEKTMRHLALSYGVEAIYMPELANGQEYYFAALRRLLKEGRLHPTDMVGYLSSGKAGTQTSFLEINVVEDALKHAGDSVLPNSNRYL

SEQ ID NO: 15780 - DNA, 1434 bp, Corynebacterium glutamicum ATCC 13032; identical to SEQ ID NO: 8543
  CDS (1)..(1434): transl_table=11

SEQ ID NO: 15781 - protein, 477 aa, Corynebacterium glutamicum ATCC 13032; identical to SEQ ID NO: 8544

SEQ ID NO: 15782 - DNA, 1452 bp, Pseudomonas fluorescens Pf-5
  CDS (1)..(1452): transl_table=11
atgtccgttcgtcgtaccaaaatcgttgccacccttggcccggccagtaactcgccggaagttctcgaacagctgattctcgcgggcctggatgttgcccgtctgaacttctcccacggcactccggacgagcacaaggctcgcgccaaactggtccgcgacctggcagccaagcacggccgcttcgtggccatcctcggcgacctgcagggcccgaagatccgcatcgccaaattcgccaacaagcgcatcgagctgaagatcggtgacaagttcaccttctccaccagccatccgctgaccgaaggcacccaggatatcgtcggcatcgactacccggatctggtcaaggactgcggcgtgggcgacgagctgctgctggacgacggccgcgtggtgatgcgtgtggaaaccgccaccgccaccgagctgcattgcgtggtgaccatcggcggcccgctgtccgaccacaagggcatcaaccgtcgtggtggtggcctgaccgctccggccctgaccgagaaagacaaggccgacatcaagctcgcggccgagatggaagtcgattacctggccgtgtccttcccacgggacgccgccgacatggaatacgcgcgcaagctgcgtgacgaagccggtggtactgcctggctggtagcgaagatcgaacgcgcggaagcggtggccgacgacgaaaccctcgacggcctgatcaaggccagcgacgcggtcatggttgcccgtggcgacctgggcgtggaaatcggcgacgccgagctggtgggcatccagaagaaaatcattctgcacgcccgtcgccacaacaaggcggtgatcgttgcgacccagatgatggagtcgatgatccagaacccgatgccgacccgcgccgaagtgtccgacgtggccaacgccgtgctcgactacaccgatgcggtgatgctctcggcggaaagcgcagccggtgcctacccgctggaagcggtgcaggccatggcgcggatctgcgtcggtgcggaaaagcaccccaccagcaagacctccagccaccgcatgggcaaggtgttcgaaagctgcgaccagagcatcgccctggctgccatgtacaccgccaaccacttcccgggcgtgaaggcgatcatcgccctgaccgaaagtggctacaccccgctgatcatgtcgcgcattcgctcctcggtgccgatctacgcctactccccgcaccgcgaaacccaggctcgcgcagccatgttccgtggcgtctacaccatcccgttcgatccggcttccctgccgcccgagcaggtcagccaggcagcgatcgatgagctgctcaagcgcggtgtcgtagagaaaggcgactgggtgattctcaccaagggcgacagctaccacaccaccggcggcaccaacggcatgaagatcctgcacgtgggcgacccgatggtctga

SEQ ID NO: 15783 - protein, 483 aa, Pseudomonas fluorescens Pf-5
MSVRRTKIVATLGPASNSPEVLEQLILAGLDVARLNFSHGTPDEHKARAKLVRDLAAKHGRFVAILGDLQGPKIRIAKFANKRIELKIGDKFTFSTSHPLTEGTQDIVGIDYPDLVKDCGVGDELLLDDGRVVMRVETATATELHCVVTIGGPLSDHKGINRRGGGLTAPALTEKDKADIKLAAEMEVDYLAVSFPRDAADMEYARKLRDEAGGTAWLVAKIERAEAVADDETLDGLIKASDAVMVARGDLGVEIGDAELVGIQKKIILHARRHNKAVIVATQMMESMIQNPMPTRAEVSDVANAVLDYTDAVMLSAESAAGAYPLEAVQAMARICVGAEKHPTSKTSSHRMGKVFESCDQSIALAAMYTANHFPGVKAIIALTESGYTPLIMSRIRSSVPIYAYSPHRETQARAAMFRGVYTIPFDPASLPPEQVSQAAIDELLKRGVVEKGDWVILTKGDSYHTTGGTNGMKILHVGDPMV

SEQ ID NO: 15784 - DNA, 1452 bp, Colwellia psychrerythraea 34H; identical to SEQ ID NO: 8547
  CDS (1)..(1452): transl_table=11

SEQ ID NO: 15785 - protein, 483 aa, Colwellia psychrerythraea 34H; identical to SEQ ID NO: 8548

SEQ ID NO: 15786 - DNA, 1434 bp, Dechloromonas aromatica RCB; identical to SEQ ID NO: 8549
  CDS (1)..(1434): transl_table=11

SEQ ID NO: 15787 - protein, 477 aa, Dechloromonas aromatica RCB; identical to SEQ ID NO: 8550

SEQ ID NO: 15788 - DNA, 1434 bp, Thiobacillus denitrificans ATCC 25259; identical to SEQ ID NO: 8555
  CDS (1)..(1434): transl_table=11

SEQ ID NO: 15789 - protein, 477 aa, Thiobacillus denitrificans ATCC 25259; identical to SEQ ID NO: 8556

SEQ ID NO: 15790 - DNA, 1431 bp, Anabaena variabilis ATCC 29413
  CDS (1)..(1431): transl_table=11
atgcgtcgaactaaaattatctgtactgtaggcccggctacatctgcaccagaacgtttagaagcgttggtagaagctgggatgaatgtagcgcggctgaatttttctcatggggcttatgatttccatgcccaaactgctcagtatttgcggcaaatcagtgctgatagacaaaagcctgttgctattatgcaagacctatgtgggccgaagattcgcttgggaacactaccaccagaagggttaacggtagaagctggtcaggaagtgacttttgtcttgcaagaaaagggtaatagtctggatgaattgcctttaccgttgccgactttgtttgcaatggtacgccctggggaaccaatcttaattaatgatggtcgtgtgaagttgattgtgaccgatcgcgatgccgatcgcattcgagctattgccaaaatcgggggtcttctttccacgcgtaagggtgttaacttgccagccactcgtttacccgttagttccatcaccgaaaaggacttgcaggatttacgttttggtattgagttaggtgtggattgggtagcggtgtcctttgtgcgatcgccttatgacctcgaaccagcccaacggatgattgaagcggctgggaaaaccatccgagtgattgccaaaatcgaacgtccagaggcagttgagcaaattgattctatcatcgacgtggctgatgccattatgattgctcgtggtgatttgggtgtagaaatgcctatccacgaagtacccctgattcaaaaggacatcattcgccgttgcaaccaagctggtaagcctgtaattacagcaacgcaaatgctggagtcgatgattagcgctcctgatcccacccgtgcagaagctaccgacgttgctaactctattctcgatggtacggatgcggtcatgctatctggggaaacggctgtgggacaatatcccgtcgccgccgtccagactatgcacgatatcgctacgactacagaaaagtctttgcaagagggtagtaaaaattgtttatcccatgaagcaggtggtctgagcgtcaccgaatctgtagctgaagctgtctgtcgtatcgcctacgaaacaggtgcaaaagcgattctttgcaacaccacatctgggagtacagcaaaactcgtgtcgaaatatcgtccgactacaccaatttttgctttgactcccgacgaaaccgcctaccatcaattagcactttcctggggtgtggaacctttattaactccaccagtccacaatgcggaagaaatgtttatgaatctcataaacaccgcagtgagaacgggtttggtgcatgacggtgacaaggtagttattacttctggagtgccaattggtaaatcaggcacaactagtttaattaaagtgcattctattggacaaccaatcaccgcctaa

SEQ ID NO: 15791 - protein, 476 aa, Anabaena variabilis ATCC 29413
MRRTKIICTVGPATSAPERLEALVEAGMNVARLNFSHGAYDFHAQTAQYLRQISADRQKPVAIMQDLCGPKIRLGTLPPEGLTVEAGQEVTFVLQEKGNSLDELPLPLPTLFAMVRPGEPILINDGRVKLIVTDRDADRIRAIAKIGGLLSTRKGVNLPATRLPVSSITEKDLQDLRFGIELGVDWVAVSFVRSPYDLEPAQRMIEAAGKTIRVIAKIERPEAVEQIDSIIDVADAIMIARGDLGVEMPIHEVPLIQKDIIRRCNQAGKPVITATQMLESMISAPDPTRAEATDVANSILDGTDAVMLSGETAVGQYPVAAVQTMHDIATTTEKSLQEGSKNCLSHEAGGLSVTESVAEAVCRIAYETGAKAILCNTTSGSTAKLVSKYRPTTPIFALTPDETAYHQLALSWGVEPLLTPPVHNAEEMFMNLINTAVRTGLVHDGDKVVITSGVPIGKSGTTSLIKVHSIGQPITA

SEQ ID NO: 15792 - DNA, 1752 bp, Carboxydothermus hydrogenoformans Z-2901; identical to SEQ ID NO: 8561
  CDS (1)..(1752): transl_table=11

SEQ ID NO: 15793 - protein, 583 aa, Carboxydothermus hydrogenoformans Z-2901; identical to SEQ ID NO: 8562

SEQ ID NO: 15794 - DNA, 1443 bp, Geobacter metallireducens GS-15; identical to SEQ ID NO: 8563
  CDS (1)..(1443): transl_table=11

SEQ ID NO: 15795 - protein, 480 aa, Geobacter metallireducens GS-15; identical to SEQ ID NO: 8564

SEQ ID NO: 15796 - DNA, 1794 bp, Prochlorococcus marinus str. MIT 9312; identical to SEQ ID NO: 8565
  CDS (1)..(1794): transl_table=11

SEQ ID NO: 15797 - protein, 597 aa, Prochlorococcus marinus str. MIT 9312; identical to SEQ ID NO: 8566

SEQ ID NO: 15798 - DNA, 1749 bp, Moorella thermoacetica ATCC 39073; identical to SEQ ID NO: 8569
  CDS (1)..(1749): transl_table=11

SEQ ID NO: 15799 - protein, 582 aa, Moorella thermoacetica ATCC 39073; identical to SEQ ID NO: 8570

SEQ ID NO: 15800 - DNA, 1428 bp, Syntrophus aciditrophicus SB; identical to SEQ ID NO: 8571
  CDS (1)..(1428): transl_table=11

SEQ ID NO: 15801 - protein, 475 aa, Syntrophus aciditrophicus SB; identical to SEQ ID NO: 8572

SEQ ID NO: 15802 - DNA, 1437 bp, Francisella tularensis subsp. holarctica; identical to SEQ ID NO: 8577
  CDS (1)..(1437): transl_table=11

SEQ ID NO: 15803 - protein, 478 aa, Francisella tularensis subsp. holarctica; identical to SEQ ID NO: 8578

SEQ ID NO: 15804 - DNA, 1734 bp, Desulfitobacterium hafniense Y51; identical to SEQ ID NO: 8579
  CDS (1)..(1734): transl_table=11

SEQ ID NO: 15805 - protein, 577 aa, Desulfitobacterium hafniense Y51; identical to SEQ ID NO: 8580

SEQ ID NO: 15806 - DNA, 1443 bp, Saccharophagus degradans 2-40; identical to SEQ ID NO: 8581
  CDS (1)..(1443): transl_table=11

SEQ ID NO: 15807 - protein, 480 aa, Saccharophagus degradans 2-40; identical to SEQ ID NO: 8582

SEQ ID NO: 15808 - DNA, 1443 bp, Methylobacillus flagellatus KT; identical to SEQ ID NO: 8583
  CDS (1)..(1443): transl_table=11

SEQ ID NO: 15809 - protein, 480 aa, Methylobacillus flagellatus KT; identical to SEQ ID NO: 8584

SEQ ID NO: 15810 - DNA, 1440 bp, Ralstonia metallidurans CH34; identical to SEQ ID NO: 8585
  CDS (1)..(1440): transl_table=11

SEQ ID NO: 15811 - protein, 479 aa, Ralstonia metallidurans CH34; identical to SEQ ID NO: 8586

SEQ ID NO: 15812 - DNA, 1530 bp, Acidobacteria bacterium Ellin345; identical to SEQ ID NO: 8587
  CDS (1)..(1530): transl_table=11

SEQ ID NO: 15813 - protein, 509 aa, Acidobacteria bacterium Ellin345; identical to SEQ ID NO: 8588

SEQ ID NO: 15814 - DNA, 1434 bp, Myxococcus xanthus DK 1622; identical to SEQ ID NO: 8591
  CDS (1)..(1434): transl_table=11

SEQ ID NO: 15815 - protein, 477 aa, Myxococcus xanthus DK 1622; identical to SEQ ID NO: 8592

SEQ ID NO: 15816 - DNA, 1434 bp, Rubrobacter xylanophilus DSM 9941; identical to SEQ ID NO: 8593
  CDS (1)..(1434): transl_table=11

SEQ ID NO: 15817 - protein, 477 aa, Rubrobacter xylanophilus DSM 9941; identical to SEQ ID NO: 8594

SEQ ID NO: 15818 - DNA, 1437 bp, Mesorhizobium sp. BNC1; identical to SEQ ID NO: 8595
  CDS (1)..(1437): transl_table=11

SEQ ID NO: 15819 - protein, 478 aa, Mesorhizobium sp. BNC1; identical to SEQ ID NO: 8596

SEQ ID NO: 15820 - DNA, 1413 bp, Cytophaga hutchinsonii ATCC 33406; identical to SEQ ID NO: 8597
  CDS (1)..(1413): transl_table=11

SEQ ID NO: 15821 - protein, 470 aa, Cytophaga hutchinsonii ATCC 33406; identical to SEQ ID NO: 8598

SEQ ID NO: 15822 - DNA, 1404 bp, Clostridium perfringens ATCC 13124
  CDS (1)..(1404): transl_table=11
atgagaagaacaaaattagtatgcactatcggaccagctagtgaaaacgaagaaatcttaacaaaaataatcgaagcaggtatgaacgcttcaagacacaatttctcacatggtgaccatgaagaacataaaggaagaatggttaaagtaagagaaatatcaaaaaaattaggtaaagaagtagctatattattagatactaaaggacctgaaataagaactggaaaattcgagccaagcaaagttgaattaactgctggaactgaatttactatatatgctggagcagaagacgtaataggagacactactaagtgttcagttacatatgctggattagctaaagacgttaaagctggagatactatcttaatagacgacggtttagttggattagaagttgtatctgtagaaggaaacgctgttaaatgtgtagtaagaaacactggattagttggaactcacaaaggagttaacgttcctggagtatcaataaaattaccagctatgactgataaagatagagctgacttaatattcggttgtgaaatgggcgttaacatggttgctgcttcattcataagaaaagcagaagacgttaaagctataagagaagtattaattgctaacggtggagctgatatacaaatattctcaaaaatcgaaaaccaagaaggtgttgataacatagatgctatcatcgaagcttcagacggtatcatggtagctagaggagaccttggtgttgaaataccaatggaagacgttccttcagttcaaaaaatgatcatcgaaaaatgtaacaatgctggaaaaccagttataactgctactcaaatgttagactcaatgatgagaaacccaagaccaacaagagctgaggtttcagacgtaactaacgctatcttagatggtactgatgctatcatgttaagtggtgagtcagctaacggaagctggccagtagaagctgttgaaactatggttaaaatagctactaaatcagaagaaatgttaagctacgaattagcttcatcaaaagctaaaaaacatataccagctgtaccaggagttatctcaagagctgcttgtaatgctgcacacgagttaaaatcagctgctatagtttcattaactcaatcaggagctactgctaagagaatatctcaatgcagaccagatgcaccaatcgttactgtaactccaaatgaaagagttgctaagaaagttgctttatgcttcggagtttacccagttgttgctgaaaatgctacaatggaaaacgctgttgaaatagctaaaaatgctggattcgttaaagctaatgacactgctgtagttgttgcaggtgtaccagctaacgaaggaaacactaacatagtaaaagttgaagttgtaaaataa

SEQ ID NO: 15823 - protein, 467 aa, Clostridium perfringens ATCC 13124
MRRTKLVCTIGPASENEEILTKIIEAGMNASRHNFSHGDHEEHKGRMVKVREISKKLGKEVAILLDTKGPEIRTGKFEPSKVELTAGTEFTIYAGAEDVIGDTTKCSVTYAGLAKDVKAGDTILIDDGLVGLEVVSVEGNAVKCVVRNTGLVGTHKGVNVPGVSIKLPAMTDKDRADLIFGCEMGVNMVAASFIRKAEDVKAIREVLIANGGADIQIFSKIENQEGVDNIDAIIEASDGIMVARGDLGVEIPMEDVPSVQKMIIEKCNNAGKPVITATQMLDSMMRNPRPTRAEVSDVTNAILDGTDAIMLSGESANGSWPVEAVETMVKIATKSEEMLSYELASSKAKKHIPAVPGVISRAACNAAHELKSAAIVSLTQSGATAKRISQCRPDAPIVTVTPNERVAKKVALCFGVYPVVAENATMENAVEIAKNAGFVKANDTAVVVAGVPANEGNTNIVKVEVVK

SEQ ID NO: 15824 - DNA, 1512 bp, Rhodococcus sp. RHA1
  CDS (1)..(1512): transl_table=11
atgaccgagtcggtcacgcgcaccgcaccgcaccgcagtgaagtcgtcagcgagtcggcgagcaccacacgccacttcgacagccacactgctccactacgccacacgaagatcgtatgcacacttggacctgctaccgccaccggtgaccgtattcgcgaactcgtcgaaagcggtatggacgtggcgcggctgaatttcagccacggcgaacacgccgaccacgaggagaactacaaacgcgtccgggcggcctcggacgcgacggggaaggcggtcggtgtcctcgccgacctgcagggcccgaagatccggctcggccggttcgccgaggggcgcaccacgtgggccaacggtgaggaagtgcggatcaccgtcgacgaggtcgagggcacccacgaccgggtgtcgaccacctacaagcagctcgccgaggacgccaaggccggtgaccgcctgctggtcgacgacggcaaggtcggtctcgtcgtctccggggtggacggcaacgacgtgatctgccgggtcaccgagggcggcccggtcagcaacaacaagggtgtgtccctgccggggatgaacgtgtcggtcccggcgctgtcggagaaggacatcgccgacctcgagttcgcgctcggtctcggtgtcgacttcatcgccctgtcgttcgtgcggtcgccggccgacgtggaactggttcacgccgtgatggatcgggtcggtcgccggatcccggtgatcgcgaagctcgagaagccggaggcgatcgacaacctcgaggcgatcgtgctggcgttcgacgcggtgatggtcgcccgtggtgacctgggggtggagttgccgctcgaacaggtgccgctggtgcagaagcgggcgatccagatcgcccgggagaacgcgaagccggtcatcgtcgcgacgcagatgctggagtcgatgatcgagaactcgcggcccacccgcgccgaggcgtccgacgtcgcgaacgcggtcctcgacggtgcggacgcggtgatgctgtcgggtgagacgtcggtgggcaagtacgtgatggagacggtgcgcacgatggcgcggatcgtcgaggcggtggagaacgagtccactcaggtgccgccgctcacgcacgtgccgcggaccaagcgcggtgtcatctcctatgcggcccgcgacatcggggagcggctggatgcgaaggcgctggtcgcgttcacccagtccggggacacggtgcgccggttggcgcggctgcacacgccgttgccgttgctggcgttcaccccgctgccggaggtgcgcagccagttgtcgctgacgtggggtaccgagacgttcatcgtcgatccggtcgagagcaccgacgcgatggtgcggcaggtcgaccacgcgctgctcgggttgggccggtaccagaagggggaactggtggtcatcgtggccgggtcgccgcccggcaccgtcggctcgaccaacctgatccacgtccacagaatcggcgaagaggaccactga

SEQ ID NO: 15825 - protein, 503 aa, Rhodococcus sp. RHA1
MTESVTRTAPHRSEVVSESASTTRHFDSHTAPLRHTKIVCTLGPATATGDRIRELVESGMDVARLNFSHGEHADHEENYKRVRAASDATGKAVGVLADLQGPKIRLGRFAEGRTTWANGEEVRITVDEVEGTHDRVSTTYKQLAEDAKAGDRLLVDDGKVGLVVSGVDGNDVICRVTEGGPVSNNKGVSLPGMNVSVPALSEKDIADLEFALGLGVDFIALSFVRSPADVELVHAVMDRVGRRIPVIAKLEKPEAIDNLEAIVLAFDAVMVARGDLGVELPLEQVPLVQKRAIQIARENAKPVIVATQMLESMIENSRPTRAEASDVANAVLDGADAVMLSGETSVGKYVMETVRTMARIVEAVENESTQVPPLTHVPRTKRGVISYAARDIGERLDAKALVAFTQSGDTVRRLARLHTPLPLLAFTPLPEVRSQLSLTWGTETFIVDPVESTDAMVRQVDHALLGLGRYQKGELVVIVAGSPPGTVGSTNLIHVHRIGEEDH

SEQ ID NO: 15826 - DNA, 1440 bp, Haemophilus somnus 129PT; identical to SEQ ID NO: 8601
  CDS (1)..(1440): transl_table=11

SEQ ID NO: 15827 - protein, 479 aa, Haemophilus somnus 129PT; identical to SEQ ID NO: 8602

SEQ ID NO: 15828 - DNA, 1764 bp, Trichodesmium erythraeum IMS101; identical to SEQ ID NO: 8603
  CDS (1)..(1764): transl_table=11

SEQ ID NO: 15829 - protein, 587 aa, Trichodesmium erythraeum IMS101; identical to SEQ ID NO: 8604

SEQ ID NO: 15830 - DNA, 1455 bp, Alkalilimnicola ehrlichei MLHE-1; identical to SEQ ID NO: 8607
  CDS (1)..(1455): transl_table=11

SEQ ID NO: 15831 - protein, 484 aa, Alkalilimnicola ehrlichei MLHE-1; identical to SEQ ID NO: 8608

SEQ ID NO: 15832 - DNA, 1764 bp, Pediococcus pentosaceus ATCC 25745; identical to SEQ ID NO: 8615
  CDS (1)..(1764): transl_table=11

SEQ ID NO: 15833 - protein, 587 aa, Pediococcus pentosaceus ATCC 25745; identical to SEQ ID NO: 8616

SEQ ID NO: 15834 - DNA, 1434 bp, Oenococcus oeni PSU-1; identical to SEQ ID NO: 8617
  CDS (1)..(1434): transl_table=11

SEQ ID NO: 15835 - protein, 477 aa, Oenococcus oeni PSU-1; identical to SEQ ID NO: 8618

SEQ ID NO: 15836 - DNA, 1422 bp, Leuconostoc mesenteroides subsp. mesenteroides ATCC 8293
  CDS (1)..(1422): transl_table=11
atgaaaaagacgaaaatcgtctcaacacttggtccgtcatcatctgatgtcgaaacaatcgtaaagttaatccaagcgggcgccaacgtattccgttttaacttttcacacggtgatcacgaagaacatttgggtcgtatgaatgctgttcacgaagccgaaaagattactggtaagacagttggtattttgttggacactaagggtgctgaaatccgtacaacaaagcaagctgacggcaagatcgaattccatacaggtgacacattgcgtattgcaatggatgaaaaccttgaaggaacgaaagaaaaaatcgccgttacatacgctggtttgttcgatgatgttaaagaaggtggacaagtcttgtttgatgatgggttgcttggtacaactgttatcgaaaaagattcagccactcgcgaattagttgttcgcgttgataatgatggtattttgggatcacgtaagggtgttaacgcacctggtgtttcaattaacttgccaggtattactgaaaaagatgctgatgacatccgttttggtttggatcacgaaatcaactatattgctgcttcattcgttcgtaagcctgaagatgtgcttgaaattcgtggactattgaaggaaaagaacatggaacatgttcaaattattcctaagattgaatcacaagaaggtattgacaaccttgatgcaattttggaagtttcagatgccttgatggtaccacgtggtgacatgggtgttgaaattcctgctgaaaacgtgcctttggttcaaaaagacatgattcgcaagatgaacaaggcaggtttacctgttattactgctacacaaatgcttgactcaatggaagaaaacccacgtcctacgcgtgccgaagcttccgatgttgccaacgctgtgtttgatggtactgatgcaacaatgttatcaggtgaatcagctaacggagactatccagttgaatctgttgccacaatggctgctatcgacgaaaaagctgaaacttcattgcgcgaaaacggtcgtcatgaggatattttcttcgatgagactgattcaacggaagctgttgcagcatctgttgctcgtatcgcacgcaatgtgaacgctaaggctgttgttgtatcaactaactctggttacactgcacgtatggtttcaaagcaccgtcctgatgttaacattttggccgttacttattcagaacgcgtacaacgtggtttgacattgaactatggtgttgttccagtagtttatgatgcaccaaagactattgacgaaatggttgacttagctaagaaggccgtaaaagaccaaggattggctaattcaggtgatactattgttattgcagcaggtgtaccaatgtcacaatcaggtacaacaaacatgttgactgttcaaacagtataa

SEQ ID NO: 15837 - protein, 473 aa, Leuconostoc mesenteroides subsp. mesenteroides ATCC 8293
MKKTKIVSTLGPSSSDVETIVKLIQAGANVFRFNFSHGDHEEHLGRMNAVHEAEKITGKTVGILLDTKGAEIRTTKQADGKIEFHTGDTLRIAMDENLEGTKEKIAVTYAGLFDDVKEGGQVLFDDGLLGTTVIEKDSATRELVVRVDNDGILGSRKGVNAPGVSINLPGITEKDADDIRFGLDHEINYIAASFVRKPEDVLEIRGLLKEKNMEHVQIIPKIESQEGIDNLDAILEVSDALMVPRGDMGVEIPAENVPLVQKDMIRKMNKAGLPVITATQMLDSMEENPRPTRAEASDVANAVFDGTDATMLSGESANGDYPVESVATMAAIDEKAETSLRENGRHEDIFFDETDSTEAVAASVARIARNVNAKAVVVSTNSGYTARMVSKHRPDVNILAVTYSERVQRGLTLNYGVVPVVYDAPKTIDEMVDLAKKAVKDQGLANSGDTIVIAAGVPMSQSGTTNMLTVQTV

SEQ ID NO: 15838 - DNA, 1413 bp, Solibacter usitatus Ellin6076; identical to SEQ ID NO: 8619
  CDS (1)..(1413): transl_table=11

SEQ ID NO: 15839 - protein, 470 aa, Solibacter usitatus Ellin6076; identical to SEQ ID NO: 8620

SEQ ID NO: 15840 - DNA, 1710 bp, Magnetococcus sp. MC-1
  CDS (1)..(1710): transl_table=11
gtggcgcgtcgtgcaaagattgtagcaaccttgggacccgcctgttccagtgtggaacagattacccgtttgatcgaagccgggctggatgtggcccgtttgaatatgagccatggggatcataaagcccatttggagctgattcataatgtgcgggaggcctcgcggattgccaagcgcgaggtggcgctgctgtgtgatctgcaagggccaaaaattcgtgtgggccatctggatgaaccccttagattggaaaaggggcagcagtgggcgattattcccgagggcagtcatccccccaagctcaagtgtgatgggattatcccttgtacctatgcaggtttggcaaaggatgcggtgccgggctgccgcattctgtttgatgatggctatttgcaagcccgcgctattggtaccgaagagggggccttgctggtcaatattgaacatggggggctgcttaaatcccacaagggcatcaacatgcccgatgccagcatctcggccccgagtttgaccaccaaagatcagcaggatctcttttttggggttaaacatgatgtggattatgtggcactctcctttgtgcgcagtgctaagtgtgtgcaaaacgtcaagtttatgctgcatcggcgtaaaatttacaaacccattatcgccaaaattgagcggccagaggctatccgcaatattgatgagatcatcaaggtggtggatggcattatgatcgcccgtggcgatatggcggtggagattggcaaccatcgggtgccctcggtgcagcgtcagatcattcaaaagtgccgggccaagggtaagccggtgattaccgcaacccaaatgctggagtcgatgattcaaaatccatcccccacccgggccgaggcttctgacgtggccaacgccatttgggatggtaccgatgcggttatgttatccgccgagacttcggtgggggtagacccgatcaatacggtgctcaccatggggcgcattgtggaggaggcggagcgcaatccccgtggcccccgcttggatgcggaatcccacagcattagcagcgcctccatgatggcggcggcgcgggtggcggagcaggtgtcggcccgctggattattgccctgacggtgaccggtagttcggccttatcattggcccgttttcgaccggaggtgccggtgttgggggcggcccgtacccagggtggggtgcggcgtatgaatctctattggggcattaccccccggctgttcaactactccattgaagagcgggaggatattgagcccgaggtgatccagtggatgcgtgaacagagcatgttgcaggtgggcgagaaaattgtggtggtcaaaggaggtgggctgctgagcaatcacagcacatccagctcgatccgtgtagatctggtgcgcgatacccgcaatattgatgaaggcgtcagccaaatcacccaggagtccgtggcgggtaaaggcattatcaccctggatgccgcccgttgtgtggcgtgtggcaactgcgtcaatatctgcccctatggtatctgggtggcggcggccagtaatacccgtagcgtcagctttaaccgcgatcaggtggacaattgtagtttggatcaggagtgtgtgcgggtctgttccagccacgccattaccattaccgatgccaaagatatgcatgaatgggtggagaaagaggaattgtaa

SEQ ID NO: 15841 - protein, 569 aa, Magnetococcus sp. MC-1
MARRAKIVATLGPACSSVEQITRLIEAGLDVARLNMSHGDHKAHLELIHNVREASRIAKREVALLCDLQGPKIRVGHLDEPLRLEKGQQWAIIPEGSHPPKLKCDGIIPCTYAGLAKDAVPGCRILFDDGYLQARAIGTEEGALLVNIEHGGLLKSHKGINMPDASISAPSLTTKDQQDLFFGVKHDVDYVALSFVRSAKCVQNVKFMLHRRKIYKPIIAKIERPEAIRNIDEIIKVVDGIMIARGDMAVEIGNHRVPSVQRQIIQKCRAKGKPVITATQMLESMIQNPSPTRAEASDVANAIWDGTDAVMLSAETSVGVDPINTVLTMGRIVEEAERNPRGPRLDAESHSISSASMMAAARVAEQVSARWIIALTVTGSSALSLARFRPEVPVLGAARTQGGVRRMNLYWGITPRLFNYSIEEREDIEPEVIQWMREQSMLQVGEKIVVVKGGGLLSNHSTSSSIRVDLVRDTRNIDEGVSQITQESVAGKGIITLDAARCVACGNCVNICPYGIWVAAASNTRSVSFNRDQVDNCSLDQECVRVCSSHAITITDAKDMHEWVEKEEL

SEQ ID NO: 15842 - DNA, 1443 bp, Azoarcus sp. BH72; identical to SEQ ID NO: 8625
  CDS (1)..(1443): transl_table=11

SEQ ID NO: 15843 - protein, 480 aa, Azoarcus sp. BH72; identical to SEQ ID NO: 8626

SEQ ID NO: 15844 - DNA, 1437 bp, Acidovorax sp. JS42; identical to SEQ ID NO: 8627
  CDS (1)..(1437): transl_table=11

SEQ ID NO: 15845 - protein, 478 aa, Acidovorax sp. JS42; identical to SEQ ID NO: 8628

SEQ ID NO: 15846 - DNA, 1428 bp, Fusobacterium nucleatum subsp. vincentii ATCC 49256
  CDS (1)..(1428): transl_table=11
gtgagtagtttgaaaaaaacaaaaatagtttgtactattggtcctgtgactgaatcagtagaaacattaaaagaattactaaatagagggatgaatgtaatgagattaaatttctctcatggtgattatgaagagcatggaataagaataaaaaattttagacaggctatgtctgaaactggaattagaggaggcttgttacttgatactaagggtccagaaataagaactatgactttaaaagatggaaaagatgtaagtattaaggctggacaaaaatttacttttacgacagatcaatcagttgttggagataatgaaagagtagcggtaacttatgaaaattttgcaaaagatttaaaagttggaaatatggttcttgttgatgatggattacttgaactagatgttacagaaataaaaggaaatgaagttatatgtgtagctagaaatagtggtgatttagggcaaaagaaaggaataaatttacctaatgtttctgttaatttgccagcattatctgaaaaagatatagaagatttaaaatttggttgtcaaaataatgttgattttgtagctgcttcatttataagaaaagctgatgatgtaagacaagttagaaaagttcttaaagaaaatggtggagaaagaatacaaataatttctaaaatagaaagtcaagaaggacttgataattttgatgaaattttagcagaatctgatggtataatggtagcaagaggagatttaggagtagaaattcctgttgaagaagttccttgtgcacaaaaaatgatgataaaaaaatgtaatagagcaggaaaagttgtaattactgcaactcaaatgcttgattcaatgataaaaaatccaagacctacaagagcagaagcaaatgatgttgctaatgctatatttgatggtacagatgcaataatgctttcaggagaaacagcaaaaggaaaatatccattagcagctgttgaggttatgaataaaatagccaaaaaagttgatgctacaataccagcattttatgtagatggggttataaataaacatgatataacttctgctgttgctgagggaagtgctgacataagtggaagattaaatgcaaaacttatagtagttggtacagaatctggaagagctgcaagagatatgagaagatattttcctaaggcaaatattttagcaataactaataatgaaaaaactgcaaatcaattagttttatcaagaggagtaatttcttatgtagatgcttcaccaaagactttggaagaattctttattttagcagaagttattgcaaaaaaattaaatttagttgaaaataatgatataattatagcaacttgtggagaaagtgtatttatacaaggaacaactaactcaataaaagttatacaagtaaaagcttag

SEQ ID NO: 15847 - protein, 475 aa, Fusobacterium nucleatum subsp. vincentii ATCC 49256
MSSLKKTKIVCTIGPVTESVETLKELLNRGMNVMRLNFSHGDYEEHGIRIKNFRQAMSETGIRGGLLLDTKGPEIRTMTLKDGKDVSIKAGQKFTFTTDQSVVGDNERVAVTYENFAKDLKVGNMVLVDDGLLELDVTEIKGNEVICVARNSGDLGQKKGINLPNVSVNLPALSEKDIEDLKFGCQNNVDFVAASFIRKADDVRQVRKVLKENGGERIQIISKIESQEGLDNFDEILAESDGIMVARGDLGVEIPVEEVPCAQKMMIKKCNRAGKVVITATQMLDSMIKNPRPTRAEANDVANAIFDGTDAIMLSGETAKGKYPLAAVEVMNKIAKKVDATIPAFYVDGVINKHDITSAVAEGSADISGRLNAKLIVVGTESGRAARDMRRYFPKANILAITNNEKTANQLVLSRGVISYVDASPKTLEEFFILAEVIAKKLNLVENNDIIIATCGESVFIQGTTNSIKVIQVKA

SEQ ID NO: 15848 - DNA, 1776 bp, Crocosphaera watsonii WH 8501; identical to SEQ ID NO: 8631
  CDS (1)..(1776): transl_table=11

SEQ ID NO: 15849 - protein, 591 aa, Crocosphaera watsonii WH 8501; identical to SEQ ID NO: 8632

SEQ ID NO: 15850 - DNA, 1749 bp, Exiguobacterium sibiricum 255-15
  CDS (1)..(1749): transl_table=11
atgcgcagaactaaaattgtatgtacgattggaccggcgtcagaaaaacgtcttccagaaatgattgaagcgggtatgaacgttgctcgtcttaacttctcacacggtgactatgaagaacatggtgcccgcatcacggatatccgtcgtgcagcagaagaagcaaacaaattagttacgattcttttagatacaaaaggtccggaaatccgcacgcatacgtttgaagaaggtaaagccctcctcgtacgcggcaaacaagttatcgtcgtcagcggtgacgcaaacgaaatcgtcggtacagctgacaagttctctgtcacatacgacggtttatacgatgatgtcgaagtcggttcaatgattatgcttgatgacgggttaatcggactccgtgtcgcagaaaaactcgacaaccgtgaacttctttgcgacatcgaaaacgaaggaatcattaaaacgaaaaaaggggttaacttaccaaatgtaaaagttaacttgcctgctttgacagacaaagacatcgcagacatcgagttcggaattaagagcgacatcgatttgatcgctgcttcattcgtgcgtcgtgcgtctgacgttgttgcgattcgtcaattgctcgaaaaacacaatgccagccacatcaaaatcttcccgaaaatcgaaaaccaggaaggtgtcgccaacatcgaagaaatcatcgcgatttctgacggtttgatggtcgcacgtggtgatctcgggatcgaaattccgactgaagaagtcacgccgacacaaaaagatctcatcaaaatttgtaatgactacggtaaaccggtcatcacagcaacgcagatgcttgactcgatgcaacgtttcccgcgtccgacacgtgcggaagcatcagacgtcgccaacgcaattcttgatggaacagatgccatcatgctttcaggtgaaacagcagccggggactacccgattgaatctgttcaaatgatgcacacgattgcgaagcgtacggagaaaatgctcgactacaaaatgctcttgaaagatcgtcaaacacgcagtgagcacactgtgacggatgcgatcgctcaagcggttacgcatacagccatcaacctggacgcaaaagcaatcttgacaccgacacagtctggttacacagctgcccggatttcaaaataccgtccagagccaaacatcgttgccgtcacaccgagcgcgcgtgttgcacgtcaactcaacatcgtttggggtgtttatccgatcgttgtcgatcacctctcagacaacacggatgacatgttgacacttgctgctgatacagcaaaagaagcaggattcgtcacagacggtgacctcgtcgtcatctctgcaggtatcccggctcttacagcaggtacaacaaacatgttgaaaattcacatcgtcggtaaagaaatcacaaacggtcgcggaatcggtgaacgtggtgtcgttggcgaagtcgtcatcgcgcatacagctgaagaagcaaacgcaaaagcaaaaccaggcatgattcttgtcacgaactcaacggatcgcgacatgatgcctgcaatcgagatggctgcagcaatggtcacagtagacggcggattgactagccatgctggaatcgttggtccttcactcggtaaaccggttatcgtcggtgttgaaaacgccatgacaatcttcacggatggtcaacgtatttcaatcgatccgttaacaggtaaattgtacaacgcataa

SEQ ID NO: 15851 - protein, 582 aa, Exiguobacterium sibiricum 255-15
MRRTKIVCTIGPASEKRLPEMIEAGMNVARLNFSHGDYEEHGARITDIRRAAEEANKLVTILLDTKGPEIRTHTFEEGKALLVRGKQVIVVSGDANEIVGTADKFSVTYDGLYDDVEVGSMIMLDDGLIGLRVAEKLDNRELLCDIENEGIIKTKKGVNLPNVKVNLPALTDKDIADIEFGIKSDIDLIAASFVRRASDVVAIRQLLEKHNASHIKIFPKIENQEGVANIEEIIAISDGLMVARGDLGIEIPTEEVTPTQKDLIKICNDYGKPVITATQMLDSMQRFPRPTRAEASDVANAILDGTDAIMLSGETAAGDYPIESVQMMHTIAKRTEKMLDYKMLLKDRQTRSEHTVTDAIAQAVTHTAINLDAKAILTPTQSGYTAARISKYRPEPNIVAVTPSARVARQLNIVWGVYPIVVDHLSDNTDDMLTLAADTAKEAGFVTDGDLVVISAGIPALTAGTTNMLKIHIVGKEITNGRGIGERGVVGEVVIAHTAEEANAKAKPGMILVTNSTDRDMMPAIEMAAAMVTVDGGLTSHAGIVGPSLGKPVIVGVENAMTIFTDGQRISIDPLTGKLYNA

SEQ ID NO: 15852 - DNA, 1467 bp, Xylella fastidiosa Ann-1
  CDS (1)..(1467): transl_table=11
atgtctgaacgccagcgccgtaccaggattcttgccactcttgggccagcgacagatccgcccggtgtgcttgatgcgctgtttaaggcgggagttaatgtggtgcggctgaatttcagccatggcgatgtttcggatcaggccaggcgtgctgctgaagtgcgtgcggcggcggcgcatgtgggcgttgagattggcattcttgcggatctacccggtccgaagatccgtattggacgttttatcggggggaaagtgcggcttgtggctggtgcgcgctttgatctgcttgccgatagcaatgcgtcgctgggggatgcgactcaagttggggtcagttatctggggttgccgcaggatgtcgtcgccggagatgtgttgttactggatgatggcctcatgcaattgcaagtggtgcaagtgcagggtgcgcggattgtgacgacggttcttaacgatggtgtgttgtccgaccgtaaggggctgaataagcaaggcggcggtttgtcgctgggtgcgctgacggatcgtgatcgcgaactgattggtatcgttgccaggatggggatcgactttattgcagtttcgttttgtcgtcatgctgaagagatgcatgaggcgcgtcgcattgctcgggagtgcggctgtgatgctgcgttggtgtctaagatcgagcgtgctgaggctatcgtgaatcttgccgagattgttgcggcttcggatgtggtgatggttgcgcgtggtgatttaggtgtggagattggtgacgctcaattgccgggcttgcaaaaaaagatcatcaaggaagcgttgttacagaacaaggtggtgattactgccacgcagatgctgcaatcaatggttgaaagtccgatgccgacccgtgctgaggtgctggatgtggctaatgcggtgattgatgggaccgatgcggtgatgctgtcggctgaaacggcgacaggtgattatccagtcaaggcagtagaggcgatggcgcgtatctgtctgggagcggaacaccagtttgagtttgatactgattatgagatggcgcagcgtaatttgcagcgtgcagatcatgcgattgcaatggcaacgatgttcttatctgagcacatttgccttggtggtgtggttgcgttgacggagtccggtacgacgccacggtttctctcgcggttccggtcgcacgtcccgatctatgcgtttacgcgtcacgaggatgtgcggcggcgcatggtgctgatgcgtggtgtatttccgatgcgttttgacagccgtggtttgacgccgcgtgaggcagctagggcgacaatccgtcttttggtggaatgtggttgtatgagtccgggtgatcgtgtggtgttcacgagcggcgagcatatggaaacgcttggcgcaaccaatacactgcgtttacttgaagtaggcgctgatggttgtgtcagtggtctgtgggaactctaa

SEQ ID NO: 15853 - protein, 488 aa, Xylella fastidiosa Ann-1
MSERQRRTRILATLGPATDPPGVLDALFKAGVNVVRLNFSHGDVSDQARRAAEVRAAAAHVGVEIGILADLPGPKIRIGRFIGGKVRLVAGARFDLLADSNASLGDATQVGVSYLGLPQDVVAGDVLLLDDGLMQLQVVQVQGARIVTTVLNDGVLSDRKGLNKQGGGLSLGALTDRDRELIGIVARMGIDFIAVSFCRHAEEMHEARRIARECGCDAALVSKIERAEAIVNLAEIVAASDVVMVARGDLGVEIGDAQLPGLQKKIIKEALLQNKVVITATQMLQSMVESPMPTRAEVLDVANAVIDGTDAVMLSAETATGDYPVKAVEAMARICLGAEHQFEFDTDYEMAQRNLQRADHAIAMATMFLSEHICLGGVVALTESGTTPRFLSRFRSHVPIYAFTRHEDVRRRMVLMRGVFPMRFDSRGLTPREAARATIRLLVECGCMSPGDRVVFTSGEHMETLGATNTLRLLEVGADGCVSGLWEL

SEQ ID NO: 15854 - DNA, 1788 bp, Synechococcus sp. WH 5701
  CDS (1)..(1788): transl_table=11
atggcgcagcccgatctgtcgcgtcgcaccaaaatcgtggcaacgatcggtccagccacggagtccccccagcgactgcgggacctgatccaggcaggggctaccacgttccgtctcaatttttcccacggggaccactccgaacatgccgcccggatcgccacgatccgtcaggtggcccacgagctggggatccatgtgggcatccttcaggatctccagggtccgaagatccgtctcggccgcttcgagggcggtccgatcaccctcgccaacggcgacccctttgccctcacctcccggccggtgagctgcaaccagtcgatcgccacgatcacctacgaccgtctggccgatgaggtgaccgccggcagccgcattcttctcgacgacggccgggtcgagatggtggtcaagtcggtggacatccccgagcagaccctgcactgcaccgtggtcgtgggtggggtgctctccaacaacaagggggtgaacttccccgacgtgcagctctcgatccgtgcgctcaccaccaaggaccgcgaggacctcagcttcggcctccagcaggaggtcgactgggtggccctgagctttgtgcgcaacccctccgacatgcaggagatccgcgagctgatcagcagccaggggtacagcaccccggtgatcgccaagatcgagaagttcgaggcaatcgatcagatcgacgccatccttcccctctgcgatggcgtgatggtggcccggggcgacctgggggtggagatgccggccgaggaggtaccgctgctgcagaaggagctgatccgcaaggccaacaccctgggcatcccgatcatcacggccacccagatgctcgacagcatggccagctgcccgcgccccacccgggccgaggtgagcgatgtggccaacgccatcctcgatggcaccgacgcggtgatgctctccaacgaaaccgccgtgggtgactacccggtggaggcggtcgaaacgatggctcgcatcgcccgccgcatcgagcgcgactacccccgccgggtcgtggacagccacatggcctccaccatccccaacgccatcagccaggcggtcagcacgattgcccgtcagcttcaggctgcggcgatccttcccctcaccaagagcggggccacggcgcgcaacgtcagcaagttccgcccctccaccacgatcctggccatcaccagcgaggtgaaggtggcccgccagttgcagctggtctggggggtgaaccccctgctgatcggccatcaggcctccaccaccagcaccttcaccctggccatgggcgtggcccaggagaggggactgctcaaggagggcgatctggtcgttcagaccgccgggaccctctcgggagtgagcggctccaccgatctggtcaaggtgggcattgtctccgccgtgctgggccggggcctgggcatcggcaacggctcggtcagcggccgggtgcgggtggccaccaccgccgaggaggcggcgcggctggagagcggcgagatcctggtggtgcgcgataccaatgccggttacctcgatgccatccgcaaggcccgaggggtgatcgccgaggagcacggctgcgacagccatgccgccgtgattgcccagcggctgggggtgccggtgatcgtgggggtggccaacgccacttcggatctgcgcctgggtgaattcgtgaccctggaggtgcgtgagggggtggtgcaccgcggcgcccgcaaccacacccaggccgatcgcagcgaaaccatcctctga

SEQ ID NO: 15855 - protein, 595 aa, Synechococcus sp. WH 5701
MAQPDLSRRTKIVATIGPATESPQRLRDLIQAGATTFRLNFSHGDHSEHAARIATIRQVAHELGIHVGILQDLQGPKIRLGRFEGGPITLANGDPFALTSRPVSCNQSIATITYDRLADEVTAGSRILLDDGRVEMVVKSVDIPEQTLHCTVVVGGVLSNNKGVNFPDVQLSIRALTTKDREDLSFGLQQEVDWVALSFVRNPSDMQEIRELISSQGYSTPVIAKIEKFEAIDQIDAILPLCDGVMVARGDLGVEMPAEEVPLLQKELIRKANTLGIPIITATQMLDSMASCPRPTRAEVSDVANAILDGTDAVMLSNETAVGDYPVEAVETMARIARRIERDYPRRVVDSHMASTIPNAISQAVSTIARQLQAAAILPLTKSGATARNVSKFRPSTTILAITSEVKVARQLQLVWGVNPLLIGHQASTTSTFTLAMGVAQERGLLKEGDLVVQTAGTLSGVSGSTDLVKVGIVSAVLGRGLGIGNGSVSGRVRVATTAEEAARLESGEILVVRDTNAGYLDAIRKARGVIAEEHGCDSHAAVIAQRLGVPVIVGVANATSDLRLGEFVTLEVREGVVHRGARNHTQADRSETIL

SEQ ID NO: 15856 - DNA, 1437 bp, Pseudoalteromonas tunicata D2; identical to SEQ ID NO: 8645
  CDS (1)..(1437): transl_table=11

SEQ ID NO: 15857 - protein, 478 aa, Pseudoalteromonas tunicata D2; identical to SEQ ID NO: 8646

SEQ ID NO: 15858 - DNA, 1413 bp, Photobacterium sp. SKA34
  CDS (1)..(1413): transl_table=11
atgaaaaagaccaagatcgtatgtacgattggacctaaaactgaatctgtagaaatgcttactaaactagctaacgctggtatgaacgtaatgcgtctaaacttctcacacggtgacttcgaagaacacggtcaacgtattcgtaacctacgcgaagtaatggttaatacaggcaaagaactagcaatcctgttagatactaaaggccctgaaatccgtacaatcaaactagaaggcggtcaagacttctctctagtagctggtcaagattttacatttacaactgacacttcagttgtaggtaaccaaaactgcgttgcagtaacttacccaggttttgcaaaagacctaacaaaaggtaacactatcctagtagacgacggtctaatcgaaatggaagtgttagaaacaacagagactgaagttaagtgtaaagtacttaacaacggtgacttaggcgaaaacaaaggtgttaacctacctggcgtttctgtaaaacttcctgcacttgctgaaaaagacaaagctgatcttaagtttggttgcgagcaaggcgttgatttcgttgctgcatctttcatccgtaaagctgaagacgtacaggaaatccgtgcgcttctaacagctaatggtggcgaaaacatccaaatcatctctaagattgaaaaccaagaaggtgttgataacttcgacgctattcttgatgcctctgacggtatcatggttgctcgtggtgatcttggtgttgaaattccagttgaagaagttatcttcgctcagaagatgatgatcgagaaatgtaaccgtgcacgtaaagttgtaatcactgcgactcaaatgcttgattctatgattaagaacccacgtccaactcgcgcagaagcgggcgacgttgctaacgcaatcatggatggtacggatgcagtaatgctttctggtgaatcagcgaagggtaaatatccaattgaagctgtaactatcatggcgcaaatctgtgcacgtactgattacgttgttaagcctgagctaggttctcgtctagatagccctcgcctacgtatcacagaagcggtatgtaaaggtgctgtagatacagctgagaaactaaacgctccgctaattattgtagcaactgaagctggtaagtcagctcgctctgtacgtaagtacttcccaacagcacgcattcttgctgtaacaacaaatactaagacagctgctcagctatgtctttctaaaggtgttacacctgttgttgttgattcaattgaaagcactgatgcattctacctacgcggtaaagagctagcgcttgaaacgggtctaggtgctaaaggcgacatcgttgttatggtttctggcgctctagttacttcaggtactacaaacacagcatctgtacacgtactttaa

SEQ ID NO: 15859 - protein, 470 aa, Photobacterium sp. SKA34
MKKTKIVCTIGPKTESVEMLTKLANAGMNVMRLNFSHGDFEEHGQRIRNLREVMVNTGKELAILLDTKGPEIRTIKLEGGQDFSLVAGQDFTFTTDTSVVGNQNCVAVTYPGFAKDLTKGNTILVDDGLIEMEVLETTETEVKCKVLNNGDLGENKGVNLPGVSVKLPALAEKDKADLKFGCEQGVDFVAASFIRKAEDVQEIRALLTANGGENIQIISKIENQEGVDNFDAILDASDGIMVARGDLGVEIPVEEVIFAQKMMIEKCNRARKVVITATQMLDSMIKNPRPTRAEAGDVANAIMDGTDAVMLSGESAKGKYPIEAVTIMAQICARTDYVVKPELGSRLDSPRLRITEAVCKGAVDTAEKLNAPLIIVATEAGKSARSVRKYFPTARILAVTTNTKTAAQLCLSKGVTPVVVDSIESTDAFYLRGKELALETGLGAKGDIVVMVSGALVTSGTTNTASVHVL

SEQ ID NO: 15860 - DNA, 1437 bp, Oceanospirillum sp. MED92; identical to SEQ ID NO: 8649
  CDS (1)..(1437): transl_table=11

SEQ ID NO: 15861 - protein, 478 aa, Oceanospirillum sp. MED92; identical to SEQ ID NO: 8650

SEQ ID NO: 15862 - DNA, 1431 bp, Flavobacteria bacterium BBFL7; identical to SEQ ID NO: 8653
  CDS (1)..(1431): transl_table=11

SEQ ID NO: 15863 - protein, 476 aa, Flavobacteria bacterium BBFL7; identical to SEQ ID NO: 8654

SEQ ID NO: 15864 - DNA, 1482 bp, delta proteobacterium MLMS-1
  CDS (1)..(1482): transl_table=11
atgattgagcagcgggaagcaggggtgatggccgaggggcggccgcggcggaccaagattgtttgcaccatcggcccggccaccgcctcctttgaggccatctgtcggctggcggagcaggggatgaacgtggcccggctcaatatgtcccacggcagccgggagtggcaccggggggtgatcggcaacatcaagcgctacaataaaaaatatgccggctccctggcggtgctgctggacacccggggggcggagatccgcagcggcgatctcaagcaggatcttgaattgcgggtgggcgatgggttgaccctgaccacccggcgtcaggccgaactggaacccggctgcgtggaggtcagccacgacggattcgtggccgaggtgacgccgggggatatcatcctggtggatggcggcatgctgcggctcaaggttgtggaggtggggcgcaccgatgttcgctgccaatccctggacgagggggtgctgggctcccgccgccacctcaacatccggggtaaaagtgctgatttgccggccatcaccgagcaggattgggccgatatcgagttcggcatggagcagcgggtggatttcattgccctctcctttgtccgcaccgccgagcccatccaggtggtgcagcagcacctggcggccaggggcgtgaccatggaggtaatggccaagattgaaagcgcggcctccattgcccaactcgacgccatcatcgccgccgccgacggggtgatggtggcccggggtgatctgggggccgagctgccctacgaagaggtgccgctgctgcaggatgaaattgttgccaagtgccggcgggccggcaaaccggtggtggtggccacccacatgctggagtcgatgatcgttaaccccacccccacccgggccgaggtcaccgatatcacccacgccgtgcagcaggggtccgacgccatcatgctctccggggaaaccgccaccggccgctacccctacaaggccctggaggtcatggacgcggtggcccggcgcatcgaaagacaccaggaacagcagggcggccaggccggtttcggctgcgcctgccaactggggcgacaaggcggcggcagcgaccgcctccacgccaagatggagatttcccgcagcgcggcgatcctgggcaacaacctgggggctgccggcaccctggtcatcacccgccgggggctgatggccgccctgctttccaactgccgccccaccgcccccatcctggcctttaccaacaccacccacgtgcgccgccggctggggatttactggggagtgcaggcctttgtggtcaagctttccagcgacccggaggtttccatccagcgggcggtggagcaattgcaacgcaagggcatcgtccaccgggggcagcggatcatcgtgctctccgatatcctggccggcggccttttcgtggaaacggtgcaggtgcgggtgatttaa

SEQ ID NO: 15865 - protein, 493 aa, delta proteobacterium MLMS-1
MIEQREAGVMAEGRPRRTKIVCTIGPATASFEAICRLAEQGMNVARLNMSHGSREWHRGVIGNIKRYNKKYAGSLAVLLDTRGAEIRSGDLKQDLELRVGDGLTLTTRRQAELEPGCVEVSHDGFVAEVTPGDIILVDGGMLRLKVVEVGRTDVRCQSLDEGVLGSRRHLNIRGKSADLPAITEQDWADIEFGMEQRVDFIALSFVRTAEPIQVVQQHLAARGVTMEVMAKIESAASIAQLDAIIAAADGVMVARGDLGAELPYEEVPLLQDEIVAKCRRAGKPVVVATHMLESMIVNPTPTRAEVTDITHAVQQGSDAIMLSGETATGRYPYKALEVMDAVARRIERHQEQQGGQAGFGCACQLGRQGGGSDRLHAKMEISRSAAILGNNLGAAGTLVITRRGLMAALLSNCRPTAPILAFTNTTHVRRRLGIYWGVQAFVVKLSSDPEVSIQRAVEQLQRKGIVHRGQRIIVLSDILAGGLFVETVQVRVI

SEQ ID NO: 15866 - DNA, 1431 bp, Rickettsiella grylli; identical to SEQ ID NO: 8657
  CDS (1)..(1431): transl_table=11

SEQ ID NO: 15867 - protein, 476 aa, Rickettsiella grylli; identical to SEQ ID NO: 8658

SEQ ID NO: 15868 - DNA, 1470 bp, Synechococcus sp. RS9916; identical to SEQ ID NO: 8659
  CDS (1)..(1470): transl_table=11

SEQ ID NO: 15869 - protein, 489 aa, Synechococcus sp. RS9916; identical to SEQ ID NO: 8660

SEQ ID NO: 15870 - DNA, 1437 bp, Alteromonadales bacterium TW-7; identical to SEQ ID NO: 8661
  CDS (1)..(1437): transl_table=11

SEQ ID NO: 15871 - protein, 478 aa, Alteromonadales bacterium TW-7; identical to SEQ ID NO: 8662

SEQ ID NO: 15872 - DNA, 1437 bp, marine gamma proteobacterium HTCC2143; identical to SEQ ID NO: 8663
  CDS (1)..(1437): transl_table=11

SEQ ID NO: 15873 - protein, 478 aa, marine gamma proteobacterium HTCC2143; identical to SEQ ID NO: 8664

SEQ ID NO: 15874 - DNA, 1437 bp, Candidatus Desulfococcus oleovorans Hxd3
  CDS (1)..(1437): transl_table=11
atgcagaccaaactgattgcaaccatcggaccccgctccagggaccgggctgttattgaaaagctggtggcggtcggcgtcacgatattcaggttgaatttttcccatgccggtcccggcgactttgccgacgtgattcaatcggtccgtgaaatcgaacagcagaccggcaccatcctcaccctgatgggcgacctgagcggccccaagatccgcatcggcgaggtggccggggctcctctgtcggttgccaccggccaactggtgcgcctgggtccggcccgggcaaagggagcctttggcgacgcgctctacctgcccctggagcttgccgaaattttagaacagctgaaaccgggcgccccggtgatcctgagcgacggcattccggttttccgggtccggaaacggcttgacacggaagcgggcccggtttttgaactggagacacaaaacagcggactggtatcgtccaacaagggcatctcctttcccggcctggccattgacctgccggccctgacggccaaggaccggtcggatgtggctgccgccctggatgtcggcatcgacgccctggccctctcctttgtccagaaaagccaggacgtggtggacctaaaaaaggagatggaacaccacggccggcaagtgccggtgattgtcaaaatcgaacgcatgaacgccatcgaccactttcaggagattgtagccgaggccgacgttatcatggtggcccggggagacctgggtctggagtgttcccttccggccctgcctgtaattcagaagcggatcatcgacatgtgcgccgaacaccagaagcccgtggtggtggccacgcagatgctgctctccatggtacacaacccccttcccacccgggccgaagtcgcggatgtggccaacgccatcatggacggggccgacgcggtgatgctgtccgaggaaacagcggtgggcgaatatccggtggaggcggccggcatgctggcccaggtagcggagcacacggaacggttcatggcggaaaagatgggcggcccccggcggccccggggcaaagagcaggtgggcaagcacctggcctactcggcctgcctggtggccgaccatgccggcagccgggcccttgcctgccacacggtcagcggccataccgcggccaccctgtcggcctgccgtcccgcccggaccgtttacgccctgtcacctcacctggaggccttgcggtacgccaactttctgtggggcgtcaagccggtccatgtggatgaccggatcgccgaccacctggaccgggtggaacacttcatcagcacatccggcgcctttgtcccgggcgagagcatcgtgatcacgtcgggccagcccacgccgggccagcggcataacgataccaaccagataaaaatatactacaaggggaatacctga

SEQ ID NO: 15875 - protein, 478 aa, Candidatus Desulfococcus oleovorans Hxd3
MQTKLIATIGPRSRDRAVIEKLVAVGVTIFRLNFSHAGPGDFADVIQSVREIEQQTGTILTLMGDLSGPKIRIGEVAGAPLSVATGQLVRLGPARAKGAFGDALYLPLELAEILEQLKPGAPVILSDGIPVFRVRKRLDTEAGPVFELETQNSGLVSSNKGISFPGLAIDLPALTAKDRSDVAAALDVGIDALALSFVQKSQDVVDLKKEMEHHGRQVPVIVKIERMNAIDHFQEIVAEADVIMVARGDLGLECSLPALPVIQKRIIDMCAEHQKPVVVATQMLLSMVHNPLPTRAEVADVANAIMDGADAVMLSEETAVGEYPVEAAGMLAQVAEHTERFMAEKMGGPRRPRGKEQVGKHLAYSACLVADHAGSRALACHTVSGHTAATLSACRPARTVYALSPHLEALRYANFLWGVKPVHVDDRIADHLDRVEHFISTSGAFVPGESIVITSGQPTPGQRHNDTNQIKIYYKGNT

SEQ ID NO: 15876 - DNA, 1455 bp, Pseudomonas putida GB-1; identical to SEQ ID NO: 8669
  CDS (1)..(1455): transl_table=11

SEQ ID NO: 15877 - protein, 484 aa, Pseudomonas putida GB-1; identical to SEQ ID NO: 8670

SEQ ID NO: 15878 - DNA, 1449 bp, Marinobacter sp. ELB17; identical to SEQ ID NO: 8671
  CDS (1)..(1449): transl_table=11

SEQ ID NO: 15879 - protein, 482 aa, Marinobacter sp. ELB17; identical to SEQ ID NO: 8672

SEQ ID NO: 15880 - DNA, 1761 bp, Bacillus sp. SG-1
  CDS (1)..(1761): transl_table=11
atgagaaaaacgaaaattgtatgtaccattggaccggcaagtgaatcggttgaaaaattaacagaactaattgaagcaggaatgaatgtagcacgcctcaatttctcacatggtgaccatgaagaacatggtgccagaattcaaaacatccggacagcttccgaaaagacaggcaagactgtagggatcctgttggatacgaaaggtcccgaaatccgtacgaacaacatggagaacgggtccatcgagcttgagaaaggttctgaagttatcgtttccatgaaagaagtactgggaacacaagagaaattctctatcacatacgagagcttgattgatgatgtggaagagggatctaaaatccttttggatgacggattaatcggccttgaagttctttctcttgataaagctgcaggagaaatcaagacaaaagtacttaactcgggaacgctaaagaacaaaaaaggcgtgaatgttcctggagtatctgtaaatctgcctggaatcactgagaaggatgccaaggatatcattttcggaatcgagcaaggtgttgatttcatcgcagcttcattcgttcgccgtgcttcagatgttttggaaatccatcagctgttggaagatcataatgcaggagatatccaaatcatccctaaaatcgaaaaccaggaaggtgtcgacaatatcgatgaagtactggaagtttctgatggtctaatggtcgctcgtggtgatcttggagtggaaatcccagcagaagaagttcctcttgtacaaaaagcattgatcaaaaaatgtaatgcactgggcaagccggttatcacagcaactcaaatgcttgactccatgcagcgcaatccgcgtccgacaagagcggaagcaagtgacgttgcaaatgcaatctttgacggcacggatgcaatcatgctttcaggggaaacagcagccggtgtttaccctgtagaagctgttcagacaatgcataacatcgcgtcccgtgcagaaacggcattggattataaagaaatcctatccaaccgcagcaaagacacaggtcataacatgacagatgctatcgggcaatccgttgcacacacagctatcaacctttctgtgaatgccatcgtggcaccgacagaaagcggccatacagcaaaaatgatctcaaaataccgtccaaaagcaccaatcatcgcggtaacggcaaatgattctgtttcccgtaagctagcattggcttggggcgtatattcgcaaaaaggcagaaaagtggccactacagatgaaatgttggaaatggcagttgaagaaagtgtcaattccggtatgattactcacggtgaccgcatcatcatcacggcgggtgtgcctatcggtgagtccggcacaaccaaccttatgaaaatccacgtagttggcgatatccttgcaaaaggccagggaatcggacgcaaaacggcattcgggaaagcggtagttgcaaaaaatgcagccgaagccaatgagaaagtcaagcctggttctatacttgtgacagtaggcagcgacaaagatatggtccctgcacttgaaaaatgctctgcattgattacagaagaaggcggcctgacaagccatgctgcagtcgttggaatcaatatcggcattccggtcatcgttggagtggaaaatgctatgtccattctaaaagatggacaggaaatcacagttgattcctctagaggtgtcatctacgacggacatgcaagtgtactataa

SEQ ID NO: 15881 - protein, 586 aa, Bacillus sp. SG-1
MRKTKIVCTIGPASESVEKLTELIEAGMNVARLNFSHGDHEEHGARIQNIRTASEKTGKTVGILLDTKGPEIRTNNMENGSIELEKGSEVIVSMKEVLGTQEKFSITYESLIDDVEEGSKILLDDGLIGLEVLSLDKAAGEIKTKVLNSGTLKNKKGVNVPGVSVNLPGITEKDAKDIIFGIEQGVDFIAASFVRRASDVLEIHQLLEDHNAGDIQIIPKIENQEGVDNIDEVLEVSDGLMVARGDLGVEIPAEEVPLVQKALIKKCNALGKPVITATQMLDSMQRNPRPTRAEASDVANAIFDGTDAIMLSGETAAGVYPVEAVQTMHNIASRAETALDYKEILSNRSKDTGHNMTDAIGQSVAHTAINLSVNAIVAPTESGHTAKMISKYRPKAPIIAVTANDSVSRKLALAWGVYSQKGRKVATTDEMLEMAVEESVNSGMITHGDRIIITAGVPIGESGTTNLMKIHVVGDILAKGQGIGRKTAFGKAVVAKNAAEANEKVKPGSILVTVGSDKDMVPALEKCSALITEEGGLTSHAAVVGINIGIPVIVGVENAMSILKDGQEITVDSSRGVIYDGHASVL

SEQ ID NO: 15882 - DNA, 1431 bp, unidentified eubacterium SCB49
  CDS (1)..(1431): transl_table=11
atgccaaaccagaagaagacgaagattgttgctaccttagggccagcaacacaagatagagagatactaaagcagatgattctagaaggcgtaaatgtctttagagtaaacttctctcatgcaaattatgaaaatgtaaaagaagtagttgctactataagagatttagggaaagaactaggtactagcacggcaattttaggagatttacaagggcctaaattacgtgtggggattatgaaagaagaagttgtagtaagtcctggtgataccatttctttttgtaccggagaagagtttgaaggtaatgcagagaaggtgtacatgaactatgataactttccgagagatgtaaaaaaaggagaacgtattttacttgatgatggtaaattaatgtttgaagtactggcaacagatggaaaaaaagaagtaaaaacaaaggtgatacaaggtggacctttacgctctagaaaaggggtaaacctacctaacacggctatctcattacctgctttgacaactaaggataaagaagatgctgtatttgctatttctctagaggtagattggattgcactttcatttgtgcgtcacgcagaagatttaaaagaactacaagcactaattgaagcgcacagtgagtataaaatcccgattattgctaagattgaaaaaccagaagcagtaaaaaatatagataaaatagttgcttattgcgacggccttatggttgcacgtggagatctaggtgttgaggttcctgctgccgaagtgccacttattcaaaagcaactggtattaaccgcaaagcgtgccagaatacctgtaattattgccactcaaatgatggaaaccatgattacctcacttacgcctaccagagccgaggtaaatgatgttgcaaactctgtaatggatggcgcagatgctgttatgttatctggagaaacttctgtaggtaaatatccagttcaggtgatacaaactatggcaaacatttgtaaaaatgtagagaatagtgatctaattacggtaccacacgaaccacctcacgttcgtaccaatagatacattacaaaatctatttgttatcatgcagcgcatatggcaaacgagattgatgcaaaagcaatttgtactttaacaaatagtgggtatacagcattccagatttctgcttggcgtccagatgctcaaattttagtgtttacaagtaatcatcgtattctctcaagacttaatttattgtggggtgtaaaggcatttttttatgacaaatgcgtgagcacagatgaaactgtagaagatgtaaatgccattgcgcaagaacgtggttttgtaaaaaaaggtgattatttaattaaccttgcagcaatgcctatagtagataaagggatggtaaatacattgcgtgtgagtttaggtaaataa

SEQ ID NO: 15883 - protein, 476 aa, unidentified eubacterium SCB49
MPNQKKTKIVATLGPATQDREILKQMILEGVNVFRVNFSHANYENVKEVVATIRDLGKELGTSTAILGDLQGPKLRVGIMKEEVVVSPGDTISFCTGEEFEGNAEKVYMNYDNFPRDVKKGERILLDDGKLMFEVLATDGKKEVKTKVIQGGPLRSRKGVNLPNTAISLPALTTKDKEDAVFAISLEVDWIALSFVRHAEDLKELQALIEAHSEYKIPIIAKIEKPEAVKNIDKIVAYCDGLMVARGDLGVEVPAAEVPLIQKQLVLTAKRARIPVIIATQMMETMITSLTPTRAEVNDVANSVMDGADAVMLSGETSVGKYPVQVIQTMANICKNVENSDLITVPHEPPHVRTNRYITKSICYHAAHMANEIDAKAICTLTNSGYTAFQISAWRPDAQILVFTSNHRILSRLNLLWGVKAFFYDKCVSTDETVEDVNAIAQERGFVKKGDYLINLAAMPIVDKGMVNTLRVSLGK

SEQ ID NO: 15884 - DNA, 1413 bp, Moritella sp. PE36
  CDS (1)..(1413): transl_table=11
atgaaaaagactaaaattgtttgtacaattggtccaaaaactgaatcagtagagaaactaacagagcttgttaaagcaggcatgaacgtaatgcgtttaaacttctctcacggtaactttgctgagcactcagttcgtattcaaaatatccgtgaagtaagtgaaaacctaaatgaaaaaatcgcagtattactggatactaaaggtccagagatccgtacgattaaattagaaaatggtgaagacgtaatactgactgctggtcagttattcacatttacaactgatattaatgttgtaggtaataaagatagtgttgctgtaacttatcctggatttgctaaagatctcagcgcaggcgcgatcatccttgtcgatgatggtctgattgaaatgaaagttgttgaaacaactgatacagaagtaaaatgtacagtattaaatactggcgcacttggtgaaaacaaaggtgttaacttacctaacatcagtgtaggtctacctgcattgtcagaaaaagataaagcagatttagcgtttggttgtgagcaagaagttgattttgttgctgcatcattcatccgtaaagctgacgatgtaagagaaattcgcgaaatcttatttaataatggtggcgaaaacattcagattatctcaaaaattgaaaaccaagaaggtgttgataatttcgatgagatccttgcagaatcagacggtatcatggttgctcgtggcgatctcggtgttgagatccctgttgaagaagtgatcatggcacagaagatgatgatcaagaaatgtaataaagcaggtaaagttgtgatcactgcaacgcaaatgcttgattcaatgatcaacaatcctcgtccaacacgtgcagaagcgggcgatgttgccaatgctgtacttgatgggactgatgcggtaatgctttctggtgaaactgcgaaaggtaaatacccggttgaagcggtatctatcatggctaacatttgtgaacgtaccgataactcaatgtcttctgacttgggtgcaaatattgttgcaaaaagcatgcgtattaccgaagctgtgtgtaaaggtgcggtagaaacaactgaaaaattatgcgcgccattgattgttgttgctactcgcggcggtaaatcagcgaagtctgttcgtaaatattttccgaaagcaaatatcttagcgattacgactaacgaaaaaacagcgcaacaattatgcctaacgaaaggtgttagcacttgtatcgttgcgcaaattgatagcacggatgagttttaccgtaaaggtaaagaacttgcgctagcaactggcttagcgaaagaaggtgatattgttgttatggtgtcaggtgcacttgtaccatcaggcacaacaaacacggcatcagttcaccaactttaa

SEQ ID NO: 15885 - protein, 470 aa, Moritella sp. PE36
MKKTKIVCTIGPKTESVEKLTELVKAGMNVMRLNFSHGNFAEHSVRIQNIREVSENLNEKIAVLLDTKGPEIRTIKLENGEDVILTAGQLFTFTTDINVVGNKDSVAVTYPGFAKDLSAGAIILVDDGLIEMKVVETTDTEVKCTVLNTGALGENKGVNLPNISVGLPALSEKDKADLAFGCEQEVDFVAASFIRKADDVREIREILFNNGGENIQIISKIENQEGVDNFDEILAESDGIMVARGDLGVEIPVEEVIMAQKMMIKKCNKAGKVVITATQMLDSMINNPRPTRAEAGDVANAVLDGTDAVMLSGETAKGKYPVEAVSIMANICERTDNSMSSDLGANIVAKSMRITEAVCKGAVETTEKLCAPLIVVATRGGKSAKSVRKYFPKANILAITTNEKTAQQLCLTKGVSTCIVAQIDSTDEFYRKGKELALATGLAKEGDIVVMVSGALVPSGTTNTASVHQL

SEQ ID NO: 15886 - DNA, 1464 bp, Riemerella anatipestifer; identical to SEQ ID NO: 8673
  CDS (1)..(1464): transl_table=11

SEQ ID NO: 15887 - protein, 487 aa, Riemerella anatipestifer; identical to SEQ ID NO: 8674

SEQ ID NO: 15888 - DNA, 2040 bp, Oryza sativa subsp
  CDS (1)..(2040)
atggcgcaggtggtggctgcggcagggacggcggcggcggtggcggcggtggggaggccgctggttggcggcggatctggggccgacgcgctccgcccggcggtgaggctgtcgttcgcgccgcgctggtgcggtgggagcgcgggggcagcgagggcgcgccgcgagtccgccgtcacgtccgtgattagccgcgccccgcgtctcgacgccgaggtgctgccggtgtcggccgacgacgacgcggacgtgaaggaagaagaaaacttccagcatctcaaggccattcagcaacttgcaacatcagccaatggtgtgtggtctaaaccaaatgtgagacgcaagacaaagatcgtgtgcaccattggtccttcaactaacacaaaggagatgatatggaaacttgctgaggctggcatgaatgtggctcggcttaatatgtcacatggagaccatgcatcacaccagaaagttattgacttagtaaaggaatataatgctcaaacaaaggataacgtgattgctattatgcttgacacgaagtcttacacagagtatgatgtgctcatgctagagtgtttttttgcggtctacgcctcctctggaggtattggaccagaagttaggagtggagatttgcctcaaccaataatgttggaaactggccaggagttcactttcacaattaagagaggagttgggactgagacatgtgttagcgttaactatgatgactttgttaatgatgtagaagtgggtgacatgctcctcgtagatggtggaatgatgtcgttgttggtcaagtccaaaactgaagattcggtaaaatgtgaagttattgatggaggtgaactgaaatccaggcgtcacctgaatgttcgtggaaagagcgcaaccttgccatcaataactgacaaggattgggatgatattaagtttggtgtggagaatcaagttgactactatgccgtttcttttgtcaaagatgctcaagttgtgcatgaattgaaggattatctcagaagctccaatgccgatatacatgtaattgtaaagattgaaagtgcagattccattccaaacctacactcaatcatcacagcatcggatggggctatggttgccagaggtgacttgggagctgaactccctattgaggaggtaccgctgctgcaggaagaaattattagaatgtgcaggagcatgggaaaagctgttattgttgccactaatatgctagaaagtatgattgttcatccaactccaacccgagcagaagtttcagacattgctatagctgttcgagaaggttctgatggcattatgctttctggggaaactgcacacggaaagtttcctttgaaagctgttaaggtcatgcatactgttgccctgagaactgaagccactatgtctggtggggaaacaccggctaaccttggtcaggtgttcaagaatcacatgagtgaaatgtttgcataccattcaacaatgatgtccaacactcttggaacatcaattgtggttttcaccaggacaggatttatggctatcctacttagtcattaccgcccttctggcaccatttttgcctttacggaccaggagagagttagacaacgattggctttgtaccaaggtgtatgtccagtccagatggaattttctgatgatgctgagaagacatttggtgacgctttgtcatacttgctgaaacatggtatggtgaaggaaggcgaggaggttgcacttgttcaaagtggcaggcaacctatctggcggtcgcagtccacccataatattcaggtcaggaaggtccaatctgctcaggcaacgggcggaagcttcgccatgaccatgagagtagcttttgcctttcaattcttagccataggagcgccggagaccggagtcgcggagctcgcgtgccctcgtttctccttccccagcggaaccacacgtcacatgcgtgcgcggtgcgccggtgggcgtgctctgcgggctgacggagagaaagacagctgccgcttcgcgaattga

SEQ ID NO: 15889 - protein, 679 aa, Oryza sativa subsp
MAQVVAAAGTAAAVAAVGRPLVGGGSGADALRPAVRLSFAPRWCGGSAGAARARRESAVTSVISRAPRLDAEVLPVSADDDADVKEEENFQHLKAIQQLATSANGVWSKPNVRRKTKIVCTIGPSTNTKEMIWKLAEAGMNVARLNMSHGDHASHQKVIDLVKEYNAQTKDNVIAIMLDTKSYTEYDVLMLECFFAVYASSGGIGPEVRSGDLPQPIMLETGQEFTFTIKRGVGTETCVSVNYDDFVNDVEVGDMLLVDGGMMSLLVKSKTEDSVKCEVIDGGELKSRRHLNVRGKSATLPSITDKDWDDIKFGVENQVDYYAVSFVKDAQVVHELKDYLRSSNADIHVIVKIESADSIPNLHSIITASDGAMVARGDLGAELPIEEVPLLQEEIIRMCRSMGKAVIVATNMLESMIVHPTPTRAEVSDIAIAVREGSDGIMLSGETAHGKFPLKAVKVMHTVALRTEATMSGGETPANLGQVFKNHMSEMFAYHSTMMSNTLGTSIVVFTRTGFMAILLSHYRPSGTIFAFTDQERVRQRLALYQGVCPVQMEFSDDAEKTFGDALSYLLKHGMVKEGEEVALVQSGRQPIWRSQSTHNIQVRKVQSAQATGGSFAMTMRVAFAFQFLAIGAPETGVAELACPRFSFPSGTTRHMRARCAGGRALRADGEKDSCRFAN

SEQ ID NO: 15890 - DNA, 1503 bp, Streptococcus bovis
  CDS (1)..(1503): transl_table=11
atgaataaacgcgtaaaaatcgttgcaacacttggtcctgcggttgaaatccgtggcggtaaaaaattcggtgaagatggatattggggtgaaagccttgatgttgaagcatcagcacaaaaaatcgctcaattgattaaagaaggtgcaaacgtcttccgtttcaacttctcacacggtgaccacgcagaacaaggtgaacgtatggcaactgtacgtcgtgccgaagaaattgctggacaaaaagttggtttccttcttgacactaaaggtcctgaaatccgtactgaactttttgaaggcgaagctaaagaatattcatacaaaactggtgaacaaatccgtgttgctactaaacaaggtatcaaatcaactcgcgaagttatcgctttgaacgttgctggtgcccttgacatctacgatgacgttgaagttggtaaacaagttcttgttgacgatggtaaacttggtcttcgtgttgtcgctaaagacgatgcaactcgtgaatttgttgttgaagttgaaaacgatggtattatcgctaaacaaaaaggtgtaaacattccttacactaaaatcccattcccagctcttgctgaacgtgataacgctgatatccgttttggtcttgaacaaggtcttaacttcatcgctatctcattcgtacgtactgcaaaagacgttgaagaagttcgtgcaatctgtgaagaaactggtaacggacacgttcgtttgtttgctaaaatcgaaaaccaacaaggtatcgaaaacatcgacgaaatcatcgaagctgctgatggtatcatgatcgctcgtggtgacatgggtatcgaagttccatttgaaatggttccagtttaccaaaaaatgatcatcactaaagttaacgcagctggtaaagcagttatcacagcaacaaacatgcttgaatctatgactgaaaaaccacgtgcaactcgttcagaagtatctgacgtgttcaacgctgttattgatggtactgacgcaacaatgctttcaggtgaatctgcaaatggtaaatacccagttgaagcagttcgtgcaatggctacaatcgataaaaacgctcaaactcttcttaacgaatacggacgtcttgattcatcatcattcgctcgtacttctaaaacagaagttgttgcttctgcagttaaagatgcaacaagctcaatggatatcaaacttgtagttgctcttactgaatctggtaacactgctcgtcttatctctaaataccgtccagatgctgacatcttggctgtaacattcgacgaaaaaactcaaaaatcattgatgattaactggggtgttattccagtcgtaactgaaaaacctgcatcaactgatgacatgtttgaagttgctgaaaaagctgctcttgaatcaggtttggttcaatcaggtgataacatcgttatcgtcgctggtgttcctgttggttcaggtggtacaaacacaatgcgtatccgcactgtaaaataa

SEQ ID NO: 15891 - protein, 500 aa, Streptococcus bovis
MNKRVKIVATLGPAVEIRGGKKFGEDGYWGESLDVEASAQKIAQLIKEGANVFRFNFSHGDHAEQGERMATVRRAEEIAGQKVGFLLDTKGPEIRTELFEGEAKEYSYKTGEQIRVATKQGIKSTREVIALNVAGALDIYDDVEVGKQVLVDDGKLGLRVVAKDDATREFVVEVENDGIIAKQKGVNIPYTKIPFPALAERDNADIRFGLEQGLNFIAISFVRTAKDVEEVRAICEETGNGHVRLFAKIENQQGIENIDEIIEAADGIMIARGDMGIEVPFEMVPVYQKMIITKVNAAGKAVITATNMLESMTEKPRATRSEVSDVFNAVIDGTDATMLSGESANGKYPVEAVRAMATIDKNAQTLLNEYGRLDSSSFARTSKTEVVASAVKDATSSMDIKLVVALTESGNTARLISKYRPDADILAVTFDEKTQKSLMINWGVIPVVTEKPASTDDMFEVAEKAALESGLVQSGDNIVIVAGVPVGSGGTNTMRIRTVK

SEQ ID NO: 15892 - DNA, 1503 bp, Vitis vinifera
  CDS (1)..(1503)
atggaggggggaggaggatggaaaaggcccaagacaaagatagtgtgcacgttgggaccggcgtccaggtctgttgaagtgatagagaagcttttgagggctggtatgaacgtggcgcgcttcaacttctcccatggctcccatgcctaccaccagcaaacccttgacaatctcaggactgccatggccaacaccgaaaccctttgcgccgtcatgttggatacgaagggtccagagattcgtactggatttttgaaggatgggaagcctgtccaactcaaaaagggtcaagagatcaccatctccactgactatagcatcaagggtgatgaccacatgatctgtatgagctaccaaaagctggctgaggatttgaggccacagagtgtaattctatgtgctgatggcactatcaccctcacagtcttggcctgtgacaaagaattggggttggttcgatgtcgttgtgaaaactctgcagttctgggtgagaggaagaatgtcaatcttcctggggttgttgtggaccttcccaccttaacagagaaagacaaagaggatatcttagaatggggggtacccaataagattgatatgattgctctgtcttttgttcgcaaagggtcagaccttgtggaggttcgaatgctgctggcggaacatgctaagtctatccttctcatgtcaaaggttgaaaatcaagagggtgttgctaattttgatgaaattcttgcaaactcagatgcgtttatggtggccaggggtgaccttggaatggaaatccccattgagaagatatttcttgcacagaaagtgatgatatataagtgtaacattcagggaaaacctgtagtcactgcaactcagatgttggagtccatgatcaaatctccccggcctacacgagctgaagccactgatgttgccaatgcagttcttgatggcaccgactgtgtgatgctgagtggggaaactgctgctggggcataccctgaacttgctgttcaaaccatggccaggatttgcttggaggcagagaattcacttaattatggagatgtcttcaagacaatcatggaaactgcaccaatgcccatgagccccatagagagtttggcctcctcagcagtacgggcagccaatgggtctaaagcagctttgattttggtcctgaccagaggtggaacaactgctaatctggtggctaagtaccggcccagcatgccaattttgtctgtggtagtcccggagatcacagcagattcctttgattggtcttgcagtgatgaatccccggccagacacggcctgattttcaggggactggtacctgttctatgctcaggatctgcaaaagcttctgacagtgagtcaacagaagaggctttggagttttcacttcaatatgcaaagaccaaggaaatgtgcaagcctggagactcagttgtggcattgcaccgagttggaactgcttctgtgatcaagatactaactgtcaaatga

SEQ ID NO: 15893 - protein, 500 aa, Vitis vinifera
MEGGGGWKRPKTKIVCTLGPASRSVEVIEKLLRAGMNVARFNFSHGSHAYHQQTLDNLRTAMANTETLCAVMLDTKGPEIRTGFLKDGKPVQLKKGQEITISTDYSIKGDDHMICMSYQKLAEDLRPQSVILCADGTITLTVLACDKELGLVRCRCENSAVLGERKNVNLPGVVVDLPTLTEKDKEDILEWGVPNKIDMIALSFVRKGSDLVEVRMLLAEHAKSILLMSKVENQEGVANFDEILANSDAFMVARGDLGMEIPIEKIFLAQKVMIYKCNIQGKPVVTATQMLESMIKSPRPTRAEATDVANAVLDGTDCVMLSGETAAGAYPELAVQTMARICLEAENSLNYGDVFKTIMETAPMPMSPIESLASSAVRAANGSKAALILVLTRGGTTANLVAKYRPSMPILSVVVPEITADSFDWSCSDESPARHGLIFRGLVPVLCSGSAKASDSESTEEALEFSLQYAKTKEMCKPGDSVVALHRVGTASVIKILTVK

SEQ ID NO: 15894 - DNA, 1743 bp, Vitis vinifera
  CDS (1)..(1743)
  misc_feature (200)..(200): y is t or c
  misc_feature (1338)..(1338): y is t or c
atggctcaggtggtggcgactcgcgcgattcagagctcgattctgtgccctagctctggatccgtgcatgagcgatttgagaagctgaagccctccggtttcgctgcgaaagtgttggctcgcgaagagcggaggagccggagagtggcttggaggggcggtccgattgcggcggcgaagagatctgtgggagctgagayggaggttgttccggtcacaccagaggatgcgaagggagaggagcaatatcatcgtttacggggaattcaacagcttggtgagacatctgttggtatgtggtctaagccaacagttagacgcaagacaaagattgtttgcactattggtccatccaccaacacacgggaaatgatatggaagctggctgaagctggaatgaatgtagcccgcctgaatatgtctcatggagatcatgcatctcatcagaaggttattgatttggtaaaagagtataatgcacaatccaaagataatgtcattgcaatcatgcttgataccaaggcaagttttctaggccctgaggtcaggagtggggacttgccccagccaatcatgttaaaaagtgggcaggaattcaccttcacaattcaaagaggcgttgggacagcagattgtgttagtgttaactatgatgattttgtcaatgatgtagaaatgggcgacatgcttcttgtggatggtggtatgatgtcattaatggtcaagtccaagactggagattcagtgaaatgtgaagttgttgatggaggagagctcaagtctagaaggcatctaaatgttcgaggaaaaagtgcaacactgccatcaattactgaaaaggactgggatgatatcaagtttggtgttgacaataaagtggacttttatgcagtctcctttgttaaagatgcgaaagtagtccatgaattgaagaactatctgaaaagctgtaatgcagatatccatgtcattgttaaaattgaaagtgccgactccattcccaatctacattcaattattaccgcatctgatggggcaatggttgctagaggggatcttggtgccgagcttcctattgaggaggtcccattgctacaggaagagataatcaggatatgtcgtagcatgggaaaagctgttattgtagcaaccaatatgctggaaagcatgattgttcacccaacaccaacccgagcagaggtatcagacattgccattgctgtccgagagggtgctgatgcagttatgctttctggagaaactgctcatggaaagtttcccttgaaagctgtgaaagtcatgcatacagtttccttaagaactgaagcaaccttggtyggtagcccaatgccaccaaatcttggtcaggctttcaagaaccatatgagcgaaatgtttgctttccatgcaaccatgatgtccaatactctcggtacttcaatagttgttttcactagaactggtttcatggctatccttctgagccattatcgaccttctggcaccatatttgcctttacaaatgaggagagagtacaacagagactagccgtgtaccaaggggtatgtcccatatacatgcagttctcagacgatgctgaagaaacctttgcaaatgccttgtctttgttgcagaagcaagggatggtgaaggaaggagaagaggtggctcttgttcagagtggcaggcagccgatctggcggttccaatccacacacaatatccaggtcaggaaagtttaa

SEQ ID NO: 15895 - protein, 580 aa, Vitis vinifera
  misc_feature (67)..(67): The Xaa at location 67 stands for Met, or Thr.
MAQVVATRAIQSSILCPSSGSVHERFEKLKPSGFAAKVLAREERRSRRVAWRGGPIAAAKRSVGAEXEVVPVTPEDAKGEEQYHRLRGIQQLGETSVGMWSKPTVRRKTKIVCTIGPSTNTREMIWKLAEAGMNVARLNMSHGDHASHQKVIDLVKEYNAQSKDNVIAIMLDTKASFLGPEVRSGDLPQPIMLKSGQEFTFTIQRGVGTADCVSVNYDDFVNDVEMGDMLLVDGGMMSLMVKSKTGDSVKCEVVDGGELKSRRHLNVRGKSATLPSITEKDWDDIKFGVDNKVDFYAVSFVKDAKVVHELKNYLKSCNADIHVIVKIESADSIPNLHSIITASDGAMVARGDLGAELPIEEVPLLQEEIIRICRSMGKAVIVATNMLESMIVHPTPTRAEVSDIAIAVREGADAVMLSGETAHGKFPLKAVKVMHTVSLRTEATLVGSPMPPNLGQAFKNHMSEMFAFHATMMSNTLGTSIVVFTRTGFMAILLSHYRPSGTIFAFTNEERVQQRLAVYQGVCPIYMQFSDDAEETFANALSLLQKQGMVKEGEEVALVQSGRQPIWRFQSTHNIQVRKV

SEQ ID NO: 15896 - DNA, 1866 bp, Vitis vinifera
  CDS (1)..(1866)
atggcacatatttggaatattacttttaattccctttaccaaatcccatatgatgcgtatgcacttaagaagtatcatacccatgtttctttgtatttgtgttggggaatggttcttggggtcaatgtcctggatgtggctgctggtgtgaacttcaatgtgcaacttggatgggaatgtgaacatcatccatggggcagtgaggagcccttatgtgagactttcccatccttgtttgccctatttgattcgaaggagacatgggtagctgattttttggagcaacgtggggaaggagattgtgtcattattgtttcatggatatttacatatagaaggattttgtttggttacatcctgggttccaacgcccatgaaaagaacatatcatatcaaaatacagtttatgactttatggatacggtgaagactccttttgaacttcaatctagtgattccactctgggaaatcagaggataatgtcgaatcctcgacggaaaacgaagatagtatgtactattggtccctccactagttcacgagaaatgatatggaaactggcagaaactggaatgaatgttgcacgtttgaatatgtcacatggggaccatgcatcgcacaagaaaaccattgatctggtcaaagaatacaatgctcaatttgaagacaaggttatagccataatgctggacaccaagggtcctgaggtcagaagtggagatgtccctaaaccaatcatgcttaaggagggacaagaattcaacttcactattaaaagaggagtcagctcagaaaacactgtcagtgtaaattatgatgactttgtgaatgacgtggaggttggagatatacttcttgttgatggtggaatgatgtcattagctgtgaaatcaaagtctaaggatttggttaagtgccaagtaattgatggtggtgagctgaaatcaaggcgtcacttgaatgtgcgtggaaaaagtgcaactctgccttcaataacagacaaagactgggaagatatcaagtttggagtggacaaccaagttgatttctatgctgtttcctttgtgaaagatgctgaagtggtccatgagttgaaagattacctcagaagctgtggtgcagatattcatgtgattgtgaaaattgaaagtgcagattccataccaaatcttcattccattatttctgcttctgatggggcaatggttgcacgtggggatctcggagctgaacttccaattgaggaagtccctttattgcaggaggacatcattagaaggtgtcacagcatgcagaagcctgttattgtagcaacaaacatgttggagagcatgattaatcatcctacaccaacaagggccgaagtttctgatattgcaattgctgtaagagaaggtgctgatgcagttatgctttctggagaaactgcccatggaaacacccatgaaattcctaacaaggagaagaccatctgccataaaattcttgcgttgagtcatatgggtacaatgtttgctttccatgccaccactatggctaacactcttaatactcccatcattgtctttacaagaactggatccatggctataactttaagccattatcggcctttctcaacaatctttgccttcactaatgaagaaagagttaagcagaggttggtgctttatcatggtgtgatgcctatatttatgcagttttcagatgatgctgaggagaccttctctcgagccctcagcatactagtgaacaagggcctaatgaaggagggagagcatgtgactcttgttcaaagtggagcacaaccaatctggcgtgttgaatctactcaccacatccaagttcgtaaggtccaaggttga

SEQ ID NO: 15897 - protein, 621 aa, Vitis vinifera
MAHIWNITFNSLYQIPYDAYALKKYHTHVSLYLCWGMVLGVNVLDVAAGVNFNVQLGWECEHHPWGSEEPLCETFPSLFALFDSKETWVADFLEQRGEGDCVIIVSWIFTYRRILFGYILGSNAHEKNISYQNTVYDFMDTVKTPFELQSSDSTLGNQRIMSNPRRKTKIVCTIGPSTSSREMIWKLAETGMNVARLNMSHGDHASHKKTIDLVKEYNAQFEDKVIAIMLDTKGPEVRSGDVPKPIMLKEGQEFNFTIKRGVSSENTVSVNYDDFVNDVEVGDILLVDGGMMSLAVKSKSKDLVKCQVIDGGELKSRRHLNVRGKSATLPSITDKDWEDIKFGVDNQVDFYAVSFVKDAEVVHELKDYLRSCGADIHVIVKIESADSIPNLHSIISASDGAMVARGDLGAELPIEEVPLLQEDIIRRCHSMQKPVIVATNMLESMINHPTPTRAEVSDIAIAVREGADAVMLSGETAHGNTHEIPNKEKTICHKILALSHMGTMFAFHATTMANTLNTPIIVFTRTGSMAITLSHYRPFSTIFAFTNEERVKQRLVLYHGVMPIFMQFSDDAEETFSRALSILVNKGLMKEGEHVTLVQSGAQPIWRVESTHHIQVRKVQG

SEQ ID NO: 15898 - DNA, 1515 bp, Pichia guilliermondii
  CDS (1)..(1515)
atgtcccacgctgctttaacttggcttacctgcctcaacaccactgagactccagacaaagtgctccgtcgttcctcaattatcggtaccattggtcctaagaccaactctgccgaagtgatggtcaagttgagaaaagccggtcttaacattgtgagaatgaacttctctcatggatcgcacgagtatcaccagtcggtcattgacaacgccagaaagtcggaggagttgtatcctggtagaccattggccattgccttggataccaagggtcctgagatccgtactggtaccaccgtgggagagaaggattacccaattcttccaaaccacgaaatgattatcactactgacgatgagtacgcgaagaaatgtgacgacaaaatcatgtacgtcgactacaagaacattactaaggtcatcgagactggaaagatcatatatgtagatgatggtgtgctttcgtttgaagttgctgaagttgttgactccaagaccttgaaggtcagatctgtcaatgccggttccatctcgtctcacaagggtgtcaacctccctggcaccgacgttgatcttcctgctctttctgaaaaggacaagaacgatatcagattcggtgtcaagaacggcgtccacatgatcttcgcttcgtttattcgttccggagacgatatcaaggccattcgtgaagtccttggtgaagatggaaaggatattcagatcattgccaagatcgagaaccaacaaggtgtgaacaactttgatgatatccttgccgagaccgacggtgtcatggtggccagaggtgacttgggtattgagattccagctcctcaagtgttcgtcgttcaaaagcagttgattgccaaatgtaacttggctgctaagcctgtaatttgtgctacccaaatgttggagtccatgacctacaacccaagaccaaccagagccgaagtcagtgacgtcggtaacgctatcttggatggtgctgactgtgtcatgttgtctggtgaaactgccaagggtaactacccatttgaggccgtctcgatgatgcacaacactgctatcattgctgaaaaggctattgcttaccagccattgcacaatgaaatcagagctttggccaagaaacctactcctaccaccgaaacttgtgcaattgctgctgtttccgctgcctacgagcaagatgccaaggccattgtcgtcttatctacttctggtttgacttcaagactcgtgtccaaatacaagcctaatgttccaattatgatggttaccagaaacgagagagctgctaggtattgtcacttgtacagaggtgtctaccccttcgtgtacactaagggtaaggttgaaaactggcaagaggatgtagagaacagattgagatgggctgtttcggaagccatcgatttgggtattatcaagaagggcgactcaattgttactattcaaggatggactagaggctctggtcactccaacaccgtcagagtcgttcaagcttag

SEQ ID NO: 15899 - protein, 504 aa, Pichia guilliermondii
MSHAALTWLTCLNTTETPDKVLRRSSIIGTIGPKTNSAEVMVKLRKAGLNIVRMNFSHGSHEYHQSVIDNARKSEELYPGRPLAIALDTKGPEIRTGTTVGEKDYPILPNHEMIITTDDEYAKKCDDKIMYVDYKNITKVIETGKIIYVDDGVLSFEVAEVVDSKTLKVRSVNAGSISSHKGVNLPGTDVDLPALSEKDKNDIRFGVKNGVHMIFASFIRSGDDIKAIREVLGEDGKDIQIIAKIENQQGVNNFDDILAETDGVMVARGDLGIEIPAPQVFVVQKQLIAKCNLAAKPVICATQMLESMTYNPRPTRAEVSDVGNAILDGADCVMLSGETAKGNYPFEAVSMMHNTAIIAEKAIAYQPLHNEIRALAKKPTPTTETCAIAAVSAAYEQDAKAIVVLSTSGLTSRLVSKYKPNVPIMMVTRNERAARYCHLYRGVYPFVYTKGKVENWQEDVENRLRWAVSEAIDLGIIKKGDSIVTIQGWTRGSGHSNTVRVVQA

SEQ ID NO: 15900 - DNA, 1326 bp, Nosema bombycis
  CDS (1)..(1326)
atgttcccgacaatgacaaagataattgtaaccgtaagttctgtctcagatgatgaagaaacccttaccaacttccttaaagaaggagtacatatatttcgaataaacttaagtcatggcacttcttaccaacacgagcacagcattttaaacatcaggaaatgtgctaaagaaatgggaattgttccagttatttgcttggacacccgtggacctgaagtccgaatagaaatagccgaaaggtctgaaattcccctaaaagaaggcgataaaattactttttcaaatgtccggacttcaaataagattttcttaccaattccggactttacaaaattccctttgaagagtaaaatttatttggatgatgcaatgttagccattgaagtcctggaaacttcgaaatgtgaatgcacgggtagagctatgaattcccacagattaaaaaataataaaaaagcatctcttcctggtcttgtattcgaagataatgaatcagaggctagagacaaaaaagatttcgaaatcattttaaaacacaaaattgatgttgtttttgcttcgttcattaacagcagaaaagaagttgagtctttaaaaaagttaattggatctgaggatgttttaattttttctaaaatagaaacactaagaggagttgaaaatattgatgaaataattgaagttagtgacggaattatgatcgctaggggagacctgggtgttgagatgacagcctcaaaaatgtttagtacacaaaaaaaaattacgataaaatgtcgagaagccaagaagcccgtgatttgtgctactcaaatgctggagacaatgattcaaaatcccgtgccttcccgtgccgaaatcacagacgtaggaaatgccgtcttcgatcaatttgatggccttcttttgagtggggaaactgcagtagggaaatttcctacgttgacagtccggacaatgagaaaaattattgaagatgccgaggcttaccactttgaaatttcagatcataaaaataggtgtcctctactaggaacaaggattaaggaatcctgtgctgtaattagatgcccggatctagcgactatctttggtctttacagtaatcactttgagatccctgtttactttgtctccaaagaagtccaaaatttcaggtgtctccacatgctcaggggagttattccgtacgaaattaaagaagatgaagatattattaaggtagtagatcaaattaaggacaagtttaattataaaaaaatttatttctttgaaatgcaagggaatgatgaagttatgagtaagttacgggtattcaaataa

SEQ ID NO: 15901 - protein, 441 aa, Nosema bombycis
MFPTMTKIIVTVSSVSDDEETLTNFLKEGVHIFRINLSHGTSYQHEHSILNIRKCAKEMGIVPVICLDTRGPEVRIEIAERSEIPLKEGDKITFSNVRTSNKIFLPIPDFTKFPLKSKIYLDDAMLAIEVLETSKCECTGRAMNSHRLKNNKKASLPGLVFEDNESEARDKKDFEIILKHKIDVVFASFINSRKEVESLKKLIGSEDVLIFSKIETLRGVENIDEIIEVSDGIMIARGDLGVEMTASKMFSTQKKITIKCREAKKPVICATQMLETMIQNPVPSRAEITDVGNAVFDQFDGLLLSGETAVGKFPTLTVRTMRKIIEDAEAYHFEISDHKNRCPLLGTRIKESCAVIRCPDLATIFGLYSNHFEIPVYFVSKEVQNFRCLHMLRGVIPYEIKEDEDIIKVVDQIKDKFNYKKIYFFEMQGNDEVMSKLRVFK

SEQ ID NO: 15902 - DNA, 1755 bp, Bacillus subtilis; identical to SEQ ID NO: 8681
  CDS (1)..(1755): transl_table=11

SEQ ID NO: 15903 - protein, 584 aa, Bacillus subtilis; identical to SEQ ID NO: 8682

SEQ ID NO: 15904 - DNA, 1428 bp, Zymomonas mobilis; identical to SEQ ID NO: 8683
  CDS (1)..(1428): transl_table=11

SEQ ID NO: 15905 - protein, 475 aa, Zymomonas mobilis; identical to SEQ ID NO: 8684

SEQ ID NO: 15906 - DNA, 2100 bp, Ostreococcus tauri; identical to SEQ ID NO: 8685
  CDS (1)..(2100)

SEQ ID NO: 15907 - protein, 699 aa, Ostreococcus tauri; identical to SEQ ID NO: 8686

SEQ ID NO: 15908 - DNA, 1692 bp, Crassostrea gigas
  CDS (1)..(1692)
atggtgagtttaacatctaagaagattgaagcggcaggcgtggctactatcgacagctgtcagcttctggccgcagccgacgcaatgtctcatctgctgctcatgtgtaagctggacatcgactccaacccacgcgatgtctctatgacaggcatcatctgtactattgttccggcttgcagagaaattgacacgttacagaagatggtgattgaaggaatgaatgttgctcgccttaacttctcacacggaacccacgagtaccacgaggggaccatcaagaacatccgggaggcggtgaaggggttcagctccccccgccccctagcgatcgccctggacaccaaggggccagaaatcaggaccggactcctggaggggggagcctcagcggaattaacactgaacacaggggacaagatcaagatcacgacggacgacaagttcaaggagaagtgtagcaaggacacgctgtgggtcgactacaagaacatcaccaaggtcatgtccgtgggctccaggatgttcatcgacgacggactcatctccgtcatcgtcaaggaaatgggtgctgactatattaactgtgtggtggagaatgggggcgacctgggcagtaagaagggctgtaacctccccgggatagccgttgacctccccgccgtctcaaccaaggacaaggaggacctattgtttggtgtcgctcaaggggtggacatgattttcgcgtccttcatcagaagcggtcagcacatcaaagacatcaggtctatcctaggagagaaaggaaagaacatcaagatcatcgccaagatagagaaccatgaaggagtcaaacgatttgacgagatcctgcaggagtcggatggtatcatggtggccagaggtgaccttggcattgagattcccccagagaaggtgttcctggcccagaagatgatgattggtcgatgtaacagggcggggaaacccgtcatctgtgccacacagatgttggagtcgatggtgaagaagccccgccccacgagggcagagtccagcgatgtggccaatgccgtgctagacggggccgactgtgtcatgttgtcaggggaaactgccaagggagactacccactggagtgtgtcaaaatgatgcagaagatttgccgggaagctgagtccgcagtcttccaccaccagctgtttgaggaactccgtaaggagacccccacccccacagacgccacccataccgtcgccatagcagcagtggaggcctcgttcaagtgtatggccgccgccatcattgttatcactacctcaggaaggtcggcccatctgatctcagcgtacaggccccgctgtccaatcctggccatcacaaggatagaacagacagctcgtcagtgtcatctcttcaggggcatcttccctatccactatgtggactctgtcatgagcgaatggaccgtcgatgttgacaggaggatctacaaaggaatccagagtggtatggatcgtggatttatccagaagggagatccggtcatcatcattacaggctggaagcccggatccggatccacaaacaccatgcggatcatcaacgctgtggatgtggctaacaaagacctactggcccccatcacaggaataactagtgtgccgagtttcgacaagatagagagtgatttgtctataatcttctga

SEQ ID NO: 15909 - protein, 563 aa, Crassostrea gigas
MVSLTSKKIEAAGVATIDSCQLLAAADAMSHLLLMCKLDIDSNPRDVSMTGIICTIVPACREIDTLQKMVIEGMNVARLNFSHGTHEYHEGTIKNIREAVKGFSSPRPLAIALDTKGPEIRTGLLEGGASAELTLNTGDKIKITTDDKFKEKCSKDTLWVDYKNITKVMSVGSRMFIDDGLISVIVKEMGADYINCVVENGGDLGSKKGCNLPGIAVDLPAVSTKDKEDLLFGVAQGVDMIFASFIRSGQHIKDIRSILGEKGKNIKIIAKIENHEGVKRFDEILQESDGIMVARGDLGIEIPPEKVFLAQKMMIGRCNRAGKPVICATQMLESMVKKPRPTRAESSDVANAVLDGADCVMLSGETAKGDYPLECVKMMQKICREAESAVFHHQLFEELRKETPTPTDATHTVAIAAVEASFKCMAAAIIVITTSGRSAHLISAYRPRCPILAITRIEQTARQCHLFRGIFPIHYVDSVMSEWTVDVDRRIYKGIQSGMDRGFIQKGDPVIIITGWKPGSGSTNTMRIINAVDVANKDLLAPITGITSVPSFDKIESDLSIIF

SEQ ID NO: 15910 - DNA, 1437 bp, Spiroplasma citri
  CDS (1)..(1437): transl_table=4
atggataaatttaatattaacgagaaaatgaaaagaacgaaaattattacaacaattgggccaagtacacattcaccgggtgccattgaagaattgtttaaaacaggaatgacaacaattcgcttaaacttttcacatggagatcatgctgaacaaggagcacgaattgtatgagcacgagaagttagtgctaaaattggaaaaccaatttcagtgttattagatacgaaaggaccagaaattcgtgctggaataatgaaaggtgggaaacaagaaattgttgctggagcaacagttacgatttattcattaccaacagaatatcaaaaccgtgaaggaactggaacagaaatcactgtttcatatgatatgtcacaagatttaaaagttggtgatgtggtgctagttgatgatggaaaattacagttaaatgttactggtattaaaccaggcattattgaaacaaaagctttcaaccatcatattgttaaaacaaacaaacgaattaatttaccaggggttgactttacattaccatttttagctgaaaaagatattaatgatattaaatttggagttgaacaagggattgactatattgcagcatcatttgttaacacagctggtaatatcaaagaaattcgcaaattattaaaagagtgtaaagctgaacatgttcaaattattgccaaaattgaatcacaaattggaattaataatattgatgaaattattgccgccgctgatggaattatggttgcacgaggagatttaggtttagaaattccttattatgatgttccatattgagaaaaaattattattcgtaaatgtcgtgaagcagggaaaattgttattgttgcaacacaaatgttagaaacaatgacagaaaatccatcaccaacgcgagcagaagtaactgatgtttattttgcaacagaattaggttctgatgcaacgatgttatcaggtgaatcagcaaatggtgattatccgtttattgctgttcatacaatggcaatgattaacaaacgagcagagcatgaattttattcaaaattgtactatgaaaagcaattagaagacgctatgaattcaacaacaggcccacgcgctgatattgctaaaaaattagcaaataaatgtaaagatggaaaatatgagtatgccgttgttgtctcaaatacaggggaattattaaaaacaatttcaaaattccgcccaaatgtggtaattttaggagttagtccattaccagaattatatactgcctttggatcatgacattcaatttttatgaataaagttgataattatgaagcatttaaaacagatgaaaaagcaatttgtgaagtggcaaaaaaatgaggggcaaaaattggttcaacaattctatttgctcgcaatgaagaaattaaagaaattacaattaaataa

SEQ ID NO: 15911 - protein, 478 aa, Spiroplasma citri
MDKFNINEKMKRTKIITTIGPSTHSPGAIEELFKTGMTTIRLNFSHGDHAEQGARIVWAREVSAKIGKPISVLLDTKGPEIRAGIMKGGKQEIVAGATVTIYSLPTEYQNREGTGTEITVSYDMSQDLKVGDVVLVDDGKLQLNVTGIKPGIIETKAFNHHIVKTNKRINLPGVDFTLPFLAEKDINDIKFGVEQGIDYIAASFVNTAGNIKEIRKLLKECKAEHVQIIAKIESQIGINNIDEIIAAADGIMVARGDLGLEIPYYDVPYWEKIIIRKCREAGKIVIVATQMLETMTENPSPTRAEVTDVYFATELGSDATMLSGESANGDYPFIAVHTMAMINKRAEHEFYSKLYYEKQLEDAMNSTTGPRADIAKKLANKCKDGKYEYAVVVSNTGELLKTISKFRPNVVILGVSPLPELYTAFGSWHSIFMNKVDNYEAFKTDEKAICEVAKKWGAKIGSTILFARNEEIKEITIK

SEQ ID NO: 15912 - DNA, 1536 bp, Capsicum annuum; identical to SEQ ID NO: 8691
  CDS (1)..(1536)

SEQ ID NO: 15913 - protein, 511 aa, Capsicum annuum; identical to SEQ ID NO: 8692

SEQ ID NO: 15914 - DNA, 1731 bp, Medicago truncatula
  CDS (1)..(1731)
atgtctcaggttcgatccattcaaacctccttctcacgccccacttcaggatctacacatgacaggtctcaaaccttgttaaagcctccatctttttcctccaaaatcttcccacctaagtctaacaatccccccaagctttgcttcacaacctcccccatcaatgcaagaaagtcctcatctgctgaagttgtccctgtctcacccgaagacgattcaaagattgaagaggagttgcagaagttacacgttttgcaacaagttggtaatgtttctggtggaatctggtctaagccaatgattaaaagaaagactaacattgtttgtactattggtccttctactaatacaaaggaaatgatttggaaacttgctgaggctggaatgaatgttgctcgtatgaatatgtctcatggtgatcatgcttctcataagaaagttattgatttggtgaaagagtataatgcacaatctaaagataatgttattgcaatcatgcttgacaccaagggtcctgaggttaggagtggggatttaccacaaccaatcatgttaaaaactggccaggaattcacttttactatccagagcggtgttggaactgctgattgtgtcagcgtgaactatgatgattttgtcaacgatgttgaagaaggggacatgcttcttgttgatggtggtatgatgtcgttcttggttaagtccaagacagcggattccgtgaaatgcgaagttattgatggaggagagctcgcgtcacggaggcatttgaatgttagaggaaaaagtgcaacactgccttcaatcactgaaaaggattgggatgacatcaaatttggagtcgataatgaagttgatttctatgccgtttctttcgttaaggatgcacaagtagttcatgagctgaagaattatttgaaaagctgtggtgctgatatacatgtaattgtaaaaattgaaagtgcagactctataccgaacttgcattcaattattactgcatctgatggggctatggttgcaagaggagatcttggtgcagaactccctattgaggaggttccgcttttgcaggaagagataataaggatatgccgtagcatgggaaaggccgttattgtagccacaaatatgctggaaagtatgattgttcaccccacgccaaccagagcagaggtatctgatattgcaattgctgttcgagaaggttccgatggaataatgctttctggagaaactgcacatggaaagtttccaattaaagctgcgaaagtaatgcacaccgtagcattacggacagaagccgctttaccaaatgggcagatgccacctaatattggccaagtattcaagaaccacatgagcgagatgtttgcataccatgcaaccatgatgtccaatacccttggaacatcaactgttgtcttcactagatcgggtttcatggctattctattgagccattatcgacctgcaggcaccatatttgcttttactgatcagaaaagggtacaacagaggttggctttgtatcaaggtgtctgtcctatttacatggaattctctgatgatgctgaagagacattcacaaaagccttggatttgttgcagaagaatggaatggttaaagaaggagaagaagtagcccttgtacaaagtggaaggcaacctatatggaggttccattccactcacaatattcaggtccgaacagtagctgccacaaattaa

SEQ ID NO: 15915 - protein, 576 aa, Medicago truncatula
MSQVRSIQTSFSRPTSGSTHDRSQTLLKPPSFSSKIFPPKSNNPPKLCFTTSPINARKSSSAEVVPVSPEDDSKIEEELQKLHVLQQVGNVSGGIWSKPMIKRKTNIVCTIGPSTNTKEMIWKLAEAGMNVARMNMSHGDHASHKKVIDLVKEYNAQSKDNVIAIMLDTKGPEVRSGDLPQPIMLKTGQEFTFTIQSGVGTADCVSVNYDDFVNDVEEGDMLLVDGGMMSFLVKSKTADSVKCEVIDGGELASRRHLNVRGKSATLPSITEKDWDDIKFGVDNEVDFYAVSFVKDAQVVHELKNYLKSCGADIHVIVKIESADSIPNLHSIITASDGAMVARGDLGAELPIEEVPLLQEEIIRICRSMGKAVIVATNMLESMIVHPTPTRAEVSDIAIAVREGSDGIMLSGETAHGKFPIKAAKVMHTVALRTEAALPNGQMPPNIGQVFKNHMSEMFAYHATMMSNTLGTSTVVFTRSGFMAILLSHYRPAGTIFAFTDQKRVQQRLALYQGVCPIYMEFSDDAEETFTKALDLLQKNGMVKEGEEVALVQSGRQPIWRFHSTHNIQVRTVAATN

SEQ ID NO: 15916 - DNA, 1590 bp, Medicago truncatula
  CDS (1)..(1590)
atgccttccagtcacttgcttctcgaggaaccaattaggatggcttccatcctagaaccatcaaaagccagctttttttctgcaatgacaaagattgttggaacattgggtcctaaatctcgatctgttgagactatttctggatgtcttaaagctggcatgtctgtggctcgttttgatttttcatggtgtgatcctgagtatcatcaggaaactttggagaatttgaagactgctattaagggtactaagaagctatgtgctgttatgctggatacagtgggtgcagagatgcaggttgttaacaaaagtgagacaactatctcacttgagatagatgctcaggttgttctaacccccaaccagggacaagaagcttcttcagagatattgccaatcaactttgatggactggcccaggcagtgaagacgggagacactatttttattggtcaatacttgttcacaggaagtgaaactacttctgtatggcttgaggtatctgaagtcaaagggaacgatgttgtgtgtattataaagaattcagctacattgaccgggtcattgttcactttgcatgcctctcaaattcacattgatctacctacccttacggagaaagacaaggaggttataagcacctggggagttaaaaacaaaattgattttctgtcattgtcatatactaggcatgctaaagatgtccgcgaggctcgggacttcctttcaaagttaggcgatcttagccagacacaaatttttgcgaagattgaaaatgttgagggattgacccattttgatgagattctgcaagaagctgatggtattattctttctcgtggaaatttgggcattgatcttccaccagagaaggtttttctatttcaaaaatctgccctacacaagtgtaatatggctgggaaacctgctgtgcttacacgtgttgtggacagtatgactgataacttaagaccaactcgtgctgaagccactgatgttgccaatgctgttctagatggaagtgatgcaattcttctgggtgccgagactttacgtggattgtaccctgttgagactatttctactgttggtaggatttgttcagaggctgagaaagttttcaatcaagacctttattttaagaggacagtcaaatatgttggagaacccatgacccacttggaatctattgcatcctctgcggtacgggctgctattaaggtgaaggcttccattataatttgcttcacttcatctggaagggctgcaagattgattgcaaagtataggccgacaatgcctgttctctctgtggtgatcccccgacttaagacaaatcagctaaagtggagcttcagtggagcttttgaggcaaggcaatcacttattgtaagaggtctctttcccatgcttgctgatcctcgtcatcctgctgagtctgagacaacaactgcatcaaatgaatctattcttaaggttgcccttgatcatggaaaagcattgggagttataaagtcacacgaccgtgttgttgtttgtcagaaactcggcgatgcatcagtggttaagattattgagcttgaagattaa

SEQ ID NO: 15917 - protein, 529 aa, Medicago truncatula
MPSSHLLLEEPIRMASILEPSKASFFSAMTKIVGTLGPKSRSVETISGCLKAGMSVARFDFSWCDPEYHQETLENLKTAIKGTKKLCAVMLDTVGAEMQVVNKSETTISLEIDAQVVLTPNQGQEASSEILPINFDGLAQAVKTGDTIFIGQYLFTGSETTSVWLEVSEVKGNDVVCIIKNSATLTGSLFTLHASQIHIDLPTLTEKDKEVISTWGVKNKIDFLSLSYTRHAKDVREARDFLSKLGDLSQTQIFAKIENVEGLTHFDEILQEADGIILSRGNLGIDLPPEKVFLFQKSALHKCNMAGKPAVLTRVVDSMTDNLRPTRAEATDVANAVLDGSDAILLGAETLRGLYPVETISTVGRICSEAEKVFNQDLYFKRTVKYVGEPMTHLESIASSAVRAAIKVKASIIICFTSSGRAARLIAKYRPTMPVLSVVIPRLKTNQLKWSFSGAFEARQSLIVRGLFPMLADPRHPAESETTTASNESILKVALDHGKALGVIKSHDRVVVCQKLGDASVVKIIELED

SEQ ID NO: 15918 - DNA, 1437 bp, Nitrosovibrio sp
  CDS (1)..(1437): transl_table=11
atgatccgaagaacaaaaatagttgccaccctcggtcctgcatccagcgaccccaagacgctcgagcgcatgatccatgccggagtggatgttgtccgcatcaacttctcccacggcagccgggaagagcatatcgcgctggcggagctgacgcgctcgctggcacgttccgccggccacacggtgggcgtgttggcggacctgcaggggccgaaaatccgcatcggcaggtttgagcacggaaaaatcacgctcaaggccggcgacaagttcgtgctggatgccgaatgcgaactcggcaatcaggagcgggtgggactggattacaaggagctgcctaacgacgtggaaaccggctcgacgctgatgctggacgatggtcgcatcgtgctgggcgttgccaacgtcaaggggcggcaggtgtactgcgtggtggaacagggcggggtcctgtccaacaacaagggcatcaaccgcaaaggcggcgggctgagcgcgcccgcgctcaccaaaaaagacatggacgatatccggacagccgccgtgctcaaggcggattatctggccgtgtcctttccgcgctcgggcgatgacatacgctgggcgcgcgacttgatgcgcgaagccggcggcaaaagcctgctgatggcgaaaattgagcgttccgaggcaatccccgcgctgaatgacatactgcaggcttctgacgcgatcatggtggcgcgcggcgacctggcggtggaagtgggcgatgctgtcgtgccggcgctgcaaaagcagatgatacgcgccgctcgcgccgccaacaaactggtggtgacccccacgcagatgatggaatcaatgatcaccagcccgattccgacccgggcggaattgtccgacgtcgccaatgccgtgctggacggaaccgatgcggtcatgctgtcggcggaatccgctgccggccaatacccggtcgagtcggtcgaggcgatggccagggtgtgcctcgaggcggaaaaggaatatctggtgacgcaggagttgcggcgcatgccggacaccgtgccggaaacgatcgaggaagcgattgcccgggcgaccatgttcaccgccggtagcctgaagatccgcgcgattgccgcgctcactcatagcggcgtgaccgcactgctgatgtcgcgcaggagcaccaacgtgccgatcttcgcgttaagcccgcaggaggacacgcgccgcaagacgacgctgtttcacggcgtctatccgatgaaattcggcggcgaccagagtgatcccgagattatcctgaatcaggctgaagacgaactgctcaagcgcggcgcggtgcacatcggtgatctgatcgtgatgaccatcggcgaaccggtcggcaaggcaggcggcaccaatgccatgaagatcgtcaaagtgggggaatacagaaaggcttga

SEQ ID NO: 15919 - protein, 478 aa, Nitrosovibrio sp
MIRRTKIVATLGPASSDPKTLERMIHAGVDVVRINFSHGSREEHIALAELTRSLARSAGHTVGVLADLQGPKIRIGRFEHGKITLKAGDKFVLDAECELGNQERVGLDYKELPNDVETGSTLMLDDGRIVLGVANVKGRQVYCVVEQGGVLSNNKGINRKGGGLSAPALTKKDMDDIRTAAVLKADYLAVSFPRSGDDIRWARDLMREAGGKSLLMAKIERSEAIPALNDILQASDAIMVARGDLAVEVGDAVVPALQKQMIRAARAANKLVVTPTQMMESMITSPIPTRAELSDVANAVLDGTDAVMLSAESAAGQYPVESVEAMARVCLEAEKEYLVTQELRRMPDTVPETIEEAIARATMFTAGSLKIRAIAALTHSGVTALLMSRRSTNVPIFALSPQEDTRRKTTLFHGVYPMKFGGDQSDPEIILNQAEDELLKRGAVHIGDLIVMTIGEPVGKAGGTNAMKIVKVGEYRKA

SEQ ID NO: 15920 - DNA, 1620 bp, Phaeodactylum tricornutum; identical to SEQ ID NO: 8699
  CDS (1)..(1620)

SEQ ID NO: 15921 - protein, 539 aa, Phaeodactylum tricornutum; identical to SEQ ID NO: 8700

SEQ ID NO: 15922 - DNA, 1632 bp, Phaeodactylum tricornutum; identical to SEQ ID NO: 8701
  CDS (1)..(1632)

SEQ ID NO: 15923 - protein, 543 aa, Phaeodactylum tricornutum; identical to SEQ ID NO: 8702

SEQ ID NO: 15924 - DNA, 1542 bp, Phaeodactylum tricornutum; identical to SEQ ID NO: 8703
  CDS (1)..(1542)

SEQ ID NO: 15925 - protein, 513 aa, Phaeodactylum tricornutum; identical to SEQ ID NO: 8704

SEQ ID NO: 15926 - DNA, 1533 bp, Solanum tuberosum; identical to SEQ ID NO: 8707
  CDS (1)..(1533)

SEQ ID NO: 15927 - protein, 510 aa, Solanum tuberosum; identical to SEQ ID NO: 8708

SEQ ID NO: 15928 - DNA, 1533 bp, Citrus sinensis; identical to SEQ ID NO: 8709
  CDS (1)..(1533)

SEQ ID NO: 15929 - protein, 510 aa, Citrus sinensis; identical to SEQ ID NO: 8710

SEQ ID NO: 15930 - DNA, 1509 bp, Glycine max; identical to SEQ ID NO: 8713
  CDS (1)..(1509)

SEQ ID NO: 15931 - protein, 502 aa, Glycine max; identical to SEQ ID NO: 8714

SEQ ID NO: 15932 - DNA, 1530 bp, Zea mays; identical to SEQ ID NO: 8715
  CDS (1)..(1530)

SEQ ID NO: 15933 - protein, 509 aa, Zea mays; identical to SEQ ID NO: 8716

SEQ ID NO: 15934 - DNA, 1767 bp, Lactobacillus casei
  CDS (1)..(1767): transl_table=11
atgaaaaaaaccaagatcgtcagcacgcttggacctgcaagtaacaccactgatatcatcgttaagttgattgaagcgggtgccaacgttttccgtttcaatttctcacatggtgatcatgaagagcatttggcacggatgaacatggttcacgaagctgaaaagatcacgggtaagaccgttggtatcatgctggatacgaagggtgccgaaattcggacaactcttgaagataccccgaatggtaagatcgattttcacaccggtgacaaagttcgcatctccatggatgcaagtctgaaaggcaccaaggaaaaagttgctgttacctatcctggcctttatgatgacactcacgttggcggccatgttttgtttgatgatggcttgattgacatgaagatcaccgaaaaggacgaaaagaaccgtgaactcgttaccgttgttcaaaacgacggtgtccttggtggtaagaaaggtgtcaacgctcctggtgttgccatcaacttgcctgggattacggaaaaagactccgatgacattcgtttcggcttggacaacgggatcaacttcattgctgcttcctttgttcgtaagcctcaagacgttttagacattcgtgaactccttgaagaaaagaacgcacttaatgttcagatcttccctaagatcgaatcacaagaaggcatcgacaacattgatgacatcttgaaggtttccgatggcttaatggttgctcgtggcgacatgggtgttgaaattccatttgaacatgttccgatcgttcagaagcgcttgatcaagaagtgcaactctttgggtaagccggttatcacggctacacaaatgttggattccatgcaagaaaacccacgtcctacccgtgccgaagtaaacgacgttgccaatgccgtgtttgatggcaccgatgcaacgatgctttctggcgaatctgctaatggtgactatccggttgaatccgttgctgcaatggctcggattgacgaatacaccgaagcagcgatgatggatcaggatgccttcgcattgaaggaatacagtaacaagaacgtcaccgaagctgttggccaaagtgttgcacacacggctcgcaacttaggggttaagaccattgttgctgcgaccgaatccggctacactgcccgcatgatttccaagtatcgtccgaaggctgacattcttgccattaccttcagcgaaaagacccaacgcggcctgatggtcaactggggtgtttacccaatcattgctgaaaagcctgctaacaccgatgctatgttcgacttggcaaccaagaaggcccaagaccttggctttgctaaggaaggcgatctgatcttgatcactgccggtgttcctgttggtgaatctggcacaaccaacgtaatgaaggttcaactcattggctccaagctggttcaaggctcaggtgtcggcgacgaatccacgattggtaaggcagtcatcgcaagcaacgctcaagaagctgctgctaagatgcaaaagggtgacattctggttgttaagacgactgacaaagattacttgccagcaatcgaaaaagcagctgccttggttgttgaaaccggtggcttgaccagtcacgcagctgttgttggtattgctatgggtatcccagttgttgttggtgctgaaaatgctaccagcgtcatctccgatggccagatcattactgttgactcccgtcgtgggatcatctacaaaggtgctaccaacgccctttaa

SEQ ID NO: 15935 - protein, 588 aa, Lactobacillus casei; identical to SEQ ID NO: 8718

SEQ ID NO: 15936 - DNA, 1521 bp, Saccharomyces bayanus; identical to SEQ ID NO: 8719
  CDS (1)..(1521)

SEQ ID NO: 15937 - protein, 506 aa, Saccharomyces bayanus; identical to SEQ ID NO: 8720

SEQ ID NO: 15938 - DNA, 1434 bp, Stigmatella aurantiaca
  CDS (1)..(1434): transl_table=11
atgcgacgagcaaagattgtctgcacccttggtcccgccagccagagccaggacatgttagaggccctcatcgaggccggcatggacgtggcccggttgaacttctcccacggcagtcacgagcagcacgcggagaacatcgccaaactccgcgcggcttcgctgaagcttcgcaaggcggtgggcatcctcggagacctgcaaggaccgaagatccgcacgggccgcttcatcaccggcagcacggtgctgaaggaaggcgccatcttttccatcaccaccgacgagagcgtgaagggcaacgacgacatcgtgtccaccacgtacgcgcacctggcggcggacgtgaatcccggggaccgcatcctcttggatgacggcctgctggagctcaaggtcctcgagacggacaagaagcagctcctgcgcacgcaggtcgtcatcggcggcacgctgaagaacaacaagggcatcaacctgccgggcgtggcggtgcgcgccgacgcgctgacgccgaaggaccgcgaggacctcgtcttcggcatcaaggaaggcgtggacttcctggcgctgtccttcgttcgccagccggcggacatcgagctggcgcgccaggccatggcggaggcgggccggcaggtgcccatcgtcgccaagctggagaagccggaggccatcgcgcggctggacgccatcctggacaagacggacggggtgatggtggcgcgcggcgacctgggcgtggagattccccccgaggaggtgccggccgtccagaaggacatcatccggcgctccaaccagcgcggcctgccggtcatcgtggccacgcagatgctcaactcgatgatcgagaacccccgccccacgcgcgcggaggccagcgacgtggccaacgccgtgttcgacggggcggacgcggtcatgctctcgggcgagacggccagcggccgctaccccatcgagtcggtgcagatgatggaccgcatcgtcctggcggccgagtcggcgggtcgggcgcagtcgtcgctgggccggatcccggatgggcccatcggcgtgccctcgcacttcccggacgtgattgcccgggtggcgtgccaggcggcgcaggcgagcggcgcttcgctcatcgcggcgttcacgctgtcgggcgtgacggcgcggctgctggcgcactaccggccggcggtccccatcgtggcgttcagcccgaaccaggaagtgcgccgccgcctggcgctgctctggggcgtggtgccgcgggtgctggagcccatccaggagaccgaggcgatggtgaagcgcgtggaggaggaactgctggcgcgcggactggcgcgcaagggcgagcgcatcgtcatcgtctttggcgcgcccgtgggacagccagggaagatcaacagcctgcgcctgcacaccatccagggctga

SEQ ID NO: 15939 - protein, 477 aa, Stigmatella aurantiaca
MRRAKIVCTLGPASQSQDMLEALIEAGMDVARLNFSHGSHEQHAENIAKLRAASLKLRKAVGILGDLQGPKIRTGRFITGSTVLKEGAIFSITTDESVKGNDDIVSTTYAHLAADVNPGDRILLDDGLLELKVLETDKKQLLRTQVVIGGTLKNNKGINLPGVAVRADALTPKDREDLVFGIKEGVDFLALSFVRQPADIELARQAMAEAGRQVPIVAKLEKPEAIARLDAILDKTDGVMVARGDLGVEIPPEEVPAVQKDIIRRSNQRGLPVIVATQMLNSMIENPRPTRAEASDVANAVFDGADAVMLSGETASGRYPIESVQMMDRIVLAAESAGRAQSSLGRIPDGPIGVPSHFPDVIARVACQAAQASGASLIAAFTLSGVTARLLAHYRPAVPIVAFSPNQEVRRRLALLWGVVPRVLEPIQETEAMVKRVEEELLARGLARKGERIVIVFGAPVGQPGKINSLRLHTIQG

SEQ ID NO: 15940 - DNA, 1584 bp, Arabidopsis thaliana; identical to SEQ ID NO: 8721
  CDS (1)..(1584)

SEQ ID NO: 15941 - protein, 527 aa, Arabidopsis thaliana; identical to SEQ ID NO: 8722

SEQ ID NO: 15942 - DNA, 1533 bp, Glycine max; identical to SEQ ID NO: 8723
  CDS (1)..(1533)

SEQ ID NO: 15943 - protein, 510 aa, Glycine max; identical to SEQ ID NO: 8724

SEQ ID NO: 15944 - DNA, 1536 bp, Glycine max; identical to SEQ ID NO: 8725
  CDS (1)..(1536)

SEQ ID NO: 15945 - protein, 511 aa, Glycine max; identical to SEQ ID NO: 8726

SEQ ID NO: 15946 - DNA, 1584 bp, Arabidopsis thaliana; identical to SEQ ID NO: 8729
  CDS (1)..(1584)

SEQ ID NO: 15947 - protein, 527 aa, Arabidopsis thaliana; identical to SEQ ID NO: 8730

SEQ ID NO: 15948 - DNA, 1665 bp, Drosophila melanogaster
  CDS (1)..(1665)
atgtcgttgtccgcgaaatccgtgctaaaggagggctccacacagctgagccacatctgcgagctggatcttgcccagcaggcgtcccatcagcgcctggtgtccctgatcgcgaccatatcggtcagttcccggaacgcggacaccatatacaccatgataatgcgcggagtgaacatattccgtctgaacttctcccacgaatcgcacgagatgcactcgaaaacgatagagctgatcaacgaggcgctggagaggattcataaggagacgggccaaatccgaacggtcgccattgcggcggacacgcgtggaccccagatccgtactggcctactggatggagatgtgttcctgcgcagcggcgacaatctgcggctctcgatcaatcgggatctttacgacaagggcaacaaggaggcggtctacgtggactacccgaacatcatcaatctgaccaagaccggcgatcgcctgttcatcgacgacggcaggctgctgctccacatcttggaagtgggagtggatggtctgctgtgcgaggtcatccatggcggccagctgaacaacaactgcaacgtgatcctgccggagatcgagatcgatttgcccgccgtctccgagaaggatatgtttgacatccagttcagcataaaggccaacgtggacttcctcttcgcctccgccgtgcgcagtgccaagaacgtcaaggagctgcgaacggtgctcggcgagaagggcaagcacatcaagatcatcgccaagatggacagcaagatagctctgagcaggttctcggagattctgcgtgcggcggatggattgctgctttcgcgagcggatctgggcacccagatacccattgaaaagctcttcatcacccagaagagcatactgggccaatgcaacaaggtgggcaagccggtcatagtggcctcccacatcctcgagtccatgcgcaccctgccccatcccacacgggccgagtgcttcgatttggccaacgccatcatcgatggagcagactgcatcatgctgtcgtcggaagtggccattgggtcgtttcccaaggagacggtggccacctgcgacacattgtgccgggaggccgagaaggtgctctggtttcgagacctcttctccgacctggtcagcgaggtgcgtggcgagctggacgcggcccactcgctggccattgcagccgtggagacggccaagcgcaccaatgccaccctgatcatcgtgctgaccacctcgggccgctcggccactctggtcagcaagttccgaccccgctgtcccatcatggctatcacgcgctgcgaacggaccgcccgctgggtctatctgcatcgcggagtcctgccgatactgtacacctcggagcccagcacggactacgccaccgatgtggacgctcgggtgcagttcgccatgacctctgccaagaagtggggcatcatcgacgacggcgatcccattgtgatagtgagtgcctggaaggatggcggcgggttcaccaacaatgtccgtgtggtctacgccttcttcgaggcggatcgcgtggactgcctgttccggtcggacaggcggcattctcgaaagaacaccaacctgcagatggcaaatcgggagcctgatgataagaaaagtgctaatgcgtag

SEQ ID NO: 15949 - protein, 554 aa, Drosophila melanogaster
MSLSAKSVLKEGSTQLSHICELDLAQQASHQRLVSLIATISVSSRNADTIYTMIMRGVNIFRLNFSHESHEMHSKTIELINEALERIHKETGQIRTVAIAADTRGPQIRTGLLDGDVFLRSGDNLRLSINRDLYDKGNKEAVYVDYPNIINLTKTGDRLFIDDGRLLLHILEVGVDGLLCEVIHGGQLNNNCNVILPEIEIDLPAVSEKDMFDIQFSIKANVDFLFASAVRSAKNVKELRTVLGEKGKHIKIIAKMDSKIALSRFSEILRAADGLLLSRADLGTQIPIEKLFITQKSILGQCNKVGKPVIVASHILESMRTLPHPTRAECFDLANAIIDGADCIMLSSEVAIGSFPKETVATCDTLCREAEKVLWFRDLFSDLVSEVRGELDAAHSLAIAAVETAKRTNATLIIVLTTSGRSATLVSKFRPRCPIMAITRCERTARWVYLHRGVLPILYTSEPSTDYATDVDARVQFAMTSAKKWGIIDDGDPIVIVSAWKDGGGFTNNVRVVYAFFEADRVDCLFRSDRRHSRKNTNLQMANREPDDKKSANA

SEQ ID NO: 15950 - DNA, 1740 bp, Arabidopsis thaliana; identical to SEQ ID NO: 8731
  CDS (1)..(1740)

SEQ ID NO: 15951 - protein, 579 aa, Arabidopsis thaliana; identical to SEQ ID NO: 8732

SEQ ID NO: 15952 - DNA, 1581 bp, Aspergillus oryzae; identical to SEQ ID NO: 8733
  CDS (1)..(1581)

SEQ ID NO: 15953 - protein, 526 aa, Aspergillus oryzae; identical to SEQ ID NO: 8734

SEQ ID NO: 15954 - DNA, 1503 bp, Streptococcus thermophilus
  CDS (1)..(1503): transl_table=11
atgaataaacgcgtaaaaatagttgctacacttggtcctgcggttgaaatccgtggtggcaagaaatttggtgaagatggttactggagtgaaaaacttgaccctgatgcatctgctaaaaacattgctcaattgatcgaggaaggtgctaacgttttccgtttcaacttctcacatggtaaccacgctgagcaaggtgaacgtatggatgtcgtacgtatggctgaatctattgctggtcaaaaagtaggtttccttcttgacactaagggacctgaaatccgtactgaattgtttgaaggtgatgctaaagagtatgcatacaaaactggtgaacaaatccgtattgctactaaacaaggtctcaaatcaactcgcgacgttattgctttgaacgttgctggtgcacttgacattttcgacgatgtagaagttggtaaacaagttcttgtggatgatggtaaacttggtcttcgtgttgtagacaaggatgctgaaaaacgtgaattcatcgttgaagttgaaaatgatggtattattgctaaacaaaaaggtgtaaacatcccttacactaaaattcctttcccagcacttgctgaacgtgataatgctgatattcgttttggtctcgaacaaggtattaactttatcgcaatctcatttgtacgtactgcgaaagacgtacaagaagtacgtgctatctgtgaagaaactggaaacggccacgttaaattgttggctaaaatcgaaaaccaacaaggtatcgataatatcgatgaaatcattgaagctgctgatggtatcatgatcgctcgtggtgacatgggtatcgaagtaccattcgaaatggttccagtttaccaaaaaatgattatcactaaagtaaatgctgctggtaaaattgttgttacagctacaaacatgcttgaaacaatgacagaaaaaccacgtgcaactcgttctgaagtatctgacgtgtttaacgcagttatcgacggtactgatgcgacaatgctttctggtgagtctgcaaatggtccatatcccgttgaatcagttcgtacaatggccacaattcataaaaacgctcaaactcttcttaaagagtacggtcgtcttaattcatcaacatttgatcgctcaagtaacactgaagtcgttgcatctgcagttaaagatgctactaactcaatgcatatccaacttattgttgcacttactgaatctggtaacacagctagcttgatcgatacataccgtccagaagctgacatctgggcaataacattcgatgaacttactcaaaaatcattgatgcttaactggggtgttattccagttgttactgaaacaccttcatctactgatgatatgtttgaagttgctgagcgtgttgctcttgaatcaggtcttgtagaatcaggtgataacattgttattgttgctggtgttccagttggttctggtaatacaaatactatgcgtatccgcacagttaaataa

SEQ ID NO: 15955 - protein, 500 aa, Streptococcus thermophilus
MNKRVKIVATLGPAVEIRGGKKFGEDGYWSEKLDPDASAKNIAQLIEEGANVFRFNFSHGNHAEQGERMDVVRMAESIAGQKVGFLLDTKGPEIRTELFEGDAKEYAYKTGEQIRIATKQGLKSTRDVIALNVAGALDIFDDVEVGKQVLVDDGKLGLRVVDKDAEKREFIVEVENDGIIAKQKGVNIPYTKIPFPALAERDNADIRFGLEQGINFIAISFVRTAKDVQEVRAICEETGNGHVKLLAKIENQQGIDNIDEIIEAADGIMIARGDMGIEVPFEMVPVYQKMIITKVNAAGKIVVTATNMLETMTEKPRATRSEVSDVFNAVIDGTDATMLSGESANGPYPVESVRTMATIHKNAQTLLKEYGRLNSSTFDRSSNTEVVASAVKDATNSMHIQLIVALTESGNTASLIDTYRPEADIWAITFDELTQKSLMLNWGVIPVVTETPSSTDDMFEVAERVALESGLVESGDNIVIVAGVPVGSGNTNTMRIRTVK

SEQ ID NO: 15956 - DNA, 1413 bp, Selenomonas ruminantium; identical to SEQ ID NO: 8737
  CDS (1)..(1413): transl_table=11

SEQ ID NO: 15957 - protein, 470 aa, Selenomonas ruminantium; identical to SEQ ID NO: 8738

SEQ ID NO: 15958 - DNA, 1545 bp, Arabidopsis thaliana; identical to SEQ ID NO: 8739
  CDS (1)..(1545)

SEQ ID NO: 15959 - protein, 514 aa, Arabidopsis thaliana; identical to SEQ ID NO: 8740

SEQ ID NO: 15960 - DNA, 1704 bp, Arabidopsis thaliana; identical to SEQ ID NO: 8741
  CDS (1)..(1704)

SEQ ID NO: 15961 - protein, 567 aa, Arabidopsis thaliana; identical to SEQ ID NO: 8742

SEQ ID NO: 15962 - DNA, 1533 bp, Lilium longiflorum; identical to SEQ ID NO: 8743
  CDS (1)..(1533)

SEQ ID NO: 15963 - protein, 510 aa, Lilium longiflorum; identical to SEQ ID NO: 8744

SEQ ID NO: 15964 - DNA, 1413 bp, Vibrio marinus; identical to SEQ ID NO: 8745
  CDS (1)..(1413): transl_table=11

SEQ ID NO: 15965 - protein, 470 aa, Vibrio marinus; identical to SEQ ID NO: 8746

SEQ ID NO: 15966 - DNA, 1752 bp, Ricinus communis; identical to SEQ ID NO: 8747
  CDS (1)..(1752)

SEQ ID NO: 15967 - protein, 583 aa, Ricinus communis; identical to SEQ ID NO: 8748

SEQ ID NO: 15968 - DNA, 1782 bp, Nicotiana tabacum; identical to SEQ ID NO: 8749
  CDS (1)..(1782)

SEQ ID NO: 15969 - protein, 593 aa, Nicotiana tabacum; identical to SEQ ID NO: 8750

SEQ ID NO: 15970 - DNA, 1494 bp, Arabidopsis thaliana; identical to SEQ ID NO: 8751
  CDS (1)..(1494)

SEQ ID NO: 15971 - protein, 497 aa, Arabidopsis thaliana; identical to SEQ ID NO: 8752

SEQ ID NO: 15972 - DNA, 1533 bp, Solanum tuberosum; identical to SEQ ID NO: 8753
  CDS (1)..(1533)

SEQ ID NO: 15973 - protein, 510 aa, Solanum tuberosum; identical to SEQ ID NO: 8754

SEQ ID NO: 15974 - DNA, 1536 bp, Glycine max; identical to SEQ ID NO: 8755
  CDS (1)..(1536)

SEQ ID NO: 15975 - protein, 511 aa, Glycine max; identical to SEQ ID NO: 8756

SEQ ID NO: 15976 - DNA, 1527 bp, Nicotiana tabacum
  CDS (1)..(1527)
atggcgattgagaataacaacaatggagtgaatttttgtacggtgaagaggccgaagacgaagatagtatgtactttggggccagcatctcgatcggtgccgatgatcgagaagcttctacgggcaggcatgaacgtggcccgattcaacttttctcatggatctcacgactatcatcaggagactattgacaatctccgtcaagctatggagagtaccggtattctctgtgccgttatgcttgacaccaagggtccagaaattcgaacagggtttttaaaagatgctaagcctgttcaacttaaacagggtcaggagatcacaatctcaactgattacagcattaaaggtgatgagagtatgatatgcatgagctacaaaaagttagcagaggacgtaaagccacaaagtgtgatcctctgtgcagatggccaaatcacctttacagttttgtcttgtgacaaagagaacggtttggatcgatgccgctgtgagaacactgctgttcttggtgaaagaaagaatgtcaatctcccgggagtaattgtggatctgccaacattgacagataaagacaaggatgacattttaaactggggagttccgaatcatattgacatgattgcgttatcttttgttcgtaagggttcagatctcgtggaggttcggaagctgctaggtgaacatgcaaagaacattcttctgatgtctaaggttgaaaaccaggaaggtgtagcgaattttgatgacattcttctcaactctgatgcatttatggtggcaagaggtgacctgggaatggaaattccaattgagaagatatttttggctcaaaaggtaatgatttacaagtgcaacatccaagggaagcctgttgtcacagcaacacagatgttggagtccatgatcaaatctccaaggccaactcgtgcagaagcaacagatgttgccaatgctgttcttgatggcacagactgtgtcatgcttagtggtgaaacagctgctggagcttaccctgatcttgcagtgggtaccatggctaagatttgtattgaagcagaaagcacaattgattatccagatgttttcaaaagaattatgtcaaatgccccagttcccatgagcccattggagagccttgcatcttctgctgttcgaaccgctaactctgcaaaagctgctcttatcctagtgttaaccaggggaggaagtactgcaaaattggtggccaagtacagacctggaatgcctatattgtcggtggttgtccccgagatcaaaactgattcttttgattggacttgcagtgacgagtctccagcaaggcatagccttatattcaggggattggttcccgttctccatgcaggatctgctagggcttctcatgaagagtctacagaagaagcactggactttgctcttcaacatgccaaaacaaaagggttatgcaagcaaggagactccgttgtagccctacaccgtgttggaactgcatctgtgatcaagattgttacagtcaagtga

SEQ ID NO: 15977 - protein, 508 aa, Nicotiana tabacum; identical to SEQ ID NO: 8758

SEQ ID NO: 15978 - DNA, 1689 bp, Nicotiana tabacum; identical to SEQ ID NO: 8759
  CDS (1)..(1689)

SEQ ID NO: 15979 - protein, 562 aa, Nicotiana tabacum; identical to SEQ ID NO: 8760

SEQ ID NO: 15980 - DNA, 1506 bp, Candida glabrata; identical to SEQ ID NO: 8763
  CDS (1)..(1506)

SEQ ID NO: 15981 - protein, 501 aa, Candida glabrata; identical to SEQ ID NO: 8764

SEQ ID NO: 15982 - DNA, 1413 bp, Escherichia coli O157; identical to SEQ ID NO: 8765
  CDS (1)..(1413): transl_table=11

SEQ ID NO: 15983 - protein, 470 aa, Escherichia coli O157; identical to SEQ ID NO: 8766

SEQ ID NO: 15984 - DNA, 1413 bp, Salmonella typhi
  CDS (1)..(1413): transl_table=11
atgaaaaagacgaaaattgtttgtactatcggtccgaaaaccgaatccgaagagatgttaagcaaaatgctggacgcgggcatgaacgtgatgcgtctgaacttctctcatggcgattatgcagaacacggtcagcgtatccagaacttgcgcaacgtgatgagcaaaactggtaaaaaagctgctattctgcttgatactaaaggaccagaaatccgcaccattaaactggaaggcggtaacgacgtttcgctgaaagcgggccaaacctttacttttaccaccgacaaatccgtggtcggtaataatgaaatcgttgccgtcacctatgaaggcttcaccagcgacctgagcgttggcaacaccgtcctggttgacgatggtctgatcggtatggaagtgaccgccatcgaaggcaataaagtcatttgtaaggtgctgaacaacggcgatctgggcgagaacaaaggcgttaacctgccgggcgtttctattgctctgccggcgctggctgaaaaagacaaacaggacctgatcttcggttgcgaacagggcgttgactttgttgctgcgtcctttatccgtaaacgttctgacgttgtcgaaattcgcgagcatctgaaagcccacggcggcgaaaacatccagattatctctaagatcgaaaaccaggaaggcctgaacaacttcgatgaaattctcgaagcttccgacggcatcatggttgcgcgtggcgacctgggcgtagaaatcccggttgaagaagtgatctttgcgcagaaaatgatgatcgaaaaatgtatccgcgcacgtaaagtcgtgatcaccgcgactcagatgctggattctatgatcaaaaatccgcgtccgacccgcgcagaagcaggcgatgttgcaaacgccatcctcgacggtacggatgcggttatgctgtccggcgaatccgcaaaagggaaatacccgctggaagccgtttctatcatggcgaccatctgcgaacgtaccgaccgcgtcatgaacagccgtctggactacaacaacgacagccgtaaactgcgcattacggaagcggtatgccgcggcgcggtagaaaccgccgaaaaattgaaagcgccgctgatcgtggtagcgacccagggcggtaaatccgctcgcgccgtgcgtaaatacttcccggacgccaccatcctggcattgaccaccaatgaagtgaccgcccgtcagttagtactgagcaaaggcgtggtatcgcagctggtgaaagaaatcaattctactgatgatttctaccgtctgggcaaagatgtcgccctacaaagcggcctcgcccagaaaggcgacgtcgtagtgatggtctccggcgcgctggttccaagcggcaccactaacaccgcctctgttcacgtactgtaa

SEQ ID NO: 15985 - protein, 470 aa, Salmonella typhi
MKKTKIVCTIGPKTESEEMLSKMLDAGMNVMRLNFSHGDYAEHGQRIQNLRNVMSKTGKKAAILLDTKGPEIRTIKLEGGNDVSLKAGQTFTFTTDKSVVGNNEIVAVTYEGFTSDLSVGNTVLVDDGLIGMEVTAIEGNKVICKVLNNGDLGENKGVNLPGVSIALPALAEKDKQDLIFGCEQGVDFVAASFIRKRSDVVEIREHLKAHGGENIQIISKIENQEGLNNFDEILEASDGIMVARGDLGVEIPVEEVIFAQKMMIEKCIRARKVVITATQMLDSMIKNPRPTRAEAGDVANAILDGTDAVMLSGESAKGKYPLEAVSIMATICERTDRVMNSRLDYNNDSRKLRITEAVCRGAVETAEKLKAPLIVVATQGGKSARAVRKYFPDATILALTTNEVTARQLVLSKGVVSQLVKEINSTDDFYRLGKDVALQSGLAQKGDVVVMVSGALVPSGTTNTASVHVL

SEQ ID NO: 15986 - DNA, 1413 bp, Salmonella typhimurium; identical to SEQ ID NO: 8767
  CDS (1)..(1413): transl_table=11

SEQ ID NO: 15987 - protein, 470 aa, Salmonella typhimurium; identical to SEQ ID NO: 8768

SEQ ID NO: 15988 - DNA, 1503 bp, Saccharomyces cerevisiae; identical to SEQ ID NO: 8769
  CDS (1)..(1503)

SEQ ID NO: 15989 - protein, 500 aa, Saccharomyces cerevisiae; identical to SEQ ID NO: 8770

SEQ ID NO: 15990 - DNA, 1449 bp, Agrobacterium vitis
  CDS (1)..(1449): transl_table=11
atgttcatacgcaacaaccggcgatcaaagatcgtcgcgacggtcggaccggcgtcaagttcgcccgacatgcttcgctcactgtttctcgccggtgtcgatacgttccgcctgaatttcagccatggtgcccgggccgatcacgcggaagtctataggaacatccgggctctcgagcaggagcatgatgctgctatcgccgtgctgcaggatcttcagggtccgaagatccggatcggagttctggcacatggcaggctcgatctcgcacgtggatccaccatcggatttatccttggccgtgagggtggtgaaggaatgaacgatattccgctacctcatcgggaaatcttcgaggtggcggtgcccggaatggacctcctgatcgacgacggtagaataaaagtccggatcatggaggtgatggacgggcggcttgtttgcgaggtcctcaatggaggcgccttgtcgaaccgcaagggtgtcaacgtgcccggcgctgtcctggacatttccccgctcacggcgaaagatcgtgaggacctggaattcgggctcgagcttggcgtcgactgggtcgcactttctttcgttcagcgggcacgcgacatgatcgaagcccggtccctcgttggagacagggctggcctcattgccaagatcgagaagccgtctgccctcgatgacatcgaggatattgtcaggctttcggacagcgtcatggttgcgcgaggtgatctcggcgtggagatcccgccggaggacgttccgggcaagcagaaggaaatcatccgtgcatgccggctagcggccaagcccgtgattgtcgccacacagatgctcgactcgatggtgagttcgccaacgccgacgcgcgctgaagcttcggacgttgccggtgccatctatgatggggcagatgccgtcatgctttccgccgagaccgcaacaggcgcctacccggtggaggcggtcgaaattatgaaccggatcatcgagaagacggagaagcacaagcactaccggccgatccttgaggcaacggaacccgatgtcgctcaatcaccgccgcatgcagttgccactgcagcagccaacgttgccgtggctctgggatcgccggttgtggtggcctatacatcgagcggaacaaccgcggccagaatttcgcgtgccagaccggcattgccaattctggctctcactccgtccgaacaagtcgcgcgccggctcaacatgttctggggggttgtcggcgtgcgatcacaagatgtccacacctatgaggcgtcgctgattcatgcgcaacaggcggtgcaggaagcaaagctggcaagtccctccgatcacattgtcatcgtggcgggatttccatttgcgcaacagggcagcaccaacaatctccgcgtcgttcagatcgccgcaaccgacaacctagagattgcgtag

SEQ ID NO: 15991 - protein, 482 aa, Agrobacterium vitis
MFIRNNRRSKIVATVGPASSSPDMLRSLFLAGVDTFRLNFSHGARADHAEVYRNIRALEQEHDAAIAVLQDLQGPKIRIGVLAHGRLDLARGSTIGFILGREGGEGMNDIPLPHREIFEVAVPGMDLLIDDGRIKVRIMEVMDGRLVCEVLNGGALSNRKGVNVPGAVLDISPLTAKDREDLEFGLELGVDWVALSFVQRARDMIEARSLVGDRAGLIAKIEKPSALDDIEDIVRLSDSVMVARGDLGVEIPPEDVPGKQKEIIRACRLAAKPVIVATQMLDSMVSSPTPTRAEASDVAGAIYDGADAVMLSAETATGAYPVEAVEIMNRIIEKTEKHKHYRPILEATEPDVAQSPPHAVATAAANVAVALGSPVVVAYTSSGTTAARISRARPALPILALTPSEQVARRLNMFWGVVGVRSQDVHTYEASLIHAQQAVQEAKLASPSDHIVIVAGFPFAQQGSTNNLRVVQIAATDNLEIA

SEQ ID NO: 15992 - DNA, 1527 bp, Candida glabrata; identical to SEQ ID NO: 8771
  CDS (1)..(1527)

SEQ ID NO: 15993 - protein, 508 aa, Candida glabrata; identical to SEQ ID NO: 8772

SEQ ID NO: 15994 - DNA, 1443 bp, Escherichia coli; identical to SEQ ID NO: 8363
  CDS (1)..(1443): transl_table=11

SEQ ID NO: 15995 - protein, 480 aa, Escherichia coli; identical to SEQ ID NO: 8364

SEQ ID NO: 15996 - DNA, 1443 bp, Salmonella typhimurium; identical to SEQ ID NO: 8773
  CDS (1)..(1443): transl_table=11

SEQ ID NO: 15997 - protein, 480 aa, Salmonella typhimurium; identical to SEQ ID NO: 8774

SEQ ID NO: 15998 - DNA, 1521 bp, Saccharomyces cerevisiae; identical to SEQ ID NO: 8775
  CDS (1)..(1521)

SEQ ID NO: 15999 - protein, 506 aa, Saccharomyces cerevisiae; identical to SEQ ID NO: 8776

SEQ ID NO: 16000 - DNA, 1377 bp, Aeropyrum pernix
  CDS (1)..(1377): transl_table=11
atgagggggcctgtcaagatagtcgccacggtagggccatcatcatcctctgcctccatactagcacagatgctcagcctaggagttgatgtggctaggataaacgccagccacgggggtgtagagcagtggaatagcatgctggagtcgcttaggagggctgaggaggctgtcgggaagagggtcggagtggctgtcgacctagagggccctagggttaggactggtaacagcgagcctgttaagctggagaagggtgatctcgttacactaggcttcatggagggcgacgtgccggttgacgccagacagtttttcgaaacaatagacgagggcgatatagtgcttctcgacgacgggaagataatcctccaggtggagtctgtggaggggttccgggttaaagccagggttctagagggtggagtgctagggcctaggaagggcgtggttgttagaggtaaggagcccgatctcccgccactctcggctaaggataggagggcgctcgagttcttcgctgacaagggggtcagccacgtctatgtgagcttcgcccgcagtgctgaacatgttgagaaggttcgtaccgtggtgagaaggctcggactgaggcaggccaggattttcgccaagatagaggggcctagcggcgtgtctaggataggagagattgctgaggccagcgatggcgtgataatagctagaggagacctcgggatgcactacagcctagaggagctcccggagattcaggagcttatagtatgggaggctaggaagaggtacaagactgttgtgctagccacggagttcctgtcaagcatgatcgagaagccggtccccactagaagcgaggtagtcgatatataccaggcggtgcttcagacggcggacgcgctcatgctgacgggtgagactgccataggcaagtaccccgtcaagtctgtacagtggatggcaaagatatcctcccgagcctacaaaaagctggcgactagccccccggagaggcccaggcccacgtcgaccccctacaagctagcattggggcttgtagagctggcggagagcctcgactcccctctagtcgtctacagtaagaccggcaggttcgccgagaggcttgcaagcttcaagccgctcaaaaccttctacgtgggggtgcccagccgtgaggtggagagggttgtcagacacctctggggggctgagcccatagttgtgggcgattatccctacgaagcgggcctcgccaagacctatgagaagcttcgtagagagaacattatacacggtgatgaaaccgtggttgaggcggcctggagcagcgagaggggaatatacataatcagagttaggaacctggagttctag

SEQ ID NO: 16001 - protein, 458 aa, Aeropyrum pernix
MRGPVKIVATVGPSSSSASILAQMLSLGVDVARINASHGGVEQWNSMLESLRRAEEAVGKRVGVAVDLEGPRVRTGNSEPVKLEKGDLVTLGFMEGDVPVDARQFFETIDEGDIVLLDDGKIILQVESVEGFRVKARVLEGGVLGPRKGVVVRGKEPDLPPLSAKDRRALEFFADKGVSHVYVSFARSAEHVEKVRTVVRRLGLRQARIFAKIEGPSGVSRIGEIAEASDGVIIARGDLGMHYSLEELPEIQELIVWEARKRYKTVVLATEFLSSMIEKPVPTRSEVVDIYQAVLQTADALMLTGETAIGKYPVKSVQWMAKISSRAYKKLATSPPERPRPTSTPYKLALGLVELAESLDSPLVVYSKTGRFAERLASFKPLKTFYVGVPSREVERVVRHLWGAEPIVVGDYPYEAGLAKTYEKLRRENIIHGDETVVEAAWSSERGIYIIRVRNLEF

SEQ ID NO: 16002 - DNA, 1599 bp, Agaricus bisporus
  CDS (1)..(1599)
atgtatcccgtcgatggcatccgttctcagatcgagtggaacaccactcttaacgtctctgatgctcctgtcccgactgagaccactaaatatcatcgcaagacagctatcattgcgaccattgggcctaaaatcaataccgtcgaaaagctcactgacgttcgcctagctggtgtaaacatcgttcgcatgaatttctcgcacggcacccatgagtaccatcagagtgttattgataacaccaggcaaatgatcaaaaacgacccacatgggcgccccgtagctattgctttggataccaaaggtcccgaaattcggaccggtcagacgagggatggcaatgactatcccattaaggctggggatgaatttatcgtcaccacagatcccaagtatagtgatatatgcgacaataaagttttgttcgttgactacgccaatcttgcaagcgtcactgcccctggcaaactgatctatattgatgatggtatcatctctcttctcattctctctattgatggtatgaacctccatgttcgtgctctcaataatgggaccctctcctctcgcaagggtgtaaatttgcccaaaacggacgtcgaccttccaccactttccgagaaagacaaagatgatctgcgtttcgggattcgtaatggagtcgatatgatcttcgcgtcttttatccgccgtggtgaggacgtaagacagatccgtgaagttctcggccccgatggtgccagcatcaaaattatcgtcaagattgaaaatgagcaaggtgtcgctaactttgatgagattttaaaggaggccgacggtgtcatggttgctcgcggcgatttgggaattgaaattcctgcaagtcaagtattccttgctcagaagatgatgatcgccaagtgcaacattgttgggaagccagtgatcgtcgcaactcaaatgcttgagtccatgacgtacaacccccggcctactcgtgcggaagttagtgacgtcgcaaatgctgtccttgatggctctgattgtgtcatgttgtcgggagagactgctaagggatcttatcccgttcaatctgtcctgatgatggcggagacttgcttgcttgcggaaactgctatttgctacccgcctctatatgacgacctccgcgctgtccaggctcggccaacagaaactgcggagactgttgctatcgccgctgttgctgctgcagccgaacaggatgccaaagcactacttgtcctatcaacaagtggggagactgcccgtctcgtttccaagtatcgccccaagatcccgatcatcactgtcacccgtaatgagcaaaccgcaagacaaatccacttgcatcgcggttgctatcctttctggtaccctgaacctcgaggtgtccaaaaccatcaatggcagactgatgtggacaaccgcatccggtttggtcttcgcaacgctttggcactcaatgtcatccaacctggcgccagtattatcgcagtgcagggttggaagggcggtcttggtcacaccaatacgcttcgcattctgacagtgcccactgaccctgccgaccttgagcttcagcctctgggttctctataa

SEQ ID NO: 16003 - protein, 532 aa, Agaricus bisporus
MYPVDGIRSQIEWNTTLNVSDAPVPTETTKYHRKTAIIATIGPKINTVEKLTDVRLAGVNIVRMNFSHGTHEYHQSVIDNTRQMIKNDPHGRPVAIALDTKGPEIRTGQTRDGNDYPIKAGDEFIVTTDPKYSDICDNKVLFVDYANLASVTAPGKLIYIDDGIISLLILSIDGMNLHVRALNNGTLSSRKGVNLPKTDVDLPPLSEKDKDDLRFGIRNGVDMIFASFIRRGEDVRQIREVLGPDGASIKIIVKIENEQGVANFDEILKEADGVMVARGDLGIEIPASQVFLAQKMMIAKCNIVGKPVIVATQMLESMTYNPRPTRAEVSDVANAVLDGSDCVMLSGETAKGSYPVQSVLMMAETCLLAETAICYPPLYDDLRAVQARPTETAETVAIAAVAAAAEQDAKALLVLSTSGETARLVSKYRPKIPIITVTRNEQTARQIHLHRGCYPFWYPEPRGVQNHQWQTDVDNRIRFGLRNALALNVIQPGASIIAVQGWKGGLGHTNTLRILTVPTDPADLELQPLGSL

SEQ ID NO: 16004 - DNA, 1506 bp, Ashbya gossypii; identical to SEQ ID NO: 8777
  CDS (1)..(1506)

SEQ ID NO: 16005 - protein, 501 aa, Ashbya gossypii; identical to SEQ ID NO: 8778

SEQ ID NO: 16006 - DNA, 1581 bp, Aspergillus niger; identical to SEQ ID NO: 8779
  CDS (1)..(1581)

SEQ ID NO: 16007 - protein, 526 aa, Aspergillus niger; identical to SEQ ID NO: 8780

SEQ ID NO: 16008 - DNA, 1758 bp, Bacillus licheniformis; identical to SEQ ID NO: 8781
  CDS (1)..(1758): transl_table=11

SEQ ID NO: 16009 - protein, 585 aa, Bacillus licheniformis; identical to SEQ ID NO: 8782

SEQ ID NO: 16010 - DNA, 1761 bp, Bacillus psychrophilus
  CDS (1)..(1761): transl_table=11
atgagaaaaacgaaaatagtatgtacgattggccctgcaagtgaatcaccggaattattggaacaacttattgaggctggtatgaatgtagcgaggctgaatttttcccatggtaatcatgcggaacataaagcccgtatcgattccattagaaaagtcgcacgtgaaaaaggcaaagttgttgggattctattagatacgaaaggaccagaaattcggacgcattctatgatgaatggaaagttggaacttgtaacaggacaaaaaattgatatttccatgacgcaagtcgaaggaaacaatgatgtattttcagtaagttacgataaacttattgaagatgtaaacgagggttctgttattcttttagacgatggtctaatccaattagaagttactggtaaagacgtagcacgagggttaattcatacactaattattaattcggggtcattaagcaataataagggcgttaacataccgggtgtttcagtacaacttcctggaatgacggaaaaagatgcagaagatatcctgtttggtattagggaaggtgtcgacttcatagctgcctcattcgtaagacgggcttccgatgttatggaaatccgtgcccttcttgagaacaacaacggctcgaacctgcaaattattccgaagatagaaaaccaagaaggcgtcgacaatatcgatgaaattttgaatgtttcagatggtcttatggtagcacgtggtgatctgggtgtagaaataccaccagaagaagtaccacttgtccagaaaaatttgattgagaagtgtaaccaggcgggtaaaccggttatcacggcaacacaaatgcttgattcgatgcagcgtaacccgcgtcctacacgtgcagaagcgagcgatgtagcgaatgcgatttttgacggtaccgatgcaattatgctgtcaggagagacggcagcaggaatttatccagtcgaatcagtccaaacgatggatcgaattgcgcttactacggaagctgccatcgattatcgctctgtagtgtcgacacgtcgacgagaaaaacatggtaatatgactgaagcgattggacaagctgcagcatacacggctatcaacttgaaagtgaaggctgtccttgccccaacagaaagtggtcacacagctaaaatgattgccaaatatcgtccaggttgcccagttattgcggtaacgtcatctgaaatgtgttcaagaaaactatcacttatctggggcgtctacccgatagttggaaaaaaagcttcttcgattgatgaaatcttgcaagagtctgtagaagagagtgttaaacatcaatatgtcggacatggtgatgtggttatcattacagcaggtgttccagttggtgaagcgggaacgacgaacttgatgaaaatacatgtcataggtgatttgcttgcacgaggacaaggaattggcaaagatgtagcttatggtcgaactgttgtagccaaaaatgcagctgaagcattggcgtatgatacagaaggagctattcttgtaacgaacgcatctgatcgtgatatgatgcctgccatcgagaaatgcgcaggactcattacggaagaaggcggattgacgagtcatggtgcaattgtcggactcagtttaggtataccgataattgtcggagttgaaaatgctaccgagcttatccaacatggcaaggaaattacgatggatgctgaatctggcgttatctataatggacacgcgagcgttctataa

SEQ ID NO: 16011 - protein, 586 aa, Bacillus psychrophilus; identical to SEQ ID NO: 8784

SEQ ID NO: 16012 - DNA, 1764 bp, Bacillus stearothermophilus; identical to SEQ ID NO: 8785
  CDS (1)..(1764): transl_table=11

SEQ ID NO: 16013 - protein, 587 aa, Bacillus stearothermophilus; identical to SEQ ID NO: 8786

SEQ ID NO: 16014 - DNA, 1758 bp, Bacillus subtilis; identical to SEQ ID NO: 8787
  CDS (1)..(1758): transl_table=11

SEQ ID NO: 16015 - protein, 585 aa, Bacillus subtilis; identical to SEQ ID NO: 8788

SEQ ID NO: 16016 - DNA, 1443 bp, Buchnera aphidicola subsp
  CDS (1)..(1443): transl_table=11
atgttaaatcgattaagaagaacaaaaatcgtagctactttaggaccttctacagacattaataataatttagaaaaaataattcgttctggagtaaatgttcttcgatttaatttctctcatggttcaaaagatgaacataaatccagagcaaatcaagctcgagaaataatgactcgtttaaattttcacattgcattgcttggcgatttacaaggtcctaaaattcgcatttctaaatttataaaaaataatatttttttgaatgttggtgatttttttatattagatgcgaatttagatcaaaataatggaaatcaagaacgggtaggaattgattataaacagttaccatatgatctaaaagtaggtgatgtattattattagatgatggaagaatacaattaaaggttataaaatcaactggtcatgaaatattaacaaaagttgttatcggcggaatactttctaacaataaaggcattaataaactaggtggtggtttatctgcagatgcgttaactgaaaaagacaagaaggatataatcctagcaactgaaattaatgtagactatttagcaatatctttcccacgatgcagtaatgacttgaaacaagcaagaaaattagctaaagaatttggtagcaatgctaaaattatcgctaaaatagaacgtgctgaagctgtattaaatcaaaatactatcgaagatataattttagcatcagatgcaattatgatagctagaggcgatttaggtgtggaaattggagattctgaattagcaggtattcaaaaaaaattaatacgaactgctaggcaattaaatagaatagtaattactgctacacagatgatggaatctatgattactaacccattacctactcgtgcagaagttatggatgtagctaatgctgttttagatggcagtgatgcagttatgctttcggctgaaacagcatcaggcgaatatccagctgaaactgttataaaaatggcaaaaatttgcaaaggtgcagaaaaagttcctagtattaatgtatctagacatcgtattcatgcaaaatttgatgatattgaagaagcaattgctatgtccgcaatgtatgttgctaatcatttgaaaggtattacagcaattataacgatgacagaatcaggtaagactgcactaatgacatcgaggattacatctggattgcctatttttgctttatcaaaaaataaagaaactttaaatttagcaagtctttatagaggtgtgactcctatatattttaatagtaaaaataataattttaaagctgcgaatgaagcaattgttcttttacgtaaacgaggttttttatgtcgtggcgagttagttattataactcaaggtgatattatgggaaaaatcggaaaaactaatactagtagaattttaaaagtagtatga

SEQ ID NO: 16017 - protein, 480 aa, Buchnera aphidicola subsp
MLNRLRRTKIVATLGPSTDINNNLEKIIRSGVNVLRFNFSHGSKDEHKSRANQAREIMTRLNFHIALLGDLQGPKIRISKFIKNNIFLNVGDFFILDANLDQNNGNQERVGIDYKQLPYDLKVGDVLLLDDGRIQLKVIKSTGHEILTKVVIGGILSNNKGINKLGGGLSADALTEKDKKDIILATEINVDYLAISFPRCSNDLKQARKLAKEFGSNAKIIAKIERAEAVLNQNTIEDIILASDAIMIARGDLGVEIGDSELAGIQKKLIRTARQLNRIVITATQMMESMITNPLPTRAEVMDVANAVLDGSDAVMLSAETASGEYPAETVIKMAKICKGAEKVPSINVSRHRIHAKFDDIEEAIAMSAMYVANHLKGITAIITMTESGKTALMTSRITSGLPIFALSKNKETLNLASLYRGVTPIYFNSKNNNFKAANEAIVLLRKRGFLCRGELVIITQGDIMGKIGKTNTSRILKVV

SEQ ID NO: 16018 - DNA, 1422 bp, Clostridium acetobutylicum; identical to SEQ ID NO: 8791
  CDS (1)..(1422): transl_table=11

SEQ ID NO: 16019 - protein, 473 aa, Clostridium acetobutylicum; identical to SEQ ID NO: 8792

SEQ ID NO: 16020 - DNA, 1428 bp, Corynebacterium glutamicum
  CDS (1)..(1428): transl_table=11
gtggatagacgaactaagattgtatgtaccctaggcccagcggtggctagtgcagatggaattctgcgtttggtagaagacggcatggatgttgctcgcctcaacttctcccatggtgaccacccagatcatgagcaaaactacaagtgggtccgcgaggcggcggagaagactggccgtgcagtcggtattctcgcagacctccaaggaccgaagatccgtcttggccgtttcactgacggcgcaaccgtgtgggaaaacggcgagaccattcggatcaccgttgacgatgtagagggaacgcacgatcgtgtgtccaccacctacaagaatctggcaaaagacgcgaagccaggcgaccgcctgctcgttgatgacggcaaggttggcctcgtctgcgtttccgtcgaaggtaacgacgtcatctgtgaggttgttgagggcggaccagtctccaacaacaagggtgtttccctgccaggtatggatatttccgtacctgcactgtccgaaaaggatatccgtgacctgcgcttcgccctgaagctcggcgtggactttattgcactgtccttcgtacgttccccagcagatgctgaactcgttcacaagatcatggacgaagaaggtcgtcgtgttcctgtgatcgccaagctggaaaagccagaggctgtcacctccctcgagccaatcgtgttggcattcgacgccgtcatggttgctcgtggtgacctcggcgttgaggttcctctggaggaggttccactggttcagaagcgcgcaatccagattgcccgtgagaacgcaaagccagttatcgtggcaacccagatgctggattccatgattgagaactcccgcccaacccgtgcggaagcttctgacgtggcaaacgctgtgctcgatggcgcagatgctgtcatgctttctggtgaaacttcagtgggcaaagatccgcacaacgttgtgcgcaccatgtctcgcattgttcgcttcgctgaaaccgacggtcgcgtcccagacctgacccacatccctcgcactaagcgtggcgttatttcctactctgcacgtgatatcgccgagcgcctcaacgctcgtgcattggttgcgttcaccacctctggtgataccgcaaagcgtgtggctcgtctgcacagccacctgccactgctcgtgttcactccaaatgaggcagttcgctctgagctggcgctgacctggggtgcaaccaccttcctgtgtccacctgtcagcgataccgatgacatgatgcgcgaagtcgaccgtgctcttttagcaatgcctgagtacaacaagggtgacatgatggttgttgttgcaggttcccctcctggtgttaccggtaacaccaacatgattcacgtccaccttcttggtgacgacacaaggattgcaaagctctaa

SEQ ID NO: 16021 - protein, 475 aa, Corynebacterium glutamicum
MDRRTKIVCTLGPAVASADGILRLVEDGMDVARLNFSHGDHPDHEQNYKWVREAAEKTGRAVGILADLQGPKIRLGRFTDGATVWENGETIRITVDDVEGTHDRVSTTYKNLAKDAKPGDRLLVDDGKVGLVCVSVEGNDVICEVVEGGPVSNNKGVSLPGMDISVPALSEKDIRDLRFALKLGVDFIALSFVRSPADAELVHKIMDEEGRRVPVIAKLEKPEAVTSLEPIVLAFDAVMVARGDLGVEVPLEEVPLVQKRAIQIARENAKPVIVATQMLDSMIENSRPTRAEASDVANAVLDGADAVMLSGETSVGKDPHNVVRTMSRIVRFAETDGRVPDLTHIPRTKRGVISYSARDIAERLNARALVAFTTSGDTAKRVARLHSHLPLLVFTPNEAVRSELALTWGATTFLCPPVSDTDDMMREVDRALLAMPEYNKGDMMVVVAGSPPGVTGNTNMIHVHLLGDDTRIAKL

SEQ ID NO: 16022 - DNA, 1515 bp, Debaryomyces hansenii; identical to SEQ ID NO: 8793
  CDS (1)..(1515)

SEQ ID NO: 16023 - protein, 504 aa, Debaryomyces hansenii; identical to SEQ ID NO: 8794

SEQ ID NO: 16024 - DNA, 1602 bp, Drosophila melanogaster
  CDS (1)..(1602)
atggtgaacgtaaccatctacgatgaggcaccgcagctgaagcccaacgaagtaccccaaaacatggccgcaggagctgatacccaactggagcacatgtgccgtctgcagttcgactcgccagtgccccatgtgcgtctgtccggaatcgtgtgcaccatcggacctgcctccagcagcgtggagatgctggagaagatgatggccaccggcatgaacatcgcgcgcatgaacttctctcacggatcgcacgagtaccatgccgccaccgtggccaatgtgcgccaggcggtgaagaactactcggccaagctgggctacgaacaccccgtggccattgccctggacaccaaggggcccgagatccgtaccggtctgatcggaggcagcggcaccgccgagattgagctgaagaagggcgagaagatcaagctgaccaccaacaaggaattcctggagaagggctctctggagattgtgtacgtggactacgagaacattgtcaatgtggtgaagcccggcaaccgggtgttcgtcgatgacggtctgatctcactgattgtccgcgaggtaggcaaggattccctcacctgcgaggtggagaacggcggctctctgggttcccgcaagggtgtgaacctgccaggcgtgcccgtcgatctgcctgccgtctccgagaaggataagagcgatctgctgttcggtgtggagcaggaagtggacatgatctttgcttcgttcatccgcaacgccgctgctttgaccgagatccgtaaggttcttggcgagaagggcaagaacatcaagatcatttccaagatcgagaaccagcagggcatgcacaacctggacgagatcatcgaggccggtgatggcattatggtggcccgtggagatctgggtattgagattcccgccgagaaggtgttcctcgcccagaaggccatgattgcccgctgcaacaaggctggcaagcctgtgatctgcgccactcagatgttggagtcaatggtgaagaagccacgtcccactcgcgctgagatctctgatgtggccaacgctgtgctcgatggtgctgattgcgtcatgttgtctggtgagaccgccaagggcgagtacccgctggagtgcgtcctgaccatggccaagacctgcaaggaggccgaggctgccctctggcaccagaacctctttaacgacttggttcgcggcgctggtaccatcgatgcctctcacgcggctgccatcgctgccgttgaggctgccaccaaggccaaggcctccgccatcgtggtgatcaccaccagcggcaagtcggccttccaggtgagcaagtaccgcccacgctgccccatcatcgcggtcacccgtttcgcgcagaccgcccgacaggcccatctctaccgtggactggtgccactcatctacaaggagcccggtcttggtgactggctgaaggacgtggacgtgcgcgtgcagttcggtctgcaggtcggaaagaagaacggcttcatcaagaccggcgattccgtcgtggtggttaccggctggaagcagggctccggcttcaccaacaccatccgcattgtcaccgtcgaataa

SEQ ID NO: 16025 - protein, 533 aa, Drosophila melanogaster
MVNVTIYDEAPQLKPNEVPQNMAAGADTQLEHMCRLQFDSPVPHVRLSGIVCTIGPASSSVEMLEKMMATGMNIARMNFSHGSHEYHAATVANVRQAVKNYSAKLGYEHPVAIALDTKGPEIRTGLIGGSGTAEIELKKGEKIKLTTNKEFLEKGSLEIVYVDYENIVNVVKPGNRVFVDDGLISLIVREVGKDSLTCEVENGGSLGSRKGVNLPGVPVDLPAVSEKDKSDLLFGVEQEVDMIFASFIRNAAALTEIRKVLGEKGKNIKIISKIENQQGMHNLDEIIEAGDGIMVARGDLGIEIPAEKVFLAQKAMIARCNKAGKPVICATQMLESMVKKPRPTRAEISDVANAVLDGADCVMLSGETAKGEYPLECVLTMAKTCKEAEAALWHQNLFNDLVRGAGTIDASHAAAIAAVEAATKAKASAIVVITTSGKSAFQVSKYRPRCPIIAVTRFAQTARQAHLYRGLVPLIYKEPGLGDWLKDVDVRVQFGLQVGKKNGFIKTGDSVVVVTGWKQGSGFTNTIRIVTVE

SEQ ID NO: 16026 - DNA, 1581 bp, Emericella nidulans; identical to SEQ ID NO: 8795
  CDS (1)..(1581)

SEQ ID NO: 16027 - protein, 526 aa, Emericella nidulans; identical to SEQ ID NO: 8796

SEQ ID NO: 16028 - DNA, 1506 bp, Kluyveromyces lactis; identical to SEQ ID NO: 8797
  CDS (1)..(1506)

SEQ ID NO: 16029 - protein, 501 aa, Kluyveromyces lactis; identical to SEQ ID NO: 8798

SEQ ID NO: 16030 - DNA, 1770 bp, Lactobacillus delbrueckii subsp
  CDS (1)..(1770): transl_table=11
atgaaaaaaacaaagattgttagtactttagggccagcttcagacgatattgaaactattaccaagttagccgaagcaggcgcaaacgtattccgtttcaacttctcacacggtaaccacgaagaacacttggcaagaatgaacatggttcgtgaagttgaaaagaagactggcaagcttttgggcatcgctttggacaccaagggtgctgaaatcagaaccactgaccaagaaggcggcaagttcactatcaacactggtgacgaaatccgcgtgtcaatggacgcaaccaaggccggcaacaaggacatgatccacgttacctacccaggtctgttcgacgacactcacgtaggcggcactgtattgatcgacgacggtgctgttggtttgactatcaaggccaaggacgaagaaaagcgcgaattggtttgtgaagctcaaaacactggtgtcatcggctcaaagaagggtgttaacgctccaggtgttgaaatccgcctcccagggattactgaaaaggacactgacgacatccgctttggtttgaagcacggtattaacttcatctttgcttcatttgtacgtaaggctcaagacgttcttgacattcgcgcactttgcgaagaagctaacgcatcatacgttaagatcttcccaaagattgaatcacaagaaggtattgacaacatcgacgaaatcttgcaagtttcagatggtttgatggttgcccgtggtgacatgggtgttgaaatcccattcatcaacgtgccatttgttcaaaagactttgatcaagaagtgcaacgctttgggcaagccagttatcactgctactcaaatgctggactcaatgcaagaaaacccacgtccaacccgtgccgaagtaactgacgttgctaacgccgttcttgacggtactgacgcaactatgctgtcaggtgaatcagcaaacggtttgtacccagtacaatcagttcaagctatgcacgacatcgatgttcggactgaaaaggaattggacacccggaacactctggctctgcaacgctttgaagaatacaagggctcaaacgttactgaagctatcggtgaatcagttgtccgcactgctcaagaactgggcgttaagactatcatcgctgctactagctccggctacacagctcgtatgatctccaagtaccgtccagacgcaaccatcgttgccttgactttcgacgaaaagatccaacactcattgggtatcgtttggggcgttgaaccagttttggcaaagaaaccttcaaacactgacgaaatgttcgaagaagctgcccgcgtagctaaggaacacggtttcgttaaggatggcgacctggtaatcatcgttgccggcgtaccattcggccaatcaggtactactaacttgatgaagctgcaaatcatcggcaaccaacttgctcaaggtttgggcgtaggcactggctcagttatcggcaaggctgttgttgcgaacagcgctgaagaagccaacgctaaggttcacgaaggcgacatcctggtagctaagactactgacaaggactacatgccagctatcaagaaggccagcggtatgatcgttgaagcttccggcttgaccagccacgcagctgttgtcggcgtatcactcggcattccagttgttgtcggtgttgctgacgcaacttcaaagatcgctgacggctcaactttgactgttgacgcacgtcgcggcgcaatttaccaaggtgaagtttcaaacctgtaa

SEQ ID NO: 16031 - protein, 589 aa, Lactobacillus delbrueckii subsp
MKKTKIVSTLGPASDDIETITKLAEAGANVFRFNFSHGNHEEHLARMNMVREVEKKTGKLLGIALDTKGAEIRTTDQEGGKFTINTGDEIRVSMDATKAGNKDMIHVTYPGLFDDTHVGGTVLIDDGAVGLTIKAKDEEKRELVCEAQNTGVIGSKKGVNAPGVEIRLPGITEKDTDDIRFGLKHGINFIFASFVRKAQDVLDIRALCEEANASYVKIFPKIESQEGIDNIDEILQVSDGLMVARGDMGVEIPFINVPFVQKTLIKKCNALGKPVITATQMLDSMQENPRPTRAEVTDVANAVLDGTDATMLSGESANGLYPVQSVQAMHDIDVRTEKELDTRNTLALQRFEEYKGSNVTEAIGESVVRTAQELGVKTIIAATSSGYTARMISKYRPDATIVALTFDEKIQHSLGIVWGVEPVLAKKPSNTDEMFEEAARVAKEHGFVKDGDLVIIVAGVPFGQSGTTNLMKLQIIGNQLAQGLGVGTGSVIGKAVVANSAEEANAKVHEGDILVAKTTDKDYMPAIKKASGMIVEASGLTSHAAVVGVSLGIPVVVGVADATSKIADGSTLTVDARRGAIYQGEVSNL

SEQ ID NO: 16032 - DNA, 1452 bp, Methylobacterium extorquens
  CDS (1)..(1452): transl_table=11
atgatggaggcccctttgaagcgctcgcgccgcaccaagatcgtcgccaccctcggcccggcatccgacacgccggagatgatcgagaagctgttccacgccggtgcggacgtgttccgcatcaacatgagccatctggctcgcgagaagctgcctgaacgcatcgaggtgattcgcaccatcgagcgggagggcaagcgccccatcggcatcctcgtcgaccttcagggcccgaagctgcggctcggcaccttcgtcggcgacgcggccgtgctggagaacggccagaccttcgtgctcgattcggatccgacgccgggcgataccgaccgcgtcttccttccccatcctgagatcctgtcggcgctggagcccagccacggcatcctgatcgacgatggcaagcttcgcctcatcgtcacggaggtgagcgaggggcgtgccgtcacccgcgtcgaggtcggcggtcgcatctcgaatcgcaagggcgtgtcgctgccccacaccgcgctgccggtgccggcgatgaccgagaaggatcgcggtgatctggaagcgggcctcgcggccggcgccgactggatcgcggtgtccttcgtgcagcgcccggaagacgtggcggaggtcaagaaggtcgccgccgggcgcgccctggtgatggccaagatcgagaagccgcaggcgctcacccgcctcgatgagatcatcgagatctccgacggcatcatggtcgcccgcggcgacctcggcgtcgagatgccgctcgaacaggtgccgggcgtgcagaagcgcatcacccgcgtcgcccgccggctcggcaagccggtcgtcgtcgcgacgcagatgctcgaatcgatgatcacctcaccggtgccgacccgcgccgaggtgtcggacgtggccaccgccgtctacgagggcgcggatgcggtgatgctctcggccgaaagcgccgccggcgactttccggtcgaggcgatcggcaccatgaaccgcatcgccgaacaggtggagcgcgacgcgctctactggtcgatcctgatggcgcagcgttccgagccggagccgaccgcttccgacgccatcgcggccgcggcccaccagatcgtcgaggcgctgagcctgcgctcgatcatggcctggacccattccggttcaacggtgctgcggctggcgcgcgcccggcccaatgccagcgtcatcgcgctgacgccgaagcgcgagacggcgcggcgcctcaccatggcctggggcgtgcacccgatcgtcaccaaggatgccagcgacgtggacgacatggccttccgcgccgcgaagttcgcggtgcgcgagcgcttcgccgagatcggcgaccgagtgatcatcgtggccggcgtgccgttcggcattccgggggcgaccaacatggtgcgcatcgccttcgtcacccgcgagcacgccgagcgggcctga

SEQ ID NO: 16033 - protein, 483 aa, Methylobacterium extorquens
MMEAPLKRSRRTKIVATLGPASDTPEMIEKLFHAGADVFRINMSHLAREKLPERIEVIRTIEREGKRPIGILVDLQGPKLRLGTFVGDAAVLENGQTFVLDSDPTPGDTDRVFLPHPEILSALEPSHGILIDDGKLRLIVTEVSEGRAVTRVEVGGRISNRKGVSLPHTALPVPAMTEKDRGDLEAGLAAGADWIAVSFVQRPEDVAEVKKVAAGRALVMAKIEKPQALTRLDEIIEISDGIMVARGDLGVEMPLEQVPGVQKRITRVARRLGKPVVVATQMLESMITSPVPTRAEVSDVATAVYEGADAVMLSAESAAGDFPVEAIGTMNRIAEQVERDALYWSILMAQRSEPEPTASDAIAAAAHQIVEALSLRSIMAWTHSGSTVLRLARARPNASVIALTPKRETARRLTMAWGVHPIVTKDASDVDDMAFRAAKFAVRERFAEIGDRVIIVAGVPFGIPGATNMVRIAFVTREHAERA

SEQ ID NO: 16034 - DNA, 1506 bp, Saccharomyces castellii; identical to SEQ ID NO: 8801
  CDS (1)..(1506)

SEQ ID NO: 16035 - protein, 501 aa, Saccharomyces castellii; identical to SEQ ID NO: 8802

SEQ ID NO: 16036 - DNA, 1506 bp, Saccharomyces kluyveri; identical to SEQ ID NO: 8803
  CDS (1)..(1506)

SEQ ID NO: 16037 - protein, 501 aa, Saccharomyces kluyveri; identical to SEQ ID NO: 8804

SEQ ID NO: 16038 - DNA, 1530 bp, Schizosaccharomyces pombe; identical to SEQ ID NO: 8805
  CDS (1)..(1530)

SEQ ID NO: 16039 - protein, 509 aa, Schizosaccharomyces pombe; identical to SEQ ID NO: 8806

SEQ ID NO: 16040 - DNA, 1758 bp, Staphylococcus aureus; identical to SEQ ID NO: 8517
  CDS (1)..(1758): transl_table=11

SEQ ID NO: 16041 - protein, 585 aa, Staphylococcus aureus; identical to SEQ ID NO: 8518

SEQ ID NO: 16042 - DNA, 1758 bp, Staphylococcus epidermidis
  CDS (1)..(1758): transl_table=11
atgagaaagactaaaattgtatgtacaataggaccagcttcagaatcagaggaaatgctcgaaaaactaatgaatgcaggaatgaacgttgcgcgtttaaatttctcacatggtagtcatgaagaacataaagcaagaattgatacaattcgtaaagttgctaaacgtttaaataaaacaattggcttgttattggatactaaagggccagaaattcgtacgcacaatatgaaagatggacttattgttttagaaaaaggcaaagaagtcattgtcagtatgaatgaagttgaaggaacacctgaaaaattctctgtaacatatgaaaatctaatcaatgatgtcaatattggatcatatatactattagatgatggtttagttgaacttcaagtcaaagaaattaacaaagataaaggcgaagttaaatgtgatatcttaaatactggtgaattaaaaaataaaaaaggtgttaacttacctggtgttaaagttaatttacctggtatcactgataaagatgccgatgatatcagatttggtataaaggaaaatgtagactttatagctgcaagttttgtaagacgtccaagtgatgttttagatatccgtcaaattcttgaagaagaaaaagcagaaataacaattttccctaaaatcgaaaaccaagaaggtatcgataatattgaagaaattcttgaagtatctgatggattaatggtagcacgtggtgatatgggtgttgaaattccaccagaaagcgtaccaatggttcaaaaagatttaattagaaaatgtaataaattaggaaaacctgtaattactgcgactcaaatgcttgattctatgcaacgtaatccacgtgcgacacgtgcagaagcaagtgacgtagctaatgcaatatacgatggtactgacgcggtaatgttatcaggtgaaactgcagcaggtcaatatcctgaagaagctgttaaaactatgcgtaatattgcagtttctgctgaagcagcgcaagactataaaaaattattaagtgatcgtactaaattagttgaaacttcattagtaaatgcaattggtgtttctgttgcacatactgccttaaacttaaatgtaaaagctattgtagcagcaactgaaagtggttcaacagcacgtacgatttctaaatatcgtccacattcagatatcattgctgtaacacctagcgaaaaaactgctagacaatgtgcaattgtatggggagtaaatccggtcgttaaagaaggacgtaaaacaactgatgctttactaaataatgctgtagcaacagcagtagaaactggtagagtttcaaacggagatttaattattattactgctggtgtacctactggagaaaaaggaactacaaatatgatgaaaatccacttagtaggtgatgagattgctaaaggtcaaggtgttggtagaggatctgttgtaggccatgcaattgtcgcagatagtgctagtgatttagaaggtaaagatttatctgataaagttattattacaaattctgttgatgaaacattagtaccatatgttgaaaaagctataggtctaattacagaagaaaatggtattacttcaccaagcgcaattataggtttagaaaaaggcatacctactgttgttggtgtagaacaagcaaccaaagaaattaaaaatgatatgttagtgactttagatgcgtcacaaggtaaagtgtttgaaggttatgctaacgtcctttaa

SEQ ID NO: 16043 - protein, 585 aa, Staphylococcus epidermidis
MRKTKIVCTIGPASESEEMLEKLMNAGMNVARLNFSHGSHEEHKARIDTIRKVAKRLNKTIGLLLDTKGPEIRTHNMKDGLIVLEKGKEVIVSMNEVEGTPEKFSVTYENLINDVNIGSYILLDDGLVELQVKEINKDKGEVKCDILNTGELKNKKGVNLPGVKVNLPGITDKDADDIRFGIKENVDFIAASFVRRPSDVLDIRQILEEEKAEITIFPKIENQEGIDNIEEILEVSDGLMVARGDMGVEIPPESVPMVQKDLIRKCNKLGKPVITATQMLDSMQRNPRATRAEASDVANAIYDGTDAVMLSGETAAGQYPEEAVKTMRNIAVSAEAAQDYKKLLSDRTKLVETSLVNAIGVSVAHTALNLNVKAIVAATESGSTARTISKYRPHSDIIAVTPSEKTARQCAIVWGVNPVVKEGRKTTDALLNNAVATAVETGRVSNGDLIIITAGVPTGEKGTTNMMKIHLVGDEIAKGQGVGRGSVVGHAIVADSASDLEGKDLSDKVIITNSVDETLVPYVEKAIGLITEENGITSPSAIIGLEKGIPTVVGVEQATKEIKNDMLVTLDASQGKVFEGYANVL

SEQ ID NO: 16044 - DNA, 1635 bp, Thermoplasma acidophilum
  CDS (1)..(1635): transl_table=11
atgaagaccaagatagttgcgacaataggcccggctagcagttcgcccgagataatgaaacagatgatagacaacggtctttcgctggtaagaataaattctgcacatgcagatataaaggatgtatcgaagataacgcagatggttcgttctatcaacagggacgttggtataatgatagacctgaagggcccagagctcagaacgggcgaattcgcgggtggtacattgaaaatatcatccggtaaggactacgtcatgggcaaagacatagtcctgaacaacatgaacgtgctttcggctgttcaggttggcgacaggatactgatgagcgatggtgaagtatcattcgaggttgaatcaacagatccgttcacaatccgggctctaaacgatggcgttctaagggacaggagccgtgtgaatatccccggccgtttcatagagctcggaaccataacggacagggatcgtgccttcataagggagggcatagcggatggcgtggacttcttcgccctttcatttgtgcagaaatctgagaacgttgacagcctgcgcgacttcgttatagacagcggtggcgatcagtacataatatcgaagatagagacgaagagcggcctggataacatagaggagatagtgaagtcatccgatggcatcatggtggcgcgtggcgatctcggtgtggaacttcccttgaaagaggtcgtgctggctcagaagcacataataaagacagcgcatgaggatggcgatttcactatcgtagcgacccaggtgctggaatccatggtaaacaacagttcacccacaagggcagagatttcagacattacaaatgcgatcatagacaatgcagatgccttaatgctctccgaggagagtgcgataggaaagtatccggttcaggccgtccgtacgctcaaggaggtttcggattacgtggaggacaaggtgtcgttcgattcttcatattactttaagggaaacaccatagcatactcagtagcaagggcagcgaagatactctctgatgatatcaagagcgatgggatagtggcacttacgcatactggatcaaccgttaggatgatatcgtcgctgaggccaaaggccatggtctacgctgccactgtaagcgagagtcttgccagaaagctgaacatatacttcggcgtattgccattgcatatggagggcaacgcagaagatcttagtttttcagagattatggaatacatagtgcgttctggtaggttcgctgatggaagtaagctcgtgatgaccagcggcgatccgtacttcacgtttggagggacgaacgacgtcaaggtggccgttgtaggcaaattcataggaagaggctattcatttggagatagcttatccggtacggcaacttacggtacgaagggagacatactcatgtctgaggatggaagaattcctggaactgatttcagggcattcatattcacatctgatatcaagccatctcttatgtcttctttaaagggaaaaacggttgtaaccaaggcaagattggttcgtcagataaaggaaggcgagcgcatatacatcgatggaaatacgggaataatactcatggcttcgccggatcaaaaataa

SEQ ID NO: 16045 - protein, 544 aa, Thermoplasma acidophilum
MKTKIVATIGPASSSPEIMKQMIDNGLSLVRINSAHADIKDVSKITQMVRSINRDVGIMIDLKGPELRTGEFAGGTLKISSGKDYVMGKDIVLNNMNVLSAVQVGDRILMSDGEVSFEVESTDPFTIRALNDGVLRDRSRVNIPGRFIELGTITDRDRAFIREGIADGVDFFALSFVQKSENVDSLRDFVIDSGGDQYIISKIETKSGLDNIEEIVKSSDGIMVARGDLGVELPLKEVVLAQKHIIKTAHEDGDFTIVATQVLESMVNNSSPTRAEISDITNAIIDNADALMLSEESAIGKYPVQAVRTLKEVSDYVEDKVSFDSSYYFKGNTIAYSVARAAKILSDDIKSDGIVALTHTGSTVRMISSLRPKAMVYAATVSESLARKLNIYFGVLPLHMEGNAEDLSFSEIMEYIVRSGRFADGSKLVMTSGDPYFTFGGTNDVKVAVVGKFIGRGYSFGDSLSGTATYGTKGDILMSEDGRIPGTDFRAFIFTSDIKPSLMSSLKGKTVVTKARLVRQIKEGERIYIDGNTGIILMASPDQK

SEQ ID NO: 16046 - DNA, 1401 bp, Thermotoga maritima; identical to SEQ ID NO: 8407
  CDS (1)..(1401): transl_table=11

SEQ ID NO: 16047 - protein, 466 aa, Thermotoga maritima; identical to SEQ ID NO: 8408

SEQ ID NO: 16048 - DNA, 1617 bp, Trichoderma reesei; identical to SEQ ID NO: 8807
  CDS (1)..(1617)

SEQ ID NO: 16049 - protein, 538 aa, Trichoderma reesei; identical to SEQ ID NO: 8808

SEQ ID NO: 16050 - DNA, 1533 bp, Oryza sativa; identical to SEQ ID NO: 8809
  CDS (1)..(1533)

SEQ ID NO: 16051 - protein, 510 aa, Oryza sativa; identical to SEQ ID NO: 8810

SEQ ID NO: 16052 - DNA, 1752 bp, Oryza sativa; identical to SEQ ID NO: 8811
  CDS (1)..(1752)

SEQ ID NO: 16053 - protein, 583 aa, Oryza sativa; identical to SEQ ID NO: 8812

SEQ ID NO: 16054 - DNA, 1647 bp, Oryza sativa; identical to SEQ ID NO: 8379
  CDS (1)..(1647)

SEQ ID NO: 16055 - protein, 548 aa, Oryza sativa; identical to SEQ ID NO: 8380

SEQ ID NO: 16056 - DNA, 1536 bp, Oryza sativa; identical to SEQ ID NO: 8381
  CDS (1)..(1536)

SEQ ID NO: 16057 - protein, 511 aa, Oryza sativa; identical to SEQ ID NO: 8382

SEQ ID NO: 16058 - DNA, 1737 bp, Oryza sativa
  CDS (1)..(1737)
atggccgccaccgccgccgcggcccacaccctcctccacctcgcggccccgaggaagccctccgcggggcccccactcccgcccgccaccctccgcctccccagccgccgcctcgcccgtctcacggccagctgcagcagcggctccgggaacaacagcgccgccgacttccccaaccccaacgggatcctcgtcgcgcccccgtccgccgcggcggtggcggcggcgtcgtcgcatatcgatgttgacgtggcgacggaggccgacctgagggagaacgggttccggagcacgcggcgcaccaagctcgtctgcaccgtggggcccgccacctgcggcgccgacgagctggaggcgctcgccgtcggcgggatgaacgtcgcgcgcgtcaacatgtgccacggggaccgggagtggcaccggggcgtcatccgcgcggtgcggaggctcaacgaggagaaggggttcgccgtcgccgtcatgatggacaccgaggggagcgagatccacatgggggacctcggcggcgccgccgccgccaaggcggaggatggagaaatatggacatttagcgtaagatcctttgaggcacctcccccagaacgaactattcatgtgaactacgaaggcttcgctgaagatgtgagagttggtgatgagcttcttgttgatggtggcatggctcggtttgaggtggttgagaaattaggaccagatgtcaagtgccgttgcacagatcctggtttgttgctgccacgtgccaatcttacattttggcgggatggtagtattgtccgtgagaggaacgctatgctacctaccatttcatcaaaggattggcttgacatagactttggaatttctgaaggcgtagattttattgcagtttcgtttgtcaaatctgcagaagtaattaaccatctgaaaagctatatagctgcaaggagccgtggcagcgatatagcagtcattgccaagatcgagagcattgactctttgaagaacttggaggagataatccgtgcttcagatggtgccatggtagcccgaggggatatgggtgcacaaattcccttggagcaagtcccctcagtacaacaaaagatagttaaactgtgcaggcagctcaacaagccagtcattgttgcgtcgcagcttcttgaatcgatgattgagtatcctacgcccaccagggccgaggttgctgatgtttctgaagcagttcgtcagcgtgcagatgcgcttatgctttcaggtgagtcagcaatggggagatatccagagaaagctcttagtgtcctccggagtgttagcctaaggattgagaagtggtggagagaggagaagcgccatgaggaactggaacttaaagatgtttcatcttccttctctgacaaaatatcagaagaaatctgcatttcggccgctaaaatggccaacaaattggaggtagatgccgttttcgtctacacaaacactggccacatggcctcactgctctcgcggtgccgtcctgactgcccgatcttcgccttcacgacctcgacatctgtgaggagacgattgaacctccaatggggcctcatccccttccgcctcagcttctcggacgacatggagagcaacctgaaccgtaccttctcgctgctcaaggccaggggcatgatccagtccggcgaccttgtcatcgcgctctccgacatgctgcagtccatccaggtcatgaacgtaccttga

SEQ ID NO: 16059 - protein, 578 aa, Oryza sativa
MAATAAAAHTLLHLAAPRKPSAGPPLPPATLRLPSRRLARLTASCSSGSGNNSAADFPNPNGILVAPPSAAAVAAASSHIDVDVATEADLRENGFRSTRRTKLVCTVGPATCGADELEALAVGGMNVARVNMCHGDREWHRGVIRAVRRLNEEKGFAVAVMMDTEGSEIHMGDLGGAAAAKAEDGEIWTFSVRSFEAPPPERTIHVNYEGFAEDVRVGDELLVDGGMARFEVVEKLGPDVKCRCTDPGLLLPRANLTFWRDGSIVRERNAMLPTISSKDWLDIDFGISEGVDFIAVSFVKSAEVINHLKSYIAARSRGSDIAVIAKIESIDSLKNLEEIIRASDGAMVARGDMGAQIPLEQVPSVQQKIVKLCRQLNKPVIVASQLLESMIEYPTPTRAEVADVSEAVRQRADALMLSGESAMGRYPEKALSVLRSVSLRIEKWWREEKRHEELELKDVSSSFSDKISEEICISAAKMANKLEVDAVFVYTNTGHMASLLSRCRPDCPIFAFTTSTSVRRRLNLQWGLIPFRLSFSDDMESNLNRTFSLLKARGMIQSGDLVIALSDMLQSIQVMNVP

SEQ ID NO: 16060 - DNA, 1713 bp, Oryza sativa; identical to SEQ ID NO: 8383
  CDS (1)..(1713)

SEQ ID NO: 16061 - protein, 570 aa, Oryza sativa; identical to SEQ ID NO: 8384

SEQ ID NO: 16062 - DNA, 1584 bp, Oryza sativa; identical to SEQ ID NO: 8385
  CDS (1)..(1584)

SEQ ID NO: 16063 - protein, 527 aa, Oryza sativa; identical to SEQ ID NO: 8386

SEQ ID NO: 16064 - DNA, 1584 bp, Oryza sativa; identical to SEQ ID NO: 8813
  CDS (1)..(1584)

SEQ ID NO: 16065 - protein, 527 aa, Oryza sativa; identical to SEQ ID NO: 8814

SEQ ID NO: 16066 - DNA, 1584 bp, Oryza sativa; identical to SEQ ID NO: 8387
  CDS (1)..(1584)

SEQ ID NO: 16067 - protein, 527 aa, Oryza sativa; identical to SEQ ID NO: 8388

SEQ ID NO: 16068 - DNA, 1584 bp, Oryza sativa
  CDS (1)..(1584)
atgcagtcgagtcctttgcttctggaggaacccataaggatggcctccatcctcgagccatccaagcctagtttctttccagcgatgacaaagattgttggcacacttggcccaaagtcacgatcggttgacgtgatttcccaatgtcttgaggcaggaatgtctgtggcaaggtttgatttttcatggggtgatcctgaataccaccaagagacgttggaaaatttaagggctgctatcaaaagtaccaagaaactttgtgcggttatgctagataccgtgggtccagaactacaagttgtcaacaaaactgagcacccaatttcccttcaggctgacacattggttgtcttaactcctgatcagaacaaagaagctacttcaaatcttttacctgtaaattttagtggactttcaaaggctgtgaagaatggtgatactatttttattggtcaatacctgtttactggaagtgaaacaacctcagtgtggctagaggtcagcgaagtgaatggtgatgatgtcacttgtgtcataaaaaattctgctactcttgctgggtcactgtatactttacatgtctctcaaattcatatcgaccttcccactcttgacaataaggataaggaggtaataagcacttggggtgctcaaaacaatatagacttcctttcattatcatacaccaggcacgctgaagatgttcgccatgctcgtgagtttctctctaaactaggtaacctcaaacagacccagatatttgcaaagattgaaaacatagaggggttgacacattttgatgagatattgcgagaagcggatggtatcatcctctcacgtggaaatttggggatagatcttccacccgagaaggtgtttttatttcaaaaagcagctatttacaaatgtaacatggctgggaaacctgctgttgtcacacgtgttgtggatactatgaccgataacctaagacctactcgtgctgaagcaactgatgttgccaatgcagtgttggatggcagtgatgcaattgttcttggggcagaaactttgcgggggttataccctgtagagactatttccactgttggaaaaatttgtgctgaggcagagaaagtttataatcaagatttgtatttcaagaaggctgtcaaatttgttggagagccgatgactcatttggaatcaatagcttcctctgcggtacgggcagccatcaaggttaaggcttctgttattatttgctttacttcatctggcagggctgcaaggttgattgctaagtaccgtccaaccatgcctgtgatatccgttgtcattcctcaactaaagacaaatcaacttcgatggactttcactggagcttttgaggcaaggcaatcacttattgtgagaggtcttttccctatgcttgcagatccacgacatccagctgagtctaaaagtgcaacaaatgaatcaattttgaaggttgctttagaccatggcaaggcttttggtatcataaaggcacatgatcgagttgttgtatgccagaaagttggtgactcctcagttgtgaagattattgagcttgacgaatag

SEQ ID NO: 16069 - protein, 527 aa, Oryza sativa
MQSSPLLLEEPIRMASILEPSKPSFFPAMTKIVGTLGPKSRSVDVISQCLEAGMSVARFDFSWGDPEYHQETLENLRAAIKSTKKLCAVMLDTVGPELQVVNKTEHPISLQADTLVVLTPDQNKEATSNLLPVNFSGLSKAVKNGDTIFIGQYLFTGSETTSVWLEVSEVNGDDVTCVIKNSATLAGSLYTLHVSQIHIDLPTLDNKDKEVISTWGAQNNIDFLSLSYTRHAEDVRHAREFLSKLGNLKQTQIFAKIENIEGLTHFDEILREADGIILSRGNLGIDLPPEKVFLFQKAAIYKCNMAGKPAVVTRVVDTMTDNLRPTRAEATDVANAVLDGSDAIVLGAETLRGLYPVETISTVGKICAEAEKVYNQDLYFKKAVKFVGEPMTHLESIASSAVRAAIKVKASVIICFTSSGRAARLIAKYRPTMPVISVVIPQLKTNQLRWTFTGAFEARQSLIVRGLFPMLADPRHPAESKSATNESILKVALDHGKAFGIIKAHDRVVVCQKVGDSSVVKIIELDE

SEQ ID NO: 16070 - DNA, 1716 bp, Brassica napus; identical to SEQ ID NO: 8817
  CDS (1)..(1716)

SEQ ID NO: 16071 - protein, 571 aa, Brassica napus; identical to SEQ ID NO: 8818

SEQ ID NO: 16072 - DNA, 1584 bp, Brassica napus; identical to SEQ ID NO: 8823
  CDS (1)..(1584)

SEQ ID NO: 16073 - protein, 527 aa, Brassica napus; identical to SEQ ID NO: 8824

SEQ ID NO: 16074 - DNA, 1584 bp, Brassica napus; identical to SEQ ID NO: 8835
  CDS (1)..(1584)

SEQ ID NO: 16075 - protein, 527 aa, Brassica napus; identical to SEQ ID NO: 8836

SEQ ID NO: 16076 - DNA, 1743 bp, Brassica napus; identical to SEQ ID NO: 8837
  CDS (1)..(1743)

SEQ ID NO: 16077 - protein, 580 aa, Brassica napus; identical to SEQ ID NO: 8838

SEQ ID NO: 16078 - DNA, 1743 bp, Brassica napus; identical to SEQ ID NO: 8839
  CDS (1)..(1743)

SEQ ID NO: 16079 - protein, 580 aa, Brassica napus; identical to SEQ ID NO: 8840

SEQ ID NO: 16080 - DNA, 1764 bp, Brassica napus; identical to SEQ ID NO: 8841
  CDS (1)..(1764)

SEQ ID NO: 16081 - protein, 587 aa, Brassica napus; identical to SEQ ID NO: 8842

SEQ ID NO: 16082 - DNA, 1533 bp, Brassica napus; identical to SEQ ID NO: 8843
  CDS (1)..(1533)

SEQ ID NO: 16083 - protein, 510 aa, Brassica napus; identical to SEQ ID NO: 8844

SEQ ID NO: 16084 - DNA, 1497 bp, Brassica napus; identical to SEQ ID NO: 8845
  CDS (1)..(1497)

SEQ ID NO: 16085 - protein, 498 aa, Brassica napus; identical to SEQ ID NO: 8846

SEQ ID NO: 16086 - DNA, 1584 bp, Brassica napus; identical to SEQ ID NO: 8847
  CDS (1)..(1584)

SEQ ID NO: 16087 - protein, 527 aa, Brassica napus; identical to SEQ ID NO: 8848

SEQ ID NO: 16088 - DNA, 1533 bp, Brassica napus; identical to SEQ ID NO: 8849
  CDS (1)..(1533)

SEQ ID NO: 16089 - protein, 510 aa, Brassica napus; identical to SEQ ID NO: 8850

SEQ ID NO: 16090 - DNA, 1584 bp, Brassica napus; identical to SEQ ID NO: 8851
  CDS (1)..(1584)

SEQ ID NO: 16091 - protein, 527 aa, Brassica napus; identical to SEQ ID NO: 8852

SEQ ID NO: 16092 - DNA, 1497 bp, Brassica napus; identical to SEQ ID NO: 8855
  CDS (1)..(1497)

SEQ ID NO: 16093 - protein, 498 aa, Brassica napus; identical to SEQ ID NO: 8856

SEQ ID NO: 16094 - DNA, 1584 bp, Zea mays; identical to SEQ ID NO: 8857
  CDS (1)..(1584)

SEQ ID NO: 16095 - protein, 527 aa, Zea mays; identical to SEQ ID NO: 8858

SEQ ID NO: 16096 - DNA, 1728 bp, Glycine max; identical to SEQ ID NO: 8859
  CDS (1)..(1728)

SEQ ID NO: 16097 - protein, 575 aa, Glycine max; identical to SEQ ID NO: 8860

SEQ ID NO: 16098 - DNA, 1584 bp, Glycine max; identical to SEQ ID NO: 8861
  CDS (1)..(1584)

SEQ ID NO: 16099 - protein, 527 aa, Glycine max; identical to SEQ ID NO: 8862

SEQ ID NO: 16100 - DNA, 1584 bp, Glycine max; identical to SEQ ID NO: 8863
  CDS (1)..(1584)

SEQ ID NO: 16101 - protein, 527 aa, Glycine max; identical to SEQ ID NO: 8864

SEQ ID NO: 16102 - DNA, 1638 bp, Glycine max; identical to SEQ ID NO: 8865
  CDS (1)..(1638)

SEQ ID NO: 16103 - protein, 545 aa, Glycine max; identical to SEQ ID NO: 8866

SEQ ID NO: 16104 - DNA, 1638 bp, Glycine max; identical to SEQ ID NO: 8867
  CDS (1)..(1638)

SEQ ID NO: 16105 - protein, 545 aa, Glycine max; identical to SEQ ID NO: 8868

SEQ ID NO: 16106 - DNA, 1728 bp, Glycine max; identical to SEQ ID NO: 8869
  CDS (1)..(1728)

SEQ ID NO: 16107 - protein, 575 aa, Glycine max; identical to SEQ ID NO: 8870

SEQ ID NO: 16108 - DNA, 1749 bp, Glycine max; identical to SEQ ID NO: 8871
  CDS (1)..(1749)

SEQ ID NO: 16109 - protein, 582 aa, Glycine max; identical to SEQ ID NO: 8872

SEQ ID NO: 16110 - DNA, 1584 bp, Glycine max; identical to SEQ ID NO: 8873
  CDS (1)..(1584)

SEQ ID NO: 16111 - protein, 527 aa, Glycine max; identical to SEQ ID NO: 8874

SEQ ID NO: 16112 - DNA, 1749 bp, Glycine max; identical to SEQ ID NO: 8875
  CDS (1)..(1749)

SEQ ID NO: 16113 - protein, 582 aa, Glycine max; identical to SEQ ID NO: 8876

SEQ ID NO: 16114 - DNA, 1728 bp, Glycine max; identical to SEQ ID NO: 8877
  CDS (1)..(1728)

SEQ ID NO: 16115 - protein, 575 aa, Glycine max; identical to SEQ ID NO: 8878

SEQ ID NO: 16116 - DNA, 1749 bp, Glycine max; identical to SEQ ID NO: 8881
  CDS (1)..(1749)

SEQ ID NO: 16117 - protein, 582 aa, Glycine max; identical to SEQ ID NO: 8882

SEQ ID NO: 16118 - DNA, 1542 bp, Hordeum vulgare; identical to SEQ ID NO: 8883
  CDS (1)..(1542)

SEQ ID NO: 16119 - protein, 513 aa, Hordeum vulgare; identical to SEQ ID NO: 8884

SEQ ID NO: 16120 - DNA, 1584 bp, Oryza sativa; identical to SEQ ID NO: 8885
  CDS (1)..(1584)

SEQ ID NO: 16121 - protein, 527 aa, Oryza sativa; identical to SEQ ID NO: 8886

SEQ ID NO: 16122 - DNA, 1803 bp, Zea mays; identical to SEQ ID NO: 8887
  CDS (1)..(1803)

SEQ ID NO: 16123 - protein, 600 aa, Zea mays; identical to SEQ ID NO: 8888

SEQ ID NO: 16124 - DNA, 1698 bp, Triticum aestivum; identical to SEQ ID NO: 8889
  CDS (1)..(1698)

SEQ ID NO: 16125 - protein, 565 aa, Triticum aestivum; identical to SEQ ID NO: 8890

SEQ ID NO: 16126 - DNA, 1584 bp, Zea mays; identical to SEQ ID NO: 8891
  CDS (1)..(1584)

SEQ ID NO: 16127 - protein, 527 aa, Zea mays; identical to SEQ ID NO: 8892

SEQ ID NO: 16128 - DNA, 1728 bp, Zea mays; identical to SEQ ID NO: 8895
  CDS (1)..(1728)

SEQ ID NO: 16129 - protein, 575 aa, Zea mays; identical to SEQ ID NO: 8896

SEQ ID NO: 16130 - DNA, 1707 bp, Zea mays; identical to SEQ ID NO: 8897
  CDS (1)..(1707)

SEQ ID NO: 16131 - protein, 568 aa, Zea mays; identical to SEQ ID NO: 8898

SEQ ID NO: 16132 - DNA, 1629 bp, Zea mays; identical to SEQ ID NO: 8899
  CDS (1)..(1629)

SEQ ID NO: 16133 - protein, 542 aa, Zea mays; identical to SEQ ID NO: 8900

SEQ ID NO: 16134 - DNA, 1548 bp, Zea mays; identical to SEQ ID NO: 8901
  CDS (1)..(1548)

SEQ ID NO: 16135 - protein, 515 aa, Zea mays; identical to SEQ ID NO: 8902

SEQ ID NO: 16136 - DNA, 1542 bp, Zea mays; identical to SEQ ID NO: 8905
  CDS (1)..(1542)

SEQ ID NO: 16137 - protein, 513 aa, Zea mays; identical to SEQ ID NO: 8906

SEQ ID NO: 16138 - DNA, 1530 bp, Zea mays; identical to SEQ ID NO: 8903
  CDS (1)..(1530)

SEQ ID NO: 16139 - protein, 509 aa, Zea mays; identical to SEQ ID NO: 8904

SEQ ID NO: 16140 - DNA, 1707 bp, Zea mays; identical to SEQ ID NO: 8831
  CDS (1)..(1707)

SEQ ID NO: 16141 - protein, 568 aa, Zea mays; identical to SEQ ID NO: 8832

SEQ ID NO: 16142 - DNA, 1584 bp, Zea mays; identical to SEQ ID NO: 8907
  CDS (1)..(1584)

SEQ ID NO: 16143 - protein, 527 aa, Zea mays; identical to SEQ ID NO: 8908

SEQ ID NO: 16144 - DNA, 1554 bp, Zea mays; identical to SEQ ID NO: 8909
  CDS (1)..(1554)

SEQ ID NO: 16145 - protein, 517 aa, Zea mays; identical to SEQ ID NO: 8910

SEQ ID NO: 16146 - DNA, 1707 bp, Zea mays; identical to SEQ ID NO: 8911
  CDS (1)..(1707)

SEQ ID NO: 16147 - protein, 568 aa, Zea mays; identical to SEQ ID NO: 8912

SEQ ID NO: 16148 - DNA, 1728 bp, Zea mays; identical to SEQ ID NO: 8913
  CDS (1)..(1728)

SEQ ID NO: 16149 - protein, 575 aa, Zea mays; identical to SEQ ID NO: 8914

SEQ ID NO: 16150 - DNA, 20 bp, Artificial sequence
  primer
atggcgatgatagagcaaag

SEQ ID NO: 16151 - DNA, 22 bp, Artificial sequence
  primer
tcacttgacggtcaagatcttg

SEQ ID NO: 16152 - protein, 571 aa, Artificial sequence
  consensus sequence
  Variant (4)..(5): Xaa in position 4 to 5 is any amino acid
  Variant (7)..(7): Xaa in position 7 is any amino acid
  Variant (10)..(20): Xaa in position 10 to 20 is any amino acid
  Variant (21)..(44): Xaa in position 21 to 44 is any or no amino acid
  Variant (46)..(49): Xaa in position 46 to 49 is any amino acid
  Variant (50)..(50): Xaa in position 50 is any or no amino acid
  Variant (52)..(52): Xaa in position 52 is any amino acid
  Variant (58)..(58): Xaa in position 58 is any amino acid
  Variant (59)..(61): Xaa in position 59 to 61 is any or no amino acid
  Variant (63)..(80): Xaa in position 63 to 80 is any amino acid
  Variant (81)..(90): Xaa in position 81 to 90 is any or no amino acid
  Variant (92)..(93): Xaa in position 92 to 93 is any amino acid
  Variant (94)..(116): Xaa in position 94 to 116 is any or no amino acid
  Variant (119)..(120): Xaa in position 119 to 120 is any amino acid
  Variant (122)..(132): Xaa in position 122 to 132 is any amino acid
  Variant (133)..(140): Xaa in position 133 to 140 is any or no amino acid
  Variant (142)..(161): Xaa in position 142 to 161 is any amino acid
  Variant (162)..(178): Xaa in position 162 to 178 is any or no amino acid
  Variant (180)..(186): Xaa in position 180 to 186 is any amino acid
  Variant (187)..(191): Xaa in position 187 to 191 is any or no amino acid
  Variant (193)..(196): Xaa in position 193 to 196 is any amino acid
  Variant (197)..(197): Xaa in position 197 is any or no amino acid
  Variant (199)..(218): Xaa in position 199 to 218 is any amino acid
  Variant (219)..(226): Xaa in position 219 to 226 is any or no amino acid
  Variant (228)..(230): Xaa in position 228 to 230 is any amino acid
  Variant (231)..(242): Xaa in position 231 to 242 is any or no amino acid
  Variant (244)..(246): Xaa in position 244 to 246 is any amino acid
  Variant (247)..(247): Xaa in position 247 is any or no amino acid
  Variant (250)..(251): Xaa in position 250 to 251 is any amino acid
  Variant (253)..(261): Xaa in position 253 to 261 is any amino acid
  Variant (262)..(262): Xaa in position 262 is any or no amino acid
  Variant (264)..(267): Xaa in position 264 to 267 is any amino acid
  Variant (270)..(274): Xaa in position 270 to 274 is any amino acid
  Variant (276)..(290): Xaa in position 276 to 290 is any amino acid
  Variant (291)..(299): Xaa in position 291 to 299 is any or no amino acid
  Variant (301)..(301): Xaa in position 301 is any amino acid
  Variant (303)..(312): Xaa in position 303 to 312 is any amino acid
  Variant (313)..(315): Xaa in position 313 to 315 is any or no amino acid
  Variant (317)..(320): Xaa in position 317 to 320 is any amino acid
  Variant (322)..(323): Xaa in position 322 to 323 is any amino acid
  Variant (325)..(325): Xaa in position 325 is any amino acid
  Variant (332)..(332): Xaa in position 332 is any amino acid
  Variant (334)..(342): Xaa in position 334 to 342 is any amino acid
  Variant (345)..(346): Xaa in position 345 to 346 is any amino acid
  Variant (348)..(354): Xaa in position 348 to 354 is any amino acid
  Variant (356)..(356): Xaa in position 356 is any amino acid
  Variant (358)..(358): Xaa in position 358 is any amino acid
  Variant (359)..(359): Xaa in position 359 is any or no amino acid
  Variant (362)..(362): Xaa in position 362 is any amino acid
  Variant (364)..(365): Xaa in position 364 to 365 is any amino acid
  Variant (368)..(370): Xaa in position 368 to 370 is any amino acid
  Variant (372)..(372): Xaa in position 372 is any amino acid
  Variant (378)..(379): Xaa in position 378 to 379 is any amino acid
  Variant (385)..(386): Xaa in position 385 to 386 is any amino acid
  Variant (389)..(389): Xaa in position 389 is any amino acid
  Variant (391)..(392): Xaa in position 391 to 392 is any amino acid
  Variant (396)..(396): Xaa in position 396 is any amino acid
  Variant (398)..(398): Xaa in position 398 is any amino acid
  Variant (400)..(400): Xaa in position 400 is any amino acid
  Variant (402)..(402): Xaa in position 402 is any amino acid
  Variant (405)..(408): Xaa in position 405 to 408 is any amino acid
  Variant (409)..(410): Xaa in position 409 to 410 is any or no amino acid
  Variant (412)..(418): Xaa in position 412 to 418 is any amino acid
  Variant (420)..(440): Xaa in position 420 to 440 is any amino acid
  Variant (441)..(468): Xaa in position 441 to 468 is any or no amino acid
  Variant (470)..(471): Xaa in position 470 to 471 is any amino acid
  Variant (472)..(472): Xaa in position 472 is any or no amino acid
  Variant (474)..(475): Xaa in position 474 to 475 is any amino acid
  Variant (477)..(478): Xaa in position 477 to 478 is any amino acid
  Variant (480)..(486): Xaa in position 480 to 486 is any amino acid
  Variant (488)..(490): Xaa in position 488 to 490 is any amino acid
  Variant (491)..(491): Xaa in position 491 is any or no amino acid
  Variant (493)..(509): Xaa in position 493 to 509 is any amino acid
  Variant (510)..(528): Xaa in position 510 to 528 is any or no amino acid
  Variant (530)..(531): Xaa in position 530 to 531 is any amino acid
  Variant (533)..(555): Xaa in position 533 to 555 is any amino acid
  Variant (556)..(570): Xaa in position 556 to 570 is any or no amino acid
TKIXXTXGPXXXXXXXXXXXXXXXXXXXXXXXXXXXXXXXXXXXGXXXXXRXNFSHGXXXXHXXXXXXXXXXXXXXXXXXXXXXXXXXXXDXXXXXXXXXXXXXXXXXXXXXXXXXGPXXRXXXXXXXXXXXXXXXXXXXGXXXXXXXXXXXXXXXXXXXXXXXXXXXXXXXXXXXXXGXXXXXXXXXXXXGXXXXXVXXXXXXXXXXXXXXXXXXXXXXXXXXXXNXXXXXXXXXXXXXXXPXXXXKDXXDXXXXXXXXXXDXXXXSFXXXXXDXXXXXXXXXXXXXXXXXXXXXXXXKXEXXXXXXXXXXXXXIXXXXDXXMXARGDLGXEXXXXXXXXXQKXXIXXXXXXXKXVXXATXMXXSMXXXPXPTRAEXXDVANAXXDGXDXXMLSXEXAXGXYPXXXXXXMXXXXXXXEXXXXXXXXXXXXXXXXXXXXXXXXXXXXXXXXXXXXXXXXXXXXXXXXXIXXXTXXGXXAXXXXXXXPXXXXIXXXXXXXXXXXXXXXXXXXXXXXXXXXXXXXXXXXXGXXPXXXXXXXXXXXXXXXXXXXXXXXXXXXXXXXXXXXXXXG

SEQ ID NO: 16153 - protein, 42 aa, Artificial sequence
  protein pattern
  Variant (2)..(3): Xaa in position 2 to 3 is any amino acid
  Variant (4)..(6): Xaa in position 4 to 6 is any or no amino acid
  Variant (9)..(13): Xaa in position 9 to 13 is any amino acid
  Variant (14)..(14): Xaa in position 14 is Ala or Pro
  Variant (19)..(20): Xaa in position 19 to 20 is any amino acid
  Variant (22)..(22): Xaa in position 22 is Ile, Leu or Val
  Variant (23)..(23): Xaa in position 23 is Ala, Glu, Gly, Ser or Thr
  Variant (24)..(24): Xaa in position 24 is any amino acid
  Variant (26)..(26): Xaa in position 26 is Ile or Val
  Variant (27)..(27): Xaa in position 27 is any amino acid
  Variant (28)..(28): Xaa in position 28 is Ala, Asp, Glu or Gln
  Variant (29)..(29): Xaa in position 29 is any amino acid
  Variant (30)..(30): Xaa in position 30 is Ala, Gly, Ser or Thr
  Variant (32)..(33): Xaa in position 32 to 33 is any amino acid
  Variant (37)..(37): Xaa in position 37 is Ala, Glu, Gly, Asn or Ser
  Variant (39)..(39): Xaa in position 39 is Ser, Thr or Val
  Variant (40)..(40): Xaa in position 40 is Ala, Ser or Thr
  Variant (41)..(41): Xaa in position 41 is any amino acid
AXXXXXSMXXXXXXTRAEXXDXXXAXXXXXDXXMLSXEXXXG

SEQ ID NO: 16154 - protein, 21 aa, Artificial sequence
  protein pattern
  Variant (2)..(5): Xaa in position 2 to 5 is any amino acid
  Variant (6)..(8): Xaa in position 6 to 8 is any or no amino acid
  Variant (10)..(10): Xaa in position 10 is Ala, Gly, Ser or Val
  Variant (11)..(11): Xaa in position 11 is any amino acid
  Variant (13)..(13): Xaa in position 13 is Ile or Val
  Variant (18)..(18): Xaa in position 18 is Leu or Met
  Variant (19)..(19): Xaa in position 19 is Ala or Gly
  Variant (20)..(20): Xaa in position 20 is any amino acid
  Variant (21)..(21): Xaa in position 21 is Glu or Gln
IXXXXXXXDXXMXARGDXXXX

SEQ ID NO: 16155 - DNA, 1809 bp, Glycine max
  CDS (1)..(1809)
atggcaccttccttatgtctatcccttccaaacacttccaccttctctgatttcaacaagctacactgtttctgtttccacccaaaaaaaccgaaccggcaatttatgtctggttgggtcccagaagctcggcccgtggcggcccatttgggttaccgaaagaagcttaatgcgttgagccaagatggagagagctaccacgggacgatggaggataagcaattcgtgcgttcgtttcgcgaggcctggccttacttgtgggcctatcgtggtagcacctttgttatcattatttccggtgaaattgtttctggtcctttcttggatcccattctcaaggatatagctttccttaatcacctaggtatccgctttgttcttgttccggggacacatgtgcagatagacaagcttctgaatgagagagggtgccagcctaagtatgttggtagatataggataactgatgatgaatctctggaagctgcgatggaagcagctggaggcataagattgatgatagaagcaaaactttctcctggaccttctatatgcaatattcgtcgacatggtgacaatagtcgatggcacgaagttggtgtcagtgttgccagtggtaactttcttgcagccaagagaagagaggtggtcaatggaattgattttgggtcaactggggaagttaaaaaagtagacgtatctcgcatgcgtgagagacttgatggtggttgtgtagttatattaaccaacttgggctactccagctctggagaagtattaaattgcaacacttatgaagttgccacagcttgtgccttggctataggggcagacaaattaatatgccttatagatggtccaatacttgatgagagtggacgcttaattcgtttcttgccacttcaagaagcagacatgctaattcgtaaacgggctgagcaaagtgaagcagctgctaactatgtgaaagctgttgacgaagaaggtttcaactctcttgagtataacaattttaatggagcagtcaaatcaccacctattggacgttttacagaatggcataatgcaaccttccataatggtgttggttttgagagtggaaatggcttagggtctggtgagcaaggttttgctattggaggtcaagaacggctaagtcgaatgaatggttacctgtcagaattggctgctgcagcttttgtttgcagaggtggtgttcaaagagttcacttgctggatggaactattagtggagttttgttgttggaattgtttaaaagagatgggatgggaacgatggtggctagtgacctttatgaaggcactcggacagcaggggtaaaagatatttctggaataaaacaacttattcagcctttggaggcatctggcatattggttaagcggactgatgaagagctgttaaaaacattggattcgttcattgttgtggaaagagaaggtcacataattgcttgtgctgccctttttcctcactttgaggagaagtgcggagaggttgcttgtattgcagtatctcctgattgccgtggccaaggacagggtgacaaattgcttgattatatggagaagaaagcatcatctcttggattgaatatgcttttccttcttacaacacgtacagcagattggtttgtaaggcgtggattttcggaatgttcaattgattatcttcctgaaaagaaaaggagaatgatcaatctttcccgcaattctaagtattatatgaagaagcttctgccaaatattagtggaattactgttggtgtaaaatctgcttcaagttag

SEQ ID NO: 16156 - protein, 602 aa, Glycine max
MAPSLCLSLPNTSTFSDFNKLHCFCFHPKKPNRQFMSGWVPEARPVAAHLGYRKKLNALSQDGESYHGTMEDKQFVRSFREAWPYLWAYRGSTFVIIISGEIVSGPFLDPILKDIAFLNHLGIRFVLVPGTHVQIDKLLNERGCQPKYVGRYRITDDESLEAAMEAAGGIRLMIEAKLSPGPSICNIRRHGDNSRWHEVGVSVASGNFLAAKRREVVNGIDFGSTGEVKKVDVSRMRERLDGGCVVILTNLGYSSSGEVLNCNTYEVATACALAIGADKLICLIDGPILDESGRLIRFLPLQEADMLIRKRAEQSEAAANYVKAVDEEGFNSLEYNNFNGAVKSPPIGRFTEWHNATFHNGVGFESGNGLGSGEQGFAIGGQERLSRMNGYLSELAAAAFVCRGGVQRVHLLDGTISGVLLLELFKRDGMGTMVASDLYEGTRTAGVKDISGIKQLIQPLEASGILVKRTDEELLKTLDSFIVVEREGHIIACAALFPHFEEKCGEVACIAVSPDCRGQGQGDKLLDYMEKKASSLGLNMLFLLTTRTADWFVRRGFSECSIDYLPEKKRRMINLSRNSKYYMKKLLPNISGITVGVKSASS

SEQ ID NO: 16157 - DNA, 1956 bp, Brassica napus
  CDS (98)..(1870)
tgggtcccacttaccgccgccgtctcccgccggtttaaattcattttctatggaatcttaattgatttcttctaaaacgaagcagtgcaagtaaaaaatgatggagcagggagctttgttgcgttctgcgtcttttcaattacgccgaacgaggaacgatctttcgtctttcaagccggaaaataagttaaaccctggtcaaatccggtttaggtttaaaccggttggttccgtggcggcgaaatgcaatacgtacaacagctacgcggcgagtggaggcggcgacgcgggggctgagcatccagtggacgacaaagagttcgtgcgctggttccgtgaagcttggccttatctgtgggcccacggtggctgcactttcgtcgttgtcatctccggcgatatactcgccggcccttactgtgatcccattttaaaggacatagcgtttctccatcatcttgggataagattcgttctagttccaggaacacaagtgcaaatcgaccagcttctgtctgaaagaggacgcgaggctacatatgtgggacgttacagagtaacagacgcagcatcgttgcaagccgccacggaagctgcgggagctatctcagtgatgcttgaggctaaactatctcctggaccttccatttgcaatatccgtaggcatggtgatagtagtcgtttgcatgatataggtgtcagggttgataccggcaacttctttgcagcgaaaaggagaggcgttgttgatggtgttgattttggagcgactggtgaagtgaagaagatagatgttgaccggatttgtgagaggcttgacggtggttctgtagtcttgttgaggaacttgggtcactctagctccggagaagtcttaaattgcaatacctatgaggttgctacagcttgtgcattagctataggagcagataagcttatttgcataatggacggtccaattcttgatgagagtggacatcttattcgtttcttgacactccaagaagcagatacgttagtgagaaaacgtgtacagcaaagcgacattgctgctaactatgtaaaggctgttggtgatggaagcatggcttatcaagaacctcctggtaacgggagagcagcgttttggggaaacgggaaccacactccgatctttcaaaacggtgttggatttgacattgggagtgggttagggtctggtgagcaaggctttgctattggtggtgaggagagactaagccgccaaaacggttatctttccgaactggctgctgctgcttttgtctgcaggggtggagttaaaagagttcatttgttggatggtactataactggagttctattgttggagcttttcaaaagagatggaatggggactatggtcgctagtgatgtatacgaaggaacacgagacgccaaagtaaatgatcttgcaggaatcagacgtatcatcaaacctttggaggaagctgggatcttggtccgcagaaccgacgaggagttactccaagctttggactccttcgtggtagtcgaaagggaaggtcaaatcatcgcttgtgcagctctgttcccattcttccaagacaaatgcggagaagtcgcagccatcgcggttgcatcagactgccgcggtcaaggccaaggcgataaactactagattacatggagaagaaagcatcctctctcgggttagacacgctgtttctcctcacaacgcgagcagcagactggttcgtgagacgcgggttccaagaatgctcaatcgaggtcataccagagaccagaaggcaaagaatcaacctctcaagaaaatcaaagtactacatgaagaagctactacctgataagagtggcatctcaatataacacaaacagcaatcattattgtaaaaattaaaaaacattttgcaatcaagcttttatttctattattcaagaaaaaaaaaaaaaaa

SEQ ID NO: 16158 - protein, 590 aa, Brassica napus
MMEQGALLRSASFQLRRTRNDLSSFKPENKLNPGQIRFRFKPVGSVAAKCNTYNSYAASGGGDAGAEHPVDDKEFVRWFREAWPYLWAHGGCTFVVVISGDILAGPYCDPILKDIAFLHHLGIRFVLVPGTQVQIDQLLSERGREATYVGRYRVTDAASLQAATEAAGAISVMLEAKLSPGPSICNIRRHGDSSRLHDIGVRVDTGNFFAAKRRGVVDGVDFGATGEVKKIDVDRICERLDGGSVVLLRNLGHSSSGEVLNCNTYEVATACALAIGADKLICIMDGPILDESGHLIRFLTLQEADTLVRKRVQQSDIAANYVKAVGDGSMAYQEPPGNGRAAFWGNGNHTPIFQNGVGFDIGSGLGSGEQGFAIGGEERLSRQNGYLSELAAAAFVCRGGVKRVHLLDGTITGVLLLELFKRDGMGTMVASDVYEGTRDAKVNDLAGIRRIIKPLEEAGILVRRTDEELLQALDSFVVVEREGQIIACAALFPFFQDKCGEVAAIAVASDCRGQGQGDKLLDYMEKKASSLGLDTLFLLTTRAADWFVRRGFQECSIEVIPETRRQRINLSRKSKYYMKKLLPDKSGISI

SEQ ID NO: 16159 - DNA, 2096 bp, Triticum aestivum
  CDS (110)..(1852)
gaattcccgggtcgacttcgctgtcgacgatttcgtgagcgcggactgtttccctccccacttccccagtcacgaggcctagggttcgtaggtgggtccacttgcttacatggcctctatggttgccgccgcgcgcctcgccggcggggtctcgcggctgtcggctcagggttctactgcccggggccttccgcccggcagccttcgacttcccccgccgcgccggcgtctgcgcagcagcgtccggtgctgcgtggttcgccatcccggcggcggcggcggcgtggacgcgggggaggagttcgtcgggttcttccgggaggcgtggccgtacatacggggccatcgtgggagcaccttcgtggtcgttatatccagcgaggttgtgtcggggccacacttggaccgcattttgcaggatatttcactacttcatggtcttggcattaactttgttcttgttccgggaacacatgtccagattgataaactattgtcagaaagaggaaggaaggctaagtatgttggtcagtaccgagttaccgattctgattcactagaagctgcgatggaggcagctggcagaataaggttaacaatagaagcaaagctctctcctggccctccaatgttaaacctccgtagacatggtgttattggtcattggcatggtcttgtggataatgttgcaagtggcaatttccttggtgctaagagaagaggggtagttcatggtgttgattacggatttactggtgaagttaagaaaatagatgttgcacggataaaagaaaggcttgatagtgatagcattgttgttgtgagcaatatgggatactcgagctcaggagaagttctaaattgcaacacttacgaagtagccaccgcatgtgccttagccatagaggcggataaacttatctgcgttgtggacggtcagatatttgatgagaatggacgagtcattcatttcatgtctctggaggaagctgatatgttgatcagaaagcgtgctaagcaaagtgatattgctgcaaattatgtcaaggttgttgatgaggaggaccatgaaccatctttgaacggaaaggggcatcttaatgggtacgctgcttcttttcaaaacggtttgggttttaacaatggaaatggtatttgttctggtgagcaagggtttgctattggtggtgaagagcgattaagcaggtcaaatggctatctttctgagttggctgcagctgcttatgtatgccatgctggtgttcaaagagtgcatatcatagatggtacagttgatggatcactgctattagagttgtttacaagagatggtgctgggacaatgattgcgagggatgtttatgaaggaacaagaatggcgacggaggaagatcttcctggcataagaaaacttatctacccactagaggaatctggtgttttagtgcgaagaacagataaagagcttcttgaagcgttgtattcattctatgttgttgaaagagatggttcagtaattgcatgtgctgctctctttccatttcccgaggacaaatctggtgaagttgctgcaattgctgtatctgaagaatgccgaggaagaggtatgggggataagttgcttgattacattgagaaggaggcattatcccttggtcttggcaaattgttcttgcttactacacggacagccgattggtttgtgcgacgtggcttctcagagtgttcgattgaatctattcctgagcagagaagaaaacgcatcaatctgtcacgtggatcaaaatattatataaagcagctccagccaaagcatgctggtgtccctgtcaacaattttgctggcagatgatagggcttccaagaatttttgtgagagtgagacgagatatctgcactggttacatcaaggcttttatatatgttattagttgtaatttcagatagaaatataactgcagcctgtgatagcggcttaaattttttctcttttacttatggatgtaaaaaaggcactttgtgacacaacagaaaacaaatatcagaggaatttctatacagaaaccatctgcaagcagtataaaaaaaaaaaaaaa

SEQ ID NO: 16160 - protein, 580 aa, Triticum aestivum
MASMVAAARLAGGVSRLSAQGSTARGLPPGSLRLPPPRRRLRSSVRCCVVRHPGGGGGVDAGEEFVGFFREAWPYIRGHRGSTFVVVISSEVVSGPHLDRILQDISLLHGLGINFVLVPGTHVQIDKLLSERGRKAKYVGQYRVTDSDSLEAAMEAAGRIRLTIEAKLSPGPPMLNLRRHGVIGHWHGLVDNVASGNFLGAKRRGVVHGVDYGFTGEVKKIDVARIKERLDSDSIVVVSNMGYSSSGEVLNCNTYEVATACALAIEADKLICVVDGQIFDENGRVIHFMSLEEADMLIRKRAKQSDIAANYVKVVDEEDHEPSLNGKGHLNGYAASFQNGLGFNNGNGICSGEQGFAIGGEERLSRSNGYLSELAAAAYVCHAGVQRVHIIDGTVDGSLLLELFTRDGAGTMIARDVYEGTRMATEEDLPGIRKLIYPLEESGVLVRRTDKELLEALYSFYVVERDGSVIACAALFPFPEDKSGEVAAIAVSEECRGRGMGDKLLDYIEKEALSLGLGKLFLLTTRTADWFVRRGFSECSIESIPEQRRKRINLSRGSKYYIKQLQPKHAGVPVNNFAGR

SEQ ID NO: 16161 - DNA, 1332 bp, Klebsiella pneumoniae subsp. pneumoniae MGH 78578
  CDS (1)..(1332): transl_table=11
atggtgaaggaacgtcgcactgaactggtagaaggattccgccattctgttccctatattaatgcccatcggggaaaaacgtttgtcatcatgctgggcggcgaagccattgagcatgaaaatttctcaaatattgtcaatgacataggattattgcatagcctgggcattcgcctggtggtggtctatggcgcccgcccgcagattgacgctaacctcgccgagcaccatcacgagccggtctatcacaagcagacgcgagtgactgacgccaaaacgctggagctggttaagcaggcggcggggatgctgcagctggagatcaccgcccgtctgtcgatgagcctcaacaacaccccgctgcagggggcccatatcaacgttgtcagcggcaactttatcattgcccagccgctgggcgtcgatgacggcgtcgattattgccacagcggacgcattcgccgcattgacgaagaggcgattcatcgtcagctcgacagcggcgccattgtcctgatggggccggtcgcggtgtcggtcaccggcgagagctttaacctgacttcggaagagatcgctacccagctggccatcaagctgaaggcggagaaaatgatcggcttctgttcgtcgcaaggggtttacaaccaggccggggaaattgtctccgaactgttccctaatgaggcgcaagcccgcgtcgaagagctggaagcagacgaagactataactccggcaccgtgcgcttcctgcgcggggcggtgaaggcctgccgcagcggcgtacggcgctgccacctgatcagctatcaggaaaatggcgcgctgctgcaggagctgttttcacgcgacggcatcggcacccagatcgtcatggagagcgcggagcagatccgtcgggcgaccatcaatgatatcggcggtattcttgagctgataagcccgctcgagcagcagggcattctggtacgccgttcccgcgaacagctggagatggagatcgacaaattcaccattattcagcgcgataacaccaccatcgcctgcgccgccctctatcctttcccggaagagaagatcggcgaaatggcctgcgtggcggtgcatccggattaccggagctcgtcgcggggagaggtgctgctggagcgtattgccgctcaggccaggcagatgggactgagcaaactgttcgtgttaaccacccgcagcatccactggttccaggagcgcggcttcacgccggtggatatcgacctgctgccggagagtaaaaagcagatgtataactatcagcgccggtcgaaggtgctgatggccgacctcgcttaa

SEQ ID NO: 16162 - protein, 443 aa, Klebsiella pneumoniae subsp. pneumoniae MGH 78578
MVKERRTELVEGFRHSVPYINAHRGKTFVIMLGGEAIEHENFSNIVNDIGLLHSLGIRLVVVYGARPQIDANLAEHHHEPVYHKQTRVTDAKTLELVKQAAGMLQLEITARLSMSLNNTPLQGAHINVVSGNFIIAQPLGVDDGVDYCHSGRIRRIDEEAIHRQLDSGAIVLMGPVAVSVTGESFNLTSEEIATQLAIKLKAEKMIGFCSSQGVYNQAGEIVSELFPNEAQARVEELEADEDYNSGTVRFLRGAVKACRSGVRRCHLISYQENGALLQELFSRDGIGTQIVMESAEQIRRATINDIGGILELISPLEQQGILVRRSREQLEMEIDKFTIIQRDNTTIACAALYPFPEEKIGEMACVAVHPDYRSSSRGEVLLERIAAQARQMGLSKLFVLTTRSIHWFQERGFTPVDIDLLPESKKQMYNYQRRSKVLMADLA

SEQ ID NO: 16163 - DNA, 1851 bp, Oryza sativa (japonica cultivar-group)
  CDS (1)..(1851)
atggcggcggcggcgtcgctcgccgccgcgcgattcgccggcgaggcgtccccggcgccagctgcggcgggggcggggacggggacgtggcgggcgcggtgcgccgggagggtggtggcgatgccgatgcggcggcagtgcgccaggggcgtcgtcgtgcggtgcgcaggggcgggggcggggcggtcgttcggtggggcctcctgcgggggcgggggcgggggcgggggcggggcggaggatcaggaggaggaggggacgaggttcgtggggtggtttcgggaggcctggccctacgtccgtggccaccgggggagcaccttcgtcgtcgtcgtctccggtgaggtcgtcgccgggccccacctcgacggcattctccaggatatttcacttcttcatggtcttgggatcaaatttgttcttgttcctggaacacatgttcagattgataagctcctatctgagagagggaagaaggccaagtatgctggtcgttaccgtattactgattctgattcattagaggctgcaatggaggcagcaggcagaatacgcttaactatagaagcaaaactatcccctggtcccccaatgttgaatcttcgtcggcatggtgttaatggtcgttggcatgaaatatgtgataatgttgcaagtggaaactttcttggcgctaagagacggggggttgttggtggcattgattatggattcactggtgaagttaagaaaatagatgtttcacggataaaagaaagacttgatagagatagcatagttgttgtgagcaatatgggatattccagctctggcgaggtgttgaattgcaacacatatgaagtcgctacagcttgtgctttagctatcgaggcagacaagcttatctgcattgttgatggtcaaatatttgatgaacatggtcgagtcaatcgtttcatgtctattgaagaagcggacatgttgatcagaacacgtgctaagcagagtgagattgctgcaaattatgtcgaagttgtaggtgaggaggatattagttatgctcgcaatcttcctatcaaagaggagaaagaattaggattgattggaagggacttcgttgatgggtatactgcatctttccggaatggtgtgggtttcaataacggaaatggtctgtctggtgagcaagggtttgcaattggtggggaagagcggttgagtaggtcaaatggttacctttcagagttagcagcagcagcatatgtatgcaatggaggcgttcaaagggttcacattatagatggcactgttggcggatcattgttgttggaattattcacaagagatggtgttggaacgatgatagctagagacatgtatgaaggaacaaggatggctagagaagaagatctttctggtattagaaagatcatccgacccttagaagaatctggtgtcctagtgcggcgaacagataaagagcttctagaagcattgaagtcatttatcgtcgtggaaagagatggttcaatcattgcatgtgctgctctctttccatttcttgaggataaatctggggaagttgccgctattgctgtatctgaagaatgtcgaggacagggtcaaggggataagttacttgattacgtcgagaagaaggcattatcgcttggtcttgagaaaatattcttgctcaccacacgaacagcagactggtttgttcggcgtggcttcaaggagtgttcgattgagtccctgcctgcgcagaggagaaaacgaatcgatctttcacgtggatcaaaatattacatcaagcggctccgggcagcagagattgggcagatggctgttaacaattttgctgtcagatga

SEQ ID NO: 16164 - protein, 616 aa, Oryza sativa (japonica cultivar-group)
MAAAASLAAARFAGEASPAPAAAGAGTGTWRARCAGRVVAMPMRRQCARGVVVRCAGAGAGRSFGGASCGGGGGGGGGAEDQEEEGTRFVGWFREAWPYVRGHRGSTFVVVVSGEVVAGPHLDGILQDISLLHGLGIKFVLVPGTHVQIDKLLSERGKKAKYAGRYRITDSDSLEAAMEAAGRIRLTIEAKLSPGPPMLNLRRHGVNGRWHEICDNVASGNFLGAKRRGVVGGIDYGFTGEVKKIDVSRIKERLDRDSIVVVSNMGYSSSGEVLNCNTYEVATACALAIEADKLICIVDGQIFDEHGRVNRFMSIEEADMLIRTRAKQSEIAANYVEVVGEEDISYARNLPIKEEKELGLIGRDFVDGYTASFRNGVGFNNGNGLSGEQGFAIGGEERLSRSNGYLSELAAAAYVCNGGVQRVHIIDGTVGGSLLLELFTRDGVGTMIARDMYEGTRMAREEDLSGIRKIIRPLEESGVLVRRTDKELLEALKSFIVVERDGSIIACAALFPFLEDKSGEVAAIAVSEECRGQGQGDKLLDYVEKKALSLGLEKIFLLTTRTADWFVRRGFKECSIESLPAQRRKRIDLSRGSKYYIKRLRAAEIGQMAVNNFAVR

SEQ ID NO: 16165 - DNA, 1794 bp, Oryza sativa (japonica cultivar-group)
  CDS (1)..(1794)
atggcctcgccgtcgtcggtcgcctccgctcgcgccgccgccgaaggagcggcgacggtggctgctcggggtggcgccgagcccgcccgggccctgcggctgcctccggcgaacggggcgcggcgcggtgtccggtgctgctgcggggccgcgaatcccggcggcggtagcggtggcggtggcggcgcggtcgcgcgggaggagttcgtcgggttcttcagggaggcgtggccgtacatccggggccacagggggagcaccttcgtggtcgtcatctccagcgaggtcgtgtcagggccgcacttcgacggcattctgcaggatatttcacttcttcatggtttggggattcaatttgttcttgttcctggaacacatgtccaaattgataagctcttgtcagaaagagggaggatggctaagtatgttggccagtaccgagttactgattctgattcattagaggctgcaatggaggcagctggaagaatacgattaactattgaggccaagctttctcctggtcctccaatgttgaatcttcgtagacatggtgttattggacgttggcatggtcttgtggataatgttgcaagtggcaacttccttggtgctaagagaagaggagtagttagtggtattgattatgggttcaccggcgaggttaagaaaattgatgtttcacgaataaaagaaaggcttgatagtgatagcatagttgttgtgagcaatatgggatactcgagctcaggagaagtgctaaactgcaacacttatgaagtagctactgcgtgtgctttagccattgaggcggataagctgatctgcattgtagatggccagatatttgatgagcatggacgtgtcattcctttcatgtctcttgaggaagcagatatgttgatcagaaagcgtgctaagcaaagtgatatcgcagcaaattatgtcaaggttgtggacgaggagggtatcagtcatttgcatgaggatgtcaaaccatttttgaacggaagcggtcctcttggtgcatatgctgcttctttccataatggcttgggtttcaacaatggaaatggtattttatctggtgagcaaggatttgctattggtggtgaagagcggttaagtagatcaaatgcctatctttctgagttggcagcagcagcatttgtatgccatggtggtgttcaaagagttcatatcatagatggaacagttgatggatcactgctattagaattgtttacaagagatggtacaggaacaatgatagctagggatgtgtatgaaggaacaaggatagctagagaggaggatcttcttgggataagaaaaattcttcgaccactagaagaatctggtgttttggtgaagagaactgataaggagcttcttgaagcactggagtcgttctatgttgttgaaagggatggttcaatcattggatgtgctgctctgttcccatttcccgaagataaatctggagaagttgctgcgattgctgtatctgaagaatgccgaggaagaggtcaaggggacaagttgcttgattatgatgatgcttcagactatattgagaaggcagcaatgtcccttggtctggagaaattattcttgctcacgacacggacagctgattggtttgtgcggcgtggcttcttggagtgttcgattgaatccattcctgagcaaaggagaaaacgcatcaatttatcacgaggatcaaagtattatataaagcagcttcagccaaagcacgccagtgttactcccaacaatattactgccagatga

SEQ ID NO: 16166 - protein, 597 aa, Oryza sativa (japonica cultivar-group)
MASPSSVASARAAAEGAATVAARGGAEPARALRLPPANGARRGVRCCCGAANPGGGSGGGGGAVAREEFVGFFREAWPYIRGHRGSTFVVVISSEVVSGPHFDGILQDISLLHGLGIQFVLVPGTHVQIDKLLSERGRMAKYVGQYRVTDSDSLEAAMEAAGRIRLTIEAKLSPGPPMLNLRRHGVIGRWHGLVDNVASGNFLGAKRRGVVSGIDYGFTGEVKKIDVSRIKERLDSDSIVVVSNMGYSSSGEVLNCNTYEVATACALAIEADKLICIVDGQIFDEHGRVIPFMSLEEADMLIRKRAKQSDIAANYVKVVDEEGISHLHEDVKPFLNGSGPLGAYAASFHNGLGFNNGNGILSGEQGFAIGGEERLSRSNAYLSELAAAAFVCHGGVQRVHIIDGTVDGSLLLELFTRDGTGTMIARDVYEGTRIAREEDLLGIRKILRPLEESGVLVKRTDKELLEALESFYVVERDGSIIGCAALFPFPEDKSGEVAAIAVSEECRGRGQGDKLLDYDDASDYIEKAAMSLGLEKLFLLTTRTADWFVRRGFLECSIESIPEQRRKRINLSRGSKYYIKQLQPKHASVTPNNITAR

SEQ ID NO: 16167 - DNA, 1830 bp, Arabidopsis thaliana
  CDS (1)..(1830)
atgacagagcgtggagctatggtggtatcgtcttctacctgttacgttccttttcgatgtcctcaagcaagaaaagattttgctttcgtcgagccgagtaagaagctaaaccctaatcgtgtattgataaagcctccggtttacacgtattctccggcactgacggcggcgaaatgtaacatttttgattacgcggaaactggtgagaatttggtcggcgataagcaatttgtgcggtggtttcgtgaagcttggccttatttgtgggctcatcgtagctgtaccttcgtcgttactatctccggcgatgtcttagacggcccttattgtgatctcgttttaaaggacatagcatttcttcatcatctgggcattaagtttgttctagttcctggaactcaagtgcaaatcgaccagcttctagctgagagaggacgcgagcctacatatgtaggtcgttacagagtcacagactcagcatctcttcaggctgctaaggaagctgcgggagcaatatctgtaatgattgaggccaaactatctcccggaccttctatttacaatatacgccgacatggtgatagtagtcgtttgcatgaaacaggcgttagggtcgatactggtaacttctttgcagcaaagagaagaggtgttgttgatggtgttgattttggagcaactggtttagtgaagaagatagatgtagatcgaatccgtgagaggcttgatagtggttctgtagttttattgaggaacttgggccattccagcaccggagaagtcttaaattgcaatacctatgaggttgctacagcatgtgctttagctataggagcagataagcttatttgcataatggatggtccagttcttgatgagaatggacatcttgttcggttcttgactcttcaggaagcagatacattagtcagaaaacgggcacagcaaagcgagatcgctgccaattacgtgaaggctgttggggatggaggcataagtagttttcctgaacctcttggttacaatggtatggtgacgactcccaacaatcatattgggagaccgatttgggaaaaactcagtccgacctttcagaatggtgttggatttgacaacggaaatgggttgtggtctggggagcaaggttttgctattggcggtgaggagagaattagccgtttgaatggatatctctctgaactggctgcagcagcgttcgtttgcagaggtggtgtcaaaagagttcacttattggatggtactataagtggagtgctattgttggagcttttcaaaagagatggaatggggactatggtggcaagtgatgtatatgaaggaaaccgggaggcgaaagtggaagatcttgctggaataagacaaataatcaaacccctggaagaatctggggctttagttcgtagaactgatgaggagcttctgcgagctttggattcgtttgtggttgtggaaagggaaggacatattatcgcttgcgcggctttgttccctttctttgaagaaaaatgtggagaagttgcagctatcgcagttgcatcagattgccgtggacaaggccagggagataaattgctcgattacattgagaagaaagcgtcagctcttggacttgagatgctatttctgctgacaacgagaaccgcggactggtttgtgagacgcgggtttcaggaatgtccaatcgagatgataccagaggcaagacgggaaagaatcaatctttcgaggagatcaaagtattacatgaagaagctgttgccagacaggagtggaatttctgttgttcgaacatttcagtatgattcttga

SEQ ID NO: 16168 - protein, 609 aa, Arabidopsis thaliana
MTERGAMVVSSSTCYVPFRCPQARKDFAFVEPSKKLNPNRVLIKPPVYTYSPALTAAKCNIFDYAETGENLVGDKQFVRWFREAWPYLWAHRSCTFVVTISGDVLDGPYCDLVLKDIAFLHHLGIKFVLVPGTQVQIDQLLAERGREPTYVGRYRVTDSASLQAAKEAAGAISVMIEAKLSPGPSIYNIRRHGDSSRLHETGVRVDTGNFFAAKRRGVVDGVDFGATGLVKKIDVDRIRERLDSGSVVLLRNLGHSSTGEVLNCNTYEVATACALAIGADKLICIMDGPVLDENGHLVRFLTLQEADTLVRKRAQQSEIAANYVKAVGDGGISSFPEPLGYNGMVTTPNNHIGRPIWEKLSPTFQNGVGFDNGNGLWSGEQGFAIGGEERISRLNGYLSELAAAAFVCRGGVKRVHLLDGTISGVLLLELFKRDGMGTMVASDVYEGNREAKVEDLAGIRQIIKPLEESGALVRRTDEELLRALDSFVVVEREGHIIACAALFPFFEEKCGEVAAIAVASDCRGQGQGDKLLDYIEKKASALGLEMLFLLTTRTADWFVRRGFQECPIEMIPEARRERINLSRRSKYYMKKLLPDRSGISVVRTFQYDS

SEQ ID NO: 16169 - DNA, 1398 bp, Escherichia coli CFT073
  CDS (1)..(1398): transl_table=11
ttgcaccctgcaaaaaaacagaataaaaatacaataatttcgaataatcatgcaaagaggtgtaccgtggtaaaggaacgtaaaaccgagctggtcgagggattccgccattcggttccctatatcaatacccaccggggaaaaacgtttgtcatcatgctcggcggtgaagccattgagcatgagaatttctccagtatcgttaatgatatcgggttgttgcacagcctcggcatccgtctggtggtggtctatggcgcacgtccgcagatcgacgcaaatctggctgcacatcaccacgaaccgctgtatcacaagaatatacgtgtgaccgacgccaaaacactggaactggtgaagcaggcagcgggaacattgcaactggatattactgctcgcctgtcgatgagtctcaataacacaccgctgcagggcgcgcatatcaacgtcgtcagtggtaattttattattgcccagccgctgggcgtcgatgacggcgtggattactgtcatagcgggcgtatccggcggattgatgaagacgcgatccatcgtcaactggacagcggtgcaatagtgctaatggggccggtcgctgtttcggtcactggcgagagctttaatctgacctcggaagagattgccactcaactggccatcaaactgaaagctgaaaaaatgattggtttttgctcttcccagggcgtcactaatgacgacggtgatattgtctccgaacttttccctaacgaagcgcaagcgcgggtagaagcccaggaagagaaaggcgattacaactccggtacggtgcgctttttgcgtggcgcagtgaaagcctgccgcagcggcgtgcgtcgctgtcatttaatcagttatcaggaagatggcgcgctgttgcaagagttgttctcacgcgacggtatcggtacgcagattgtgatggaaagcgccgagcagattcgtcgcgcaacaatcaacgatatcggcggtattctggagttgattcgcccgctggagcagcaaggtattctggtgcgccgttctcgcgagcagctggagatggaaatcgacaaattcaccattattcagcgcgataatacgactattgcctgcgcagcgctctatccgttcccggaagagaagattggggaaatggcctgtgtggcagttcacccggattaccgcagttcatcacggggcgaggttctgctggaacgcattgccgctcaggcgaagcagagcggcttaagcaaattgtttgtgctgaccacgcgcagtattcactggttccaggaacgtggatttaccccagtggatattgatttactgcccgagagcaaaaagcagttgtacaactaccagcgtaaatccaaagtgttgatggcggatttgggttaa

SEQ ID NO: 16170 - protein, 465 aa, Escherichia coli CFT073
MHPAKKQNKNTIISNNHAKRCTVVKERKTELVEGFRHSVPYINTHRGKTFVIMLGGEAIEHENFSSIVNDIGLLHSLGIRLVVVYGARPQIDANLAAHHHEPLYHKNIRVTDAKTLELVKQAAGTLQLDITARLSMSLNNTPLQGAHINVVSGNFIIAQPLGVDDGVDYCHSGRIRRIDEDAIHRQLDSGAIVLMGPVAVSVTGESFNLTSEEIATQLAIKLKAEKMIGFCSSQGVTNDDGDIVSELFPNEAQARVEAQEEKGDYNSGTVRFLRGAVKACRSGVRRCHLISYQEDGALLQELFSRDGIGTQIVMESAEQIRRATINDIGGILELIRPLEQQGILVRRSREQLEMEIDKFTIIQRDNTTIACAALYPFPEEKIGEMACVAVHPDYRSSSRGEVLLERIAAQAKQSGLSKLFVLTTRSIHWFQERGFTPVDIDLLPESKKQLYNYQRKSKVLMADLG

SEQ ID NO: 16171 - DNA, 1347 bp, Pseudomonas syringae pv. tomato str. DC3000
  CDS (1)..(1347): transl_table=11
gtgcgtgctttttcttttcgtccattttttctacaggctcttgttgtcatgcccgaatacgtcaactggcttcgccatgcgtctccctacatcaatgcccaccgcgattgcaccttcgtcgtcatgcttcccggcgacggcgttgcgcatcccaacttcggcaatatcgtccacgatctggtgctgctgcacagcctgggcgtgcggcttgtgctggtgcacggctcgcgtccacagattgaaagccgtctggcccagcgcggcattacaccgcgctaccatcgcgacatgcgtattaccgataccgagacgctggagtgcgtgatcgacgccgttggccagttgcgcatctcgatagaagcgcgcctgtcgatggacatggcagcctcgccgatgcagggctcgcggctgcgggtgaccagcggcaatgtggtcactgcccggcctatcggggtgctggaaggtattgattatcagcacaccggtgaggtgcgcagggtagaccgcaagggtatcaatcgcctgctggacgagcgtcatatcgtgctgctgtcgccgttgggttattcaccgaccggcgagattttcaatctggcctgcgaagacgtcgccacgcgcgctgcgattgatctggctgccgacaaactgctgttgttcggtgccgaaaccgggttgctggacgagcagggccgactggtgcgcgaactgcgcccgcaacaggtgcctgcgcatttgcagcggctgggtggcaactatcaggccgaattgctcgatgcagcggccgaggcctgccgcggtggtgtggctcgcagccatatcgtcagttatgccgaagacggcgcgctgctgaccgagctgtttacccgcgacggtggtggcacgctggtggcgcaggagcagtttgaactggttcgcgaggcggccatcgaggacgtcggcggtttgatggacctgatcaccccgctggaagagcagggcattctggtacgccgttctcgtgaggtgctggaacgcgagatcacccagttcagtgtggtcgagcgggaagggctgatcatcgcctgcgcggcgctgtacccgattgccgactcggagtctggtgagcttgcgtgtctggccgtcaacccggaataccgacacggcgggcgtggcgacgagctgctggagcgtatcgaaaaccgcgcgcgggcgctgggcatcaaaaccctgttcgtcctcaccacccgtaccgcacactggttccgcgagcgcggcttcgagcccagcagcgtcgaccgcctgccaagcgcccgtgcgtcgctgtacaacttccagcgtaattcgaagatctttgaaaaagcgatttaa

SEQ ID NO: 16172 - protein, 448 aa, Pseudomonas syringae pv. tomato str. DC3000
MRAFSFRPFFLQALVVMPEYVNWLRHASPYINAHRDCTFVVMLPGDGVAHPNFGNIVHDLVLLHSLGVRLVLVHGSRPQIESRLAQRGITPRYHRDMRITDTETLECVIDAVGQLRISIEARLSMDMAASPMQGSRLRVTSGNVVTARPIGVLEGIDYQHTGEVRRVDRKGINRLLDERHIVLLSPLGYSPTGEIFNLACEDVATRAAIDLAADKLLLFGAETGLLDEQGRLVRELRPQQVPAHLQRLGGNYQAELLDAAAEACRGGVARSHIVSYAEDGALLTELFTRDGGGTLVAQEQFELVREAAIEDVGGLMDLITPLEEQGILVRRSREVLEREITQFSVVEREGLIIACAALYPIADSESGELACLAVNPEYRHGGRGDELLERIENRARALGIKTLFVLTTRTAHWFRERGFEPSSVDRLPSARASLYNFQRNSKIFEKAI

SEQ ID NO: 16173 - DNA, 1404 bp, Bordetella pertussis Tohama I
  CDS (1)..(1404): transl_table=11
atgcaagaccgctgcccgcaccaagaccacaggagtattccgaccatcatgcccgatctggaaccagacaccgtctccgcgctcgaagcccccgaattcgcccccgcgcaattcgtccgatggttccgcgaagtggcgccctacgtgcatgcgttccgaggcaagaccttcgtggtggcgttcggcggcgagctggtgcaggccggcgccctcaatatcctggtgcaggacctctccctgttgtcggccctgggcatccacctggtgctggtgcacggctcgcgcccgcaggtcaatgaacagctgcgcctgaagggctacacccagcagttcggccggggcctggcgcccaccgacccggccgcgctggaatgcgccaaggaggcggccggcgagatccgcctggacatcgaggccgccttcagccagggcctgcccaacacgccgatgtcgcattcgcacatccgcgtcctgtcgggcaacttcgtcaccgcccggcccaccggcgtggtggacggcatcgactacaagcacaccggccaggtgcgcaagatcgatgtcgacgcgctcaagttcgccatcgagcagggctcggtggtgctgctctcgccgctgggcttctcgcccaccggcgacgccttcaacctggccatggaagacctggccaccagcgtggcggtggccctacgcgccgagaaactgatcttcctgtccggcgagcccggcgtgctcgacggcaacggcgccgtcgacaccgagctggcgcgcgtggatgccgacgccctgctggcgcgcgggaaactggacgaggacaccacctacttcctgcagcatgcctcgctggccgtcaagcgcggcgtggcgcgcgcccacctggtgccctacgcgctggacggcagcgtgctgctggagatcttcacccacgacggcgtgggcaccatggtggtcgaggacacgctggacgacctgcgcgcagccacgctcgacgacgtgggcgccatcctcagcctgatcgaaccgctggaagccgacggcaccctggtgccgcgcccgcgcagcgccatcgagcgcgacgtggaacgcttcaccgtgctcgagcacgatggcgtgatctacggctgtgccgcgctgtatccgttccccgaggaccagatggccgagatggcctgcctgatcgtgcaccccgaatggcagggctccggcgaaggcgagatcctgctgcgccacatggagtcgcgcgcccgcgccagcggcgcgcgccgcctgttcgtgctgaccacccgcacttcgcactggttcatgaaacgcggcttcgtacgcggcggcgtcgccgacctgccgcgcgacaagcagaacaattacaaccgctcgcgcaacagcctggttttcatcaagaagctgtaa

SEQ ID NO: 16174 - protein, 467 aa, Bordetella pertussis Tohama I
MQDRCPHQDHRSIPTIMPDLEPDTVSALEAPEFAPAQFVRWFREVAPYVHAFRGKTFVVAFGGELVQAGALNILVQDLSLLSALGIHLVLVHGSRPQVNEQLRLKGYTQQFGRGLAPTDPAALECAKEAAGEIRLDIEAAFSQGLPNTPMSHSHIRVLSGNFVTARPTGVVDGIDYKHTGQVRKIDVDALKFAIEQGSVVLLSPLGFSPTGDAFNLAMEDLATSVAVALRAEKLIFLSGEPGVLDGNGAVDTELARVDADALLARGKLDEDTTYFLQHASLAVKRGVARAHLVPYALDGSVLLEIFTHDGVGTMVVEDTLDDLRAATLDDVGAILSLIEPLEADGTLVPRPRSAIERDVERFTVLEHDGVIYGCAALYPFPEDQMAEMACLIVHPEWQGSGEGEILLRHMESRARASGARRLFVLTTRTSHWFMKRGFVRGGVADLPRDKQNNYNRSRNSLVFIKKL

SEQ ID NO: 16175 - DNA, 1842 bp, Arabidopsis thaliana
  CDS (1)..(1842)
atggagcgaggagctttagtgggttcttcttctacttctagctactatgttccttaccactttcgccaatcaaagtcgaatttttcgtcattcaaaccaaaaaataagctaaaccctactcaattccggtttaactgttcatggtttaagccggttagttctataacggcggcgaaatgcaatatgtttgactacgcggtgactgcagccggcgatgtggaggctgagcatccagttgacgacaaacagtttgtgcgttggttccgtgaagcatggccttatctttgggctcaccgtggctgcacattcgtcgttattatctccggcgagatcatcgccggctcttcttgtgatgccattttgaaggacatagcgtttcttcatcatctaggaataaggtttgttttagttcctggaactcaggagcaaatcgaccagcttctggctgagagaggacgcgaggctacgtatgtgggacgttacagagtaacggatgcagcatctttgcaggctgctaaagaagctgcaggagcaatatcagtgatgcttgaggccaaattatctcctggaccttctatttgcaatatccgtagacatggtgatcgtagtcgtttacatgatataggtgttagggttgataccggtaacttctttgcagcaaaaagaagaggtgttgttgatggtgttgattttggagcgactggtgaggtaaagaagatagatgtagatcggatttgtgagaggcttgacggtggttctgtagttttgttgaggaacttgggccactcgagctccggagaagtcttaaattgcaatacctatgaggttgctacagcttgtgctttagctataggagcagataagcttatttgcataatggacggcccaattcttgatgagagtggacatcttattcatttcttgacacttcaagaagcagatatgttagttcgaaaacgggcacaacaaagcgacatagctgcaaattacgtaaaagccgttggagatggaagcatggcttatcccgaacctcctaacaacaccaatggtaatattacttctgctcaaaacgggagagccgtttcattttggggaaacggaaaccacactccgatctttcagaacggtgttggatttgacaacggaaacggattgtggccttgtgagcaaggttttgctattggtggtgaagaaagattaagccgcttaaacggttatctttctgaattggctgctgcggcgttcgtctgcagaggtggagtcaaaagagttcacttgttggatggtactataagtggagttctattgttggagcttttcaaaagagatggaatgggaactatggttgctagtgatgtttacgaaggaacccgtgatgccagagtggaagatctagcaggaattagacatataatcaaacccttggaggaatcagggattttagttcgcagaactgatgaggagttactgcgagctttggattcatttgtggttgtggaaagggaaggacagatcatcgcttgtgcggctttgtttccgttcttcaaagacaaatgcggagaagttgctgcaatcgcggttgcatcagattgtcgcggtcaaggccaaggcgataaattgctcgattacatagagaagaaagcttcatctctcgggttagagaagctgttcctactcacaacgcgaacagcggattggtttgtgagacgagggttccaagaatgctcaatagagatcataccagagagtagaagacaaagaatcaatctttcaagaaattcaaagtattacatgaagaagctaatccctgatagaagtggcatttcagttatgagaatctaa

SEQ ID NO: 16176 - protein, 613 aa, Arabidopsis thaliana
MERGALVGSSSTSSYYVPYHFRQSKSNFSSFKPKNKLNPTQFRFNCSWFKPVSSITAAKCNMFDYAVTAAGDVEAEHPVDDKQFVRWFREAWPYLWAHRGCTFVVIISGEIIAGSSCDAILKDIAFLHHLGIRFVLVPGTQEQIDQLLAERGREATYVGRYRVTDAASLQAAKEAAGAISVMLEAKLSPGPSICNIRRHGDRSRLHDIGVRVDTGNFFAAKRRGVVDGVDFGATGEVKKIDVDRICERLDGGSVVLLRNLGHSSSGEVLNCNTYEVATACALAIGADKLICIMDGPILDESGHLIHFLTLQEADMLVRKRAQQSDIAANYVKAVGDGSMAYPEPPNNTNGNITSAQNGRAVSFWGNGNHTPIFQNGVGFDNGNGLWPCEQGFAIGGEERLSRLNGYLSELAAAAFVCRGGVKRVHLLDGTISGVLLLELFKRDGMGTMVASDVYEGTRDARVEDLAGIRHIIKPLEESGILVRRTDEELLRALDSFVVVEREGQIIACAALFPFFKDKCGEVAAIAVASDCRGQGQGDKLLDYIEKKASSLGLEKLFLLTTRTADWFVRRGFQECSIEIIPESRRQRINLSRNSKYYMKKLIPDRSGISVMRI

SEQ ID NO: 16177 - DNA, 1311 bp, Herminiimonas arsenicoxydans
  CDS (1)..(1311): transl_table=11
atggaaaatccagaacaattcgttcagtggctgcgctcggtcgcgccttacattcacgccttccgcggcaagacttttgtcgtcgcctttcccggtgaactggtcatcgccggcgcactgccggtgctggcgcaggatttgtcgctgttgcacgcgctcggcatcaaggtcgtgattgtctacggctcgcgtccgcaagtcgaagaacagctggcgttgcgaaatgtgcaagcccgttttcataacggtttgcgcattaccgatgtggctgcgctggaatgcgcgaaggaagccgccggcgaactgcgcctcgatatcgaagccgcattcagccagggcttgccgaacacaccgatggcgcatgcggcgatccgcatcatttccggcaatttcgtcactgcacgcccgctcggcattgtcgatggcgtcgatctggaattgaccggcgtgacacgcaagattgcttatgaagccatccaccctattctggcggccggcggcctggtgctgctgtcgcctctgggcttttcaccgacgggcgaagtcttcaatctgacgatggaggacgtggcggtatcggcggccaaggcgctgcgcgccgacaagctgattttcatcaccgaaacaccgatgatgatagacaagaccggtgctgaaatccacgaactgtcttcgcatcaggtcgatgccgtgctgaattacgattgcgtgcctgccgattcggccttttatctggaacacgcggtacaggcctgcaacggcggcgtaccgcgcgcgcacatcatcccgtttgcgaccgatggttcagccttgctggaattgtttacgcatgatggcgtgggcaccatggtttcctttgaaaatctggaaagcctgcgcgatgccacgattgaagatgtgggcggcattctgaagctgatcgaaccgctggaagccgacggcaccttggtcaagcgcgggcgcgaactgatcgagcgcgaaatcaattatttctcggtcatcgagcatgacggcgtgattttcggttgcgcagcgctctaccctttcccggctgaaaaaatggcagagatggcctgcctgatcgtcaatccggaagtgcaaacgcagggcgatggcgaacgcctgctcaagcatatggaaaaccgcgctcgcgccgccggcctgaaaaaactgtttgtgctgacgacgcgtaccgcgcactggttcctcaagcgcggcttcgtgccggccaccgtggacgatctgccgaaaaaccgtcagcaaatgtacaactggcagcgcaaatccctggttttcacaaaaaacctataa

SEQ ID NO: 16178 - protein, 436 aa, Herminiimonas arsenicoxydans
MENPEQFVQWLRSVAPYIHAFRGKTFVVAFPGELVIAGALPVLAQDLSLLHALGIKVVIVYGSRPQVEEQLALRNVQARFHNGLRITDVAALECAKEAAGELRLDIEAAFSQGLPNTPMAHAAIRIISGNFVTARPLGIVDGVDLELTGVTRKIAYEAIHPILAAGGLVLLSPLGFSPTGEVFNLTMEDVAVSAAKALRADKLIFITETPMMIDKTGAEIHELSSHQVDAVLNYDCVPADSAFYLEHAVQACNGGVPRAHIIPFATDGSALLELFTHDGVGTMVSFENLESLRDATIEDVGGILKLIEPLEADGTLVKRGRELIEREINYFSVIEHDGVIFGCAALYPFPAEKMAEMACLIVNPEVQTQGDGERLLKHMENRARAAGLKKLFVLTTRTAHWFLKRGFVPATVDDLPKNRQQMYNWQRKSLVFTKNL

SEQ ID NO: 16179 - DNA, 1356 bp, Acinetobacter sp. ADP1
  CDS (1)..(1356): transl_table=11
atgcagcgttatgaaaccacttctgttcagaacataacacaacaatatgtccactggtttcgtcactcagcaccctatattaatgctcatcgaaataaaaccctggtgttaatgtttggtggtgaagcagttcagcatccaaattttcagcatattattcatgatattgcactgttacattctctcggaatccgtctgattctggttcatggcgcacgtccacaaatcaatcaaaatctgcaagaaaagcagattgagacacccattcatttacatcgtcgagtcacaacacgtgaatctctggcttgcgttatgaatgctgtgggttccattcgacttgaaattgaagcactcctttcgatggggcttgccaattcacctatgtttggtgcgcggattgatgtcgtttcaggtaactttgtcacggccaaaccttacgggatacgtgatggtgtcgattttcagcttacgggtgaagttcgcgctattgatactgacgccattcagcggcatttagataatcataatattgtggtgttgggtcccacaggttattccaccacgggtgaagtgtttaaccttttggcagaagaagttgcaacaaaaaccgccactgcactgcatgcagataaattgatttttttaggcaagaagcaaggcttactcagtgatcaaggtaaactattacgtgaactcacccctcaacagcttgagccgtatatcaaacatttccagcaacttgatcatgagatggcactacatttacaaggcgcacaaacagcgtctttgtctggtgtacatcgcgttcatctgatttcttatgcttatgacggcgccctgattgaagagttatttactcgtgatggcattggtaccatgattaccgatgcccactatgaagacgttcgtacagcgactattcaagatgtaggaggtctgattaatctactacgccctctcgaagaagaaggcattctggtttaccgttcacgtgaacgtctggaaagtgagattagtcagtttgcggtgatcgaacgcgatggcatgattctggcctgtgccgcgctctatccaattccgacagcaaaaaatgaaattcgttctgctgaaatcgcctgtgttgccgttgatcctgcctatcgtaaatcgaatcggggtagtcaaattctgcattttttagaagagaaagcacgtcaagaagggattttgcaactctttgttctcaccacccgtactgcacactggtttctggaacacggtttccaaacagcaagtgtcgatgatctccctagtgcccgacaagagctgtataactaccaacgtaactcactcgtttttaaaaaaatactgatgtaa

SEQ ID NO: 16180 - protein, 451 aa, Acinetobacter sp. ADP1
MQRYETTSVQNITQQYVHWFRHSAPYINAHRNKTLVLMFGGEAVQHPNFQHIIHDIALLHSLGIRLILVHGARPQINQNLQEKQIETPIHLHRRVTTRESLACVMNAVGSIRLEIEALLSMGLANSPMFGARIDVVSGNFVTAKPYGIRDGVDFQLTGEVRAIDTDAIQRHLDNHNIVVLGPTGYSTTGEVFNLLAEEVATKTATALHADKLIFLGKKQGLLSDQGKLLRELTPQQLEPYIKHFQQLDHEMALHLQGAQTASLSGVHRVHLISYAYDGALIEELFTRDGIGTMITDAHYEDVRTATIQDVGGLINLLRPLEEEGILVYRSRERLESEISQFAVIERDGMILACAALYPIPTAKNEIRSAEIACVAVDPAYRKSNRGSQILHFLEEKARQEGILQLFVLTTRTAHWFLEHGFQTASVDDLPSARQELYNYQRNSLVFKKILM

SEQ ID NO: 16181 - DNA, 1326 bp, Erwinia carotovora subsp. atroseptica SCRI1043
  CDS (1)..(1326): transl_table=11
gtgaaggaacgtagtacagagctggttcagggcttccgccattcagttccctatatcaatgcccaccgtggcaaaacgtttgtcatcatgttaggtggcgaggccattgaacatgcaaacttctctagcatcgtaaatgatattgggctgttacacagtctggggatcaagctggtcgtcgtttatggtgcccgcccccagattgatgccaacctgacaacgcaccactacgagccccactatcataaaaatacccgtatcaccgacagcgccacgctggagctggtcaaacaggctgcgggtatgctgcaactggacatcaccgctcggctgtcgatgagcctgaacaacacgccgctacaaggtgcccacattaatgtcgtcagcggtaattttattatcgcgcagccgcttggcgttgatgacggtgtggactactgccacagtggccgtattcgtcgtattgatgaagaagcggttcaccgccagttgaatagcggcgcgattgtgctgctcggcccagttgctgtttcagtcaccggtgaaagtttcaatttaacctcagaagaggttgcaacccagctcgccattaagctgaaagcagagaagatgatcggcttctgctcgtcacagggtgtgaccaacgaagaaggccgcatcatctccgagctgttccctgacgatgcgcagcagcgtattgatgtactggaacaagctggcgattaccactctggtacggtcagattcctgcgcggtgcagtcaaagcctgtcgtagcggcgtgcgccgtagccacctgatcagctatcaggacgacggcgcgctattgcaggaactgttctcacgcgacggaatcggtacgcagatcgtgatggaaagcgccgagcaggttcgccgtgcgaccatcaatgacatcggcggtattctggaattgatccgtccgctggaagaacaaggcattctggttagacgctcgcgtgaacagctggaaatggagatcgacaaattcaccgtcgtggtacgtgataacctgaccatcgcctgtgccgcgctttatccgttcccggaagaaagcatcggtgaaatggcctgcgtcgcggttcacccggattaccgcagttcatcacgtggcgatatgctgttaatgcgcgttgccgctcaggcgcgccagcagggtctacaaaagctgttcgtgctgaccacacacagcatccactggtttcaggagcgcggctttttacccgccgaagtggaaatgctgccgaagaaaaaacaggcgctgtacaactaccagcgtcgctcgaagattctggtgctggacctctga

SEQ ID NO: 16182 - protein, 441 aa, Erwinia carotovora subsp. atroseptica SCRI1043
MKERSTELVQGFRHSVPYINAHRGKTFVIMLGGEAIEHANFSSIVNDIGLLHSLGIKLVVVYGARPQIDANLTTHHYEPHYHKNTRITDSATLELVKQAAGMLQLDITARLSMSLNNTPLQGAHINVVSGNFIIAQPLGVDDGVDYCHSGRIRRIDEEAVHRQLNSGAIVLLGPVAVSVTGESFNLTSEEVATQLAIKLKAEKMIGFCSSQGVTNEEGRIISELFPDDAQQRIDVLEQAGDYHSGTVRFLRGAVKACRSGVRRSHLISYQDDGALLQELFSRDGIGTQIVMESAEQVRRATINDIGGILELIRPLEEQGILVRRSREQLEMEIDKFTVVVRDNLTIACAALYPFPEESIGEMACVAVHPDYRSSSRGDMLLMRVAAQARQQGLQKLFVLTTHSIHWFQERGFLPAEVEMLPKKKQALYNYQRRSKILVLDL

SEQ ID NO: 16183 - DNA, 1320 bp, Mannheimia succiniciproducens MBEL55E
  CDS (1)..(1320): transl_table=11
atgcgcagtacagaattagttcaatggtttagacaatcaacaccttatgtcaatatgcaccgcggtaaaacctttgtcattatgcttgacggaaacactatcgccagtagtaatttcattaatatcattaatgatatcagcctgttgcatagtttaggcattaaattaattattgtttacggcgcaagagtccaaattaattccttattagcccaaaataatgtcacttccgtttatcacaaaaatattcgagtgaccgatccgagaacattagaattggtcaaacaggcggtcggtcagcttagttacgatattacggcgcgcctttccgtacgtttgccgcattcacctgttctgaatgtagtgagcagcaattttattcttgctcagcctatcggcgtggatgacggcgtcgattatatgttaagcgggaaaatccggcgtatcgaaattgataatattaaacatcatttggataataatgccattgtgttgctgggaccgattgccccgtcggtaacaggcgagacatttaatttaccgttcgaagaaattgcgactcaggttgcaataaaacttaaagcggaaaaacttatcggctttagttccactcaaggtattctcgatccgcaaggcatatctattcccgatttattaccgcaggatgcggcaaaatatctcaatcaatacattcagcaaggcgaatatcattgttcccaagcacgtttcctgcaggcggcgattgaagtttgtaaagcgggcgtcaaacgttctcatttgttaagttatgaggaagacggttccttattacaggaattattcacccgtgacggtgtgggaacccagctttccgttgataattcggaagatatccgtatcgctacggttcaagatattccgggattaatcgaattaattcatccgcttgaacagcaggggattttggtcaaacgttcccgtgaacagcttgaaatggacattgccaattacaccattatcgaccgggatggcgtgattatcgcttgcgccgccttaaaccaatatccggaagaaaatatggcggaaatggcgtgcgtggcggttcacccggattatcgaagttcttcccgcggggatattttattagaagccattcagaaacgggcaagacagttaggcattgaaaaactatttgtgctcacgacaagaaccgtacattggttccaagaacgcggtttccgtcttgccaatgtggaagatctaccgaaagaaaagcgcgatcattataactatcagcgtcgctcaaaaattttgattcagccgttgaatgaagaagaataa

SEQ ID NO: 16184 - protein, 439 aa, Mannheimia succiniciproducens MBEL55E
MRSTELVQWFRQSTPYVNMHRGKTFVIMLDGNTIASSNFINIINDISLLHSLGIKLIIVYGARVQINSLLAQNNVTSVYHKNIRVTDPRTLELVKQAVGQLSYDITARLSVRLPHSPVLNVVSSNFILAQPIGVDDGVDYMLSGKIRRIEIDNIKHHLDNNAIVLLGPIAPSVTGETFNLPFEEIATQVAIKLKAEKLIGFSSTQGILDPQGISIPDLLPQDAAKYLNQYIQQGEYHCSQARFLQAAIEVCKAGVKRSHLLSYEEDGSLLQELFTRDGVGTQLSVDNSEDIRIATVQDIPGLIELIHPLEQQGILVKRSREQLEMDIANYTIIDRDGVIIACAALNQYPEENMAEMACVAVHPDYRSSSRGDILLEAIQKRARQLGIEKLFVLTTRTVHWFQERGFRLANVEDLPKEKRDHYNYQRRSKILIQPLNEEE

SEQ ID NO: 16185 - DNA, 1347 bp, Methylococcus capsulatus str. Bath
  CDS (1)..(1347): transl_table=11
atgaatccagacacagccccccagaccttcgtacgctggctccgtagtgccgctccctacatccatgcgcaccggaaccgcaccttcgtcgtcagtttcggcggcgaagccctgaccgatgggcgcttcgcggagctggtccacgacttcgccttgctccacagcttgggggtcgggctggtgctggtgcacggtacccgtcctcaagtcgagcggcgcctgcgcagccgcggtgcggaactgcgctaccaccagggtctgcggatcaccgatgcgaccgggctggaatgcgtgcaggaggccgccggcgccgtccgtgtcgagatcgaggccctgctgtcgatgggcgccgccaattcacccatggccggggcacggatccgggtggcctcgggcaatttcgtggtcgccaagcctttgggcgtacgcgacggcgtggatttcggctacaccggcgaggtgcgccgggtggacgccggggcgatgcgccggctgctggacgaaggcagcgtggttctggtgtctccgctcggctattcccccaccggggaaatcttcaacctcagcgccgaggaggtggcgactgccgtggccggagccctcggggccgacaagcttctgttgctgatggaacagccctgcgccggtcccgacggccggatgatccaccagatcacggtgcaggaagccgagcgtctgctggaacgcggcggttcgctggaaccgggcgtggccgcccacctggccgccgccctcaaggcctgccgctccggcgtggcccgcgcccatctgctggaccgccacatcgacggcgccctgctgctggagctgttcacccgcgacggcgtcggcaccctcgtcagcgccaatccgttcgaggaattgcgcccggcccgcatcaacgacgtggtcggcatcctggatctgatccggccgctcgaacagaccggcgccttggtgaaccgctcccgtgaacgcctggagactgaaatcgaggactacgtcgtcatcgagcgcgacggactgatcgtaggctgcgccgccctgcatccatttccggccgaatccgtgggcgagttcgcctgcctcgccctgcaccccgaataccggggcgaaagccggggcgaaaggctgctggaattcatcgagcagcgggcccgcaagctcggcctggcgcggctcttcgcactgaccacccaggccatgcagtggttccgcgaacgcggtttcgagcctgcctcactcacggacctgcctgcgcagcggcgtgccagctacagccccgagcgcaactcccaggtgctgatcaagacgatcaggccgtgtgaagttccccgaaaaagctga

SEQ ID NO: 16186 - protein, 448 aa, Methylococcus capsulatus str. Bath
MNPDTAPQTFVRWLRSAAPYIHAHRNRTFVVSFGGEALTDGRFAELVHDFALLHSLGVGLVLVHGTRPQVERRLRSRGAELRYHQGLRITDATGLECVQEAAGAVRVEIEALLSMGAANSPMAGARIRVASGNFVVAKPLGVRDGVDFGYTGEVRRVDAGAMRRLLDEGSVVLVSPLGYSPTGEIFNLSAEEVATAVAGALGADKLLLLMEQPCAGPDGRMIHQITVQEAERLLERGGSLEPGVAAHLAAALKACRSGVARAHLLDRHIDGALLLELFTRDGVGTLVSANPFEELRPARINDVVGILDLIRPLEQTGALVNRSRERLETEIEDYVVIERDGLIVGCAALHPFPAESVGEFACLALHPEYRGESRGERLLEFIEQRARKLGLARLFALTTQAMQWFRERGFEPASLTDLPAQRRASYSPERNSQVLIKTIRPCEVPRKS

SEQ ID NO: 16187 - DNA, 1407 bp, Azoarcus sp. EbN1
  CDS (1)..(1407): transl_table=11
gtgcctcgttttggcggcgcgtacagctcaaagactcctgacggtgatcgcttgaacgggcaacccactccttcccgtgccgcaaccgaagtccctgcgaccaccgaccagttcgtcgcctgggtgcgtggggcggccccctacatccacgcctttcgcggccggacgttcgtgatcggtttcggcggcgaggtcgcggccggcgtccgcgcgcaaagtcttgcatacgactgcaacctgctggcggcgctcgggattcgcctcgtcctcgtgcatggcgcgcgtccccagatcgatgccgaactggcgcgccgcggtctcgagccgcgctaccacaacggtctgcgggtgaccgacgccgacgcgcttgaatgcgtcaaggcggcgatggcggtgacccgtatcgaagtcgaagcgctgctgtcccaagggctgccgaacacgccgatggcgggcagctacatgcgcatcactggcggcaacttcatcacggcgcgtccggtcggcgtcgtcgagggcgttgattacctgtatacgggggcggtgcgcaagatcatcgccgaggaaatcaacgccgacctcgatcagcagaacgtcgtgctgatcactccgctgggcgtgtcgccggcgggagagattttcaatctggcgatggaggaagttgcggaagcggtcgcgatagcggtccacgccgaaaagctcatctacctgtgcgacgcgccgggactgctggatgcggaccagcatctgatcgattccgttaccgcggacgaagccgagcgcatgttcaacgccggcgaagggttgaccgaggatctcgatctctacctgccctgtgcgatccgcgccgtgcgccgcggcgtcgcgcgcgtccatctgatcgaccatgacaaggacggcggcctgctgctggagtttttcacgcacgccggtgtcggcaccatcgtgtcgcgcgacccgctgttccgcttgcgcgaagccaccgtcgaggacgtcgccgcgctggtcgccctgatctcgccgatggaaacggacggcacgctggtgcggcggggccgcgagctgctggaacaggaaatcgaccgcttcactgtcgtcgaacacgacggagtgctcgtggggtgcgccgcgctgtacccgttcagcgacgaacgtgccgccgaactcgcctgccttgcagtgactcccgagtaccggcgggcggggctgggcgaccagctgctgcgaaggatcgagcagcgcgcgcgcgcgcagcgcctcgagcggctgttcgtgctgaccacgcgcaccgcgcactggttccgcgagcgcggcttcagcgagatcgggccggacgccctgccgcggcagaagcgtgaactgtacaactaccagcgccgctccaaggtgttcacgaagccgctatga

SEQ ID NO: 16188 - protein, 468 aa, Azoarcus sp. EbN1
MPRFGGAYSSKTPDGDRLNGQPTPSRAATEVPATTDQFVAWVRGAAPYIHAFRGRTFVIGFGGEVAAGVRAQSLAYDCNLLAALGIRLVLVHGARPQIDAELARRGLEPRYHNGLRVTDADALECVKAAMAVTRIEVEALLSQGLPNTPMAGSYMRITGGNFITARPVGVVEGVDYLYTGAVRKIIAEEINADLDQQNVVLITPLGVSPAGEIFNLAMEEVAEAVAIAVHAEKLIYLCDAPGLLDADQHLIDSVTADEAERMFNAGEGLTEDLDLYLPCAIRAVRRGVARVHLIDHDKDGGLLLEFFTHAGVGTIVSRDPLFRLREATVEDVAALVALISPMETDGTLVRRGRELLEQEIDRFTVVEHDGVLVGCAALYPFSDERAAELACLAVTPEYRRAGLGDQLLRRIEQRARAQRLERLFVLTTRTAHWFRERGFSEIGPDALPRQKRELYNYQRRSKVFTKPL

SEQ ID NO: 16189 - DNA, 1299 bp, Pseudomonas fluorescens Pf-5
  CDS (1)..(1299): transl_table=11
atgcccgaatacgtcaattggcttcgccacgcgtctccctatatcaatgcccaccgcgactgcaccttcgtggtcatgctgcccggcgacggcgttgaacaccccaacttcggcaatatcgtccacgacctggtgctgctccacagcctgggggtgcgcctggtgctggtgcacggctcgcgcccacagatcgaagcccgcctggcggcccgtggcctgacaccccattaccatcacggccttaggatcaccgacgcggcaaccctggagtgcgtgatcgatgccgtgggccagttgcgcatcgctatcgaggcgcgcctgtccatggacatggcctcttcaccgatgcagggctcgcggttgcgggtggccagcggcaacctggtgactgcccgtccgatcggcgtgctggagggcgtcgactatcaccacaccggcgaagtgcgccgggtcgatcgcaagggcatcaatcgcctgctggacgagcgctcgatcgtcctcctctcgcccctgggttattcccccaccggggaaaccttcaacctggcctgcgaagacgtggccactcgcgccgccatcgaccttggggccgacaaactactgctgttcggcgccgacccaggcctgctggatgaaaacggcaagctggtgcgcgaattgcgcccgcaacaggtgccggcgcatttgcagcgcctggggggcaactatcaggccgagctgctggatgccgccgccgaggcgtgccgcggcggagtcggacgcagccatatcgtcagctacgccgaggacggcgccttgctaaccgaactcttcacccgcgacggcggcggcaccctggtggcccaggaacagttcgagcgggtgcgcgaggcggcgatcgaggacgtgggcggcttgctggagctgatcagcccgctggaagagcagggcatcctcgtgcggcgttcccgcgaggtgctggagcgcgagatcgagcagttcagtgtggtggagcgcgagggcatgatcatcgcctgcgcggccctgtaccagattgccgattccgatgccggtgagctggcgtgcctggcggtgaaccccgagtaccgccatggcaagcgtggtgacgagttgctggaaaggatcgagacccgcgctcgggcccagggcttgaagacgctgttcgtcctcaccactcgtaccgctcactggttccgcgagcggggtttcgtgcccagcagtgtcgagcgcctgccatcggcccgggcctcgctgtacaactaccagcgcaattcgaagatcttcgaaaaagccctctga

SEQ ID NO: 16190 - protein, 432 aa, Pseudomonas fluorescens Pf-5
MPEYVNWLRHASPYINAHRDCTFVVMLPGDGVEHPNFGNIVHDLVLLHSLGVRLVLVHGSRPQIEARLAARGLTPHYHHGLRITDAATLECVIDAVGQLRIAIEARLSMDMASSPMQGSRLRVASGNLVTARPIGVLEGVDYHHTGEVRRVDRKGINRLLDERSIVLLSPLGYSPTGETFNLACEDVATRAAIDLGADKLLLFGADPGLLDENGKLVRELRPQQVPAHLQRLGGNYQAELLDAAAEACRGGVGRSHIVSYAEDGALLTELFTRDGGGTLVAQEQFERVREAAIEDVGGLLELISPLEEQGILVRRSREVLEREIEQFSVVEREGMIIACAALYQIADSDAGELACLAVNPEYRHGKRGDELLERIETRARAQGLKTLFVLTTRTAHWFRERGFVPSSVERLPSARASLYNYQRNSKIFEKAL

SEQ ID NO: 16191 - DNA, 1323 bp, Psychrobacter arcticus 273-4
  CDS (1)..(1323): transl_table=11
atgactactagcgccatgccccagattaaccctgaatacgtccattggttccgtaattctgccccctatatcaatacgcatcgcggcaaaacgttcgtgattatgtttggtggtgaggcggtcaatcatccaaattttagtacactgattcatgactttgctttattgcatagcttgggtatcaagctggtattggtgcatggggcgcgaccacaaatcgaaaaaaacctcaaagatgctgatattgaatcgccactgcatcaagacattcgtgtgacacctcgtgtcgcgatgccttctatattacaagcggttggtgctattcgcttgcagattgaagcacagctatcgatggggcttgcaaactcacctatgtatggctcacgtattgatgcagtttcgggtaattttgtgactgcgcgtccttatggtatccgtgatggcgttgattaccagatgacaggcgaagtacgctctatcgacgttgaagcgattaaaaataacttactacacgatcatattgtgattctaggctctatgggctattcggcaaccggtgaagttttcaacttgctcgctgaagatgtcgcccttagtgcagccgtagcgcttggtgcagataagcttattttcttgggcgaagaagtgggtattaatcacaatgatcgtttattacgtgagatgattccaaatgaggtcgatcgcttcttacgtgaccgtgatctcaattgtgagattaattactttttaagctgtgccagtaatgcttgtcgccaaggcgttcatcgcactcatattatctcttatgctaaaaacggtgcgctacttgaagagctattcacccgtgatggttctggtaccttgattagccatgatccttatgaagagattcgccgcgctgatatcgatgacgtggtggggctgataaagctattatcgccactagaagagcaaggtatattggttagccgctcacgggagcgcttggtgcaagagattgataactatagcgtcattgagcgtgatggcatgattttaggttgtgctgcgctttatccactcgatgcaaattcagcagaggttgcctgcgtcgcggtacatccagaatatcgcagcggtagccgcggcgctgatttactggcatttttggagcaacaagcacgcagccatggtttacataagttatttgtattgaccactcgtacggcgcactggttcgttgagcaagggtttgctgaagttgaggcaagcgccttacctgaagcacgccgcgagaagtataataacggtcgtaactctaaagttttccaaaagaacctttaa

SEQ ID NO: 16192 - protein, 440 aa, Psychrobacter arcticus 273-4
MTTSAMPQINPEYVHWFRNSAPYINTHRGKTFVIMFGGEAVNHPNFSTLIHDFALLHSLGIKLVLVHGARPQIEKNLKDADIESPLHQDIRVTPRVAMPSILQAVGAIRLQIEAQLSMGLANSPMYGSRIDAVSGNFVTARPYGIRDGVDYQMTGEVRSIDVEAIKNNLLHDHIVILGSMGYSATGEVFNLLAEDVALSAAVALGADKLIFLGEEVGINHNDRLLREMIPNEVDRFLRDRDLNCEINYFLSCASNACRQGVHRTHIISYAKNGALLEELFTRDGSGTLISHDPYEEIRRADIDDVVGLIKLLSPLEEQGILVSRSRERLVQEIDNYSVIERDGMILGCAALYPLDANSAEVACVAVHPEYRSGSRGADLLAFLEQQARSHGLHKLFVLTTRTAHWFVEQGFAEVEASALPEARREKYNNGRNSKVFQKNL

SEQ ID NO: 16193 - DNA, 1311 bp, Colwellia psychrerythraea 34H
  CDS (1)..(1311): transl_table=11
atgaataatagcgagcaaaattacgttaaatggtttagaaatgcagcgccctatattaatgcccatcgtggaaaaacggtggtacttatgtttggtggtgaagcagttacgcatccaaattttgctaatattattcatgatatttcattgttacgtagtttaggtgtgaagttagtggtagtgcatggcgcaaggccacaaattgtagatcgcatgcagcaacgaggtcttgaggaaaatgttgtaagcaatattcgagtcactgatgcacaaacattagtggctgtgaaggatgctaccggctccttacgtcttcatatcgaagcattgctttctacgggggtggttaattcacctatgcacggctcgcaaattcgagttagtacaggtaattttgtcattgcaaaacctatgggtgttcgcaatggcattgattataagtacacaggtactgtgagaagaatagactcagatggcattaacatgcagctggactacggctcaattgttttactttctcccattggttattcaccaacaggtgaagtgtttaacttggctttagaggatgtggctacacaaacagctatctcactgaaagcagataagcttattgcattcactgaagacgaaggacttattgataagtctggaaagttaattcgtagctgtagtgttcgcacggtaaaaaccttgcttgatgaaaaagactgccatgtgcgtcagctattactccgctcaatcattcaaagtggtgaaaacggggtagagcgttgtcattgtgttagttatcaaagtgatactgcattgttgcaagaactatttacccgtgatggtgcgggtactttgattgccaaagatcataaggaattgattgctactgcaactattgatgatgttgctggaattctagaattgattcagccgctcgaggaggagggggttttagtgaagcgctctcgtgagttactggagatggaaatagaatatttcactgtgcttaaaaaagaagaagtcattatcgcttgtgctgctttatatccttatcctgaagcaaaaatggctgaggttgcctgtgttgttattgaccctgattaccggaaaggcaatcgaggtgaaagaattatcaatgcattagagttgagtgcaaaaaagaaaggtttaacgtcactatttttattgactaccgtcagcggacattggtttctagaacaaggttttgttgaggcatcacttgaaaggttacctgaagggaagaaacagatgtataactttcaacgtaactcaaaagtctttatcaaagatatataa

SEQ ID NO: 16194 - protein, 436 aa, Colwellia psychrerythraea 34H
MNNSEQNYVKWFRNAAPYINAHRGKTVVLMFGGEAVTHPNFANIIHDISLLRSLGVKLVVVHGARPQIVDRMQQRGLEENVVSNIRVTDAQTLVAVKDATGSLRLHIEALLSTGVVNSPMHGSQIRVSTGNFVIAKPMGVRNGIDYKYTGTVRRIDSDGINMQLDYGSIVLLSPIGYSPTGEVFNLALEDVATQTAISLKADKLIAFTEDEGLIDKSGKLIRSCSVRTVKTLLDEKDCHVRQLLLRSIIQSGENGVERCHCVSYQSDTALLQELFTRDGAGTLIAKDHKELIATATIDDVAGILELIQPLEEEGVLVKRSRELLEMEIEYFTVLKKEEVIIACAALYPYPEAKMAEVACVVIDPDYRKGNRGERIINALELSAKKKGLTSLFLLTTVSGHWFLEQGFVEASLERLPEGKKQMYNFQRNSKVFIKDI

SEQ ID NO: 16195 - DNA, 1347 bp, Pseudomonas syringae pv. phaseolicola 1448A
  CDS (1)..(1347): transl_table=11
gtgcgtgctttttctcttcgtccattttctctacaggctcttgttgtcatgcccgaatacgtcaactggcttcgccacgcgtctccgtacatcaatgctcaccgtgattgcaccttcgtcgtcatgctgcccggcgacggcgttgcgcaccctaacttcggcaatatcgtccacgacctggtgctgctgcacagcctgggcgtgcgtctggtgctggtgcacggctcgcgtccacagatcgaaagccgcctggcccagtgcggcattacgccgcgttaccatcgcgacatgcgcatcaccgataccgagacgctggagtgcgtgatcgatgctgtgggtcaactacgcatttcgatcgaggcgcgcctgtcgatggacatggctgcttcaccgatgcagggctcgcggctgcgggtgaccagtggcaacgtggtaactgcacggcctatcggcgtgctggaaggggtcgattatcagcacaccggcgaagtgcgtcgggttgaccgcaagggcatcaatcgcctgctggatgagcgtcatattgtgctgctgtcgccgctgggctattcaccgaccggcgagattttcaatctggcctgtgaagacgtcgccacgcgtgccgccatcgatctggctgccgacaaactgctgctgttcggtgccgaaaccgggttgctggacgagcagggccgactggtgcgcgagctgcgtccgcaacaggtgcctgcgcacttgcagcgtctgggcaccaactatcaggctgaattgctcgatgcagcggccgaggcctgccgcggtggcgtggcgcgcagccatattgtcagctatgccgagaatggcgcactgctgaccgagctgtttacccgcgacggtggcggtacgctggttgcgcaggagcagttcgaactggtgcgcgaagcggtcattgaggacgtcggcggcttgatggacctgatcacgccgctggaagagcagggcattctggtacgtcgttcccgcgaagtgctggagcgcgagatcactcagttcagcgtggtcgagcgggaagggctgatcattgcctgcgcggcgctgtacccgattgcggactcggagtcaggcgaattggcatgtctggccgtcaatccggaatatcgccacggtgggcgcggggacgagttgctggaacgcattgaaaaccgcgccagagcgctgggtatcaagaccctgttcgtcctcaccacccgtaccgcgcactggttccgtgagcgtggcttcgagcccagcagcgtcgaccgcctgccaagcgcccgcgcgtcgctgtacaactaccagcgtaattcgaagatcttcgaaaaggcgatttaa

SEQ ID NO: 16196 - protein, 448 aa, Pseudomonas syringae pv. phaseolicola 1448A
MRAFSLRPFSLQALVVMPEYVNWLRHASPYINAHRDCTFVVMLPGDGVAHPNFGNIVHDLVLLHSLGVRLVLVHGSRPQIESRLAQCGITPRYHRDMRITDTETLECVIDAVGQLRISIEARLSMDMAASPMQGSRLRVTSGNVVTARPIGVLEGVDYQHTGEVRRVDRKGINRLLDERHIVLLSPLGYSPTGEIFNLACEDVATRAAIDLAADKLLLFGAETGLLDEQGRLVRELRPQQVPAHLQRLGTNYQAELLDAAAEACRGGVARSHIVSYAENGALLTELFTRDGGGTLVAQEQFELVREAVIEDVGGLMDLITPLEEQGILVRRSREVLEREITQFSVVEREGLIIACAALYPIADSESGELACLAVNPEYRHGGRGDELLERIENRARALGIKTLFVLTTRTAHWFRERGFEPSSVDRLPSARASLYNYQRNSKIFEKAI

SEQ ID NO: 16197 - DNA, 1320 bp, Dechloromonas aromatica RCB
  CDS (1)..(1320): transl_table=11
atgagcgataccccttacgacgagcatttcgtttcctggtttcgggcggtgacgccctatatcaatgcctttcgcggcaagaccttcgtcatcgccttcggtggcaaggcggtggccagcgagtttgccaagacgctggcctatgacgtcaacctgctggtcagcctgggcatccgcctggtcctggtccatggtgcccggccgcagatcgaggaagagcttgccgagaaaaacctcgagtcgaagtaccaccgcggctaccgggtgaccgatgcggcggcgctcgactgcgtgctcgatgcggtcggcagcgtctatctcgaaatcgaggccatgctgtcgcagggcttgcccaatacaccgatggccaacagccgcattcgcgtgatcggtggcaacttcatcaccggccagccgatcggcgtgcttgacggtatcgacatgcattacgccggcaaggtgcgcaaggtggacgccgagggtatcaatgcccagcttggactcggcaacatcgtgctgctcaactgcgaagggccgtcgccgaccggcgagatcttcaacctgcagatggaagaagcggccgaggccgtggccgcggcaatcaaggccgacaagctggtctatctgacggacagcaaaggggtcaccgacaaggcgggcgaattgctcgacgcgatgacggccgatgaagcatcacagttgctgcaggatgccgactggctgacgaccgatatcaaacgctatctgccttgtgccgtacgggccagtcgggtcggcgtcggccgggtgcatctgatcggcttcgagcaggatggcgccttgctgcgcgaattgtttacccacgatggcgtcggcacggtggtcacgcgcgaatcgctggagaatatccgcgaagccaagccggacgacattgccgcgctgatcgcactgatcgaaccgatggagcaggaaggcattctcgtccatcggccgcgcgaactgctcgagcgcgaaatcgaccgcttctcgatcatgttgcacgacggcatcatcgtcggctgcgcggcgctctatcagcattcggaagaggaagccgaactggcctgcctggcggtcaatcccgatcatcgcgaatggggttatggcgagcagttgatgaagcgcatcgaaaagcgggcgcgtaaatccggcatcaagcgactgttcgttctgacgacccgcaccgagcactggttcgtcgagcgtggcttcaagctgggcacggtcgatgatctgccggcaggcaagcgcgacatgtacaactatcaacggcgctccaaggtgctgttcaagcccttataa

SEQ ID NO: 16198 - protein, 439 aa, Dechloromonas aromatica RCB
MSDTPYDEHFVSWFRAVTPYINAFRGKTFVIAFGGKAVASEFAKTLAYDVNLLVSLGIRLVLVHGARPQIEEELAEKNLESKYHRGYRVTDAAALDCVLDAVGSVYLEIEAMLSQGLPNTPMANSRIRVIGGNFITGQPIGVLDGIDMHYAGKVRKVDAEGINAQLGLGNIVLLNCEGPSPTGEIFNLQMEEAAEAVAAAIKADKLVYLTDSKGVTDKAGELLDAMTADEASQLLQDADWLTTDIKRYLPCAVRASRVGVGRVHLIGFEQDGALLRELFTHDGVGTVVTRESLENIREAKPDDIAALIALIEPMEQEGILVHRPRELLEREIDRFSIMLHDGIIVGCAALYQHSEEEAELACLAVNPDHREWGYGEQLMKRIEKRARKSGIKRLFVLTTRTEHWFVERGFKLGTVDDLPAGKRDMYNYQRRSKVLFKPL

SEQ ID NO: 16199 - DNA, 1329 bp, Thiobacillus denitrificans ATCC 25259
  CDS (1)..(1329): transl_table=11
ttgaaagacacgacgaatttcgttcactggtttcgctccgccgcgccctatatccacggcttccgcggcaagaccttcgtcatcgccttcggcggcgaactggtcgcggagggaggcttcgtccagttggcccacgacgtcaacctgctcaacagcctcggcgtgcgcctcgtgctcgtccacggcgtgcggccgcaggtcgaggcgcggctgaccgaaaacggcaccgacatccgctacgtgagcggcctgcgcgtgaccgacgacgccgcgctggcctgcgtcaaggaagcggcgggcacggtacgcgtcgagatcgaggcgctgttgtcgctcggcatcgccaataccccgatggcgggcgccgacatccgcgtcgcctcgggcaacttcgtcactgcgcagccgctcggcgtgcgcgacggcgtcgacctgctgcataccggcgaagtccgcaagatcgacgcggccgcgatccggcggcgcctcgaccagcacgacatcgtgctgctgtcgccgatcggctattcaccgaccggcgagatattcaacctgagcctcgaagacgtcgccacccaggcggcggtcgaactcgctgccgacaagctgatcttcctgatgaacaccgagggcgttccgggcaagggccgcacgatccacaacgcgctgaccgtcaacgaagcccgccaggtgctcgacaaggccggccgtgcaaaagcgcgcgcgctgcccgaggacgtcacctactacctgccgtgcgcggttaccgcctgcacccagggcgtgaagcgcgcgcacctcatcagccgccaccgcgacggcgcactgctctcggagctcttcacgcgcgacggcgtcggcacgctgatcacgcccgcgccgctcgaaacgctgcgtccggcgaccatcgacgacgtcggcggcatcctcggcatcatcgagccgctcgagcgcgacggcatcctcgtgcgacgctcgcgcgaactgctcgaaatcgagatcgagcgctttctggtgctcgagtccgacggcgtcatcgccggctgcgcggcgctctatccgtttcccgaagagcaggcggccgagctcgcgtgtctggcggtcgcggccgacttccgaggccgcggattcggcgagatgctgctcgaggccgccgagaagaccggcaagaaatccggcttcaggaagctcttcgtgctgacgacccgcaccgagcactggttcgaggaacgcggcttcgtcgacagcagtcccgaccacctgcccaagcgtaaacaggcgctttacaactacaaccgcagatcgaaggtcctgcagaaaaaactctag

SEQ ID NO: 16200 - protein, 442 aa, Thiobacillus denitrificans ATCC 25259
MKDTTNFVHWFRSAAPYIHGFRGKTFVIAFGGELVAEGGFVQLAHDVNLLNSLGVRLVLVHGVRPQVEARLTENGTDIRYVSGLRVTDDAALACVKEAAGTVRVEIEALLSLGIANTPMAGADIRVASGNFVTAQPLGVRDGVDLLHTGEVRKIDAAAIRRRLDQHDIVLLSPIGYSPTGEIFNLSLEDVATQAAVELAADKLIFLMNTEGVPGKGRTIHNALTVNEARQVLDKAGRAKARALPEDVTYYLPCAVTACTQGVKRAHLISRHRDGALLSELFTRDGVGTLITPAPLETLRPATIDDVGGILGIIEPLERDGILVRRSRELLEIEIERFLVLESDGVIAGCAALYPFPEEQAAELACLAVAADFRGRGFGEMLLEAAEKTGKKSGFRKLFVLTTRTEHWFEERGFVDSSPDHLPKRKQALYNYNRRSKVLQKKL

SEQ ID NO: 16201 - DNA, 1299 bp, Pseudomonas fluorescens PfO-1
  CDS (1)..(1299): transl_table=11
atgcccgaatacgtcaattggcttcgccacgcgtctccttatatcaatgctcaccgcgattgcaccttcgtcgtcatgcttccgggcgacggcgtcgagcatccgaatttcggcaacatcgtccatgacatcgtattgctgcacagcctcggcgtgcggctggtgctggttcacggttcccgtcctcagatcgaaactcgccttgccgcccgtggcctgaccccgcattaccaccacggcatgcgcatcaccgatgccgcgacgctggagtgcgtgatcgatgcggtcggccagttgcgcatcgccatcgaagcgcgattgtcgatggacatggcctcgtcgccgatgcagggctcgcgtctgcgggtggccagcggcaacctcgtgacggcccggccgatcggcgtgctggaaggtgtcgactatcaccacaccggcgaagtgcgccgggtcgaccgcaaaggcatcaaccgtctgctcgacgagcgctccatcgtgctgctgtcgccgctgggttattcgccgaccggcgagatcttcaacctggcctgcgaagacgtcgccacccgtgccgccatcgatctgggcgccgacaagctgctgctgttcggcgccgacctcggtctgatcgacgaaaacggcaaactggtgcgcgaactgcgtccgcaacaggtgccggcacatctgcagcgtctgggcagcaactatcaggcggaactgctggatgccgccgccgaagcctgtcgtggcggcgtggcacgcagccatatcgtcagttatgccgaggatggtgcgctgctgaccgaactgttcacccgtgacggtggcggtacgctggtggcccaggagcaattcgaactggtgcgcgaggcggcgattgaagacgtcggtggcttgcttgacctgatcagtccgctggaagagcaggggattctggtgcgtcgctcgcgcgaagtgctggagcgtgagatcgagcagttcagtgtggtcgagcgtgaagggatgatcatcgcctgtgcggcgctgtatcagattgccgattcggatgccggtgaactggcgtgcctggcggtgaatcccgagtatcgccatggcggtcgcggcgacgaattgctcgagcgcatcgagacccgtgcccgggcgcagggcctgaagactttgttcgtcctcaccacccgcactgcccactggttccgcgagcgcggtttcgagccgagcagcgttgaacgcctgccggcggcgcgggcttctctctataactatcagcgcaattcaaagatcttcgaaaagtctctgtga

SEQ ID NO: 16202 - protein, 432 aa, Pseudomonas fluorescens PfO-1
MPEYVNWLRHASPYINAHRDCTFVVMLPGDGVEHPNFGNIVHDIVLLHSLGVRLVLVHGSRPQIETRLAARGLTPHYHHGMRITDAATLECVIDAVGQLRIAIEARLSMDMASSPMQGSRLRVASGNLVTARPIGVLEGVDYHHTGEVRRVDRKGINRLLDERSIVLLSPLGYSPTGEIFNLACEDVATRAAIDLGADKLLLFGADLGLIDENGKLVRELRPQQVPAHLQRLGSNYQAELLDAAAEACRGGVARSHIVSYAEDGALLTELFTRDGGGTLVAQEQFELVREAAIEDVGGLLDLISPLEEQGILVRRSREVLEREIEQFSVVEREGMIIACAALYQIADSDAGELACLAVNPEYRHGGRGDELLERIETRARAQGLKTLFVLTTRTAHWFRERGFEPSSVERLPAARASLYNYQRNSKIFEKSL

SEQ ID NO: 16203 - DNA, 1380 bp, Burkholderia sp. 383
  CDS (1)..(1380): transl_table=11
atgaattcccaaaccgacctcccccccgcccagaccggcgccacgacgccgccggctgccgacgactcggccgccagtcacgcgcagttcgtcgactggatgcgctccgtcgcgccctatatccacaagttccgcaacagcacgttcgtcgtggggtttggcggcgaggtggtgcagcaggggctgctgaatgcgctcgtgtccgacatcgcgctgctgcaggcgatgggtatccagatcgtgctggtgcacggctcgcgcccgcaggtcgaggagcagctgagcctgcatggtgtcgaatccgagttttcgcacgggctgcgcatcaccgatgcgcgcgcgctcgaatccgcgaaggaagcggccggtgaagtgcgtctcgacatcgaggccgcgatcagccagggtctgccgaactcgccgatggcgcacgcgcacatcagcgtcgtgtcgggcaacttcgtgaccgcgcggccggtggggattctcgacggggtcgatttcgcgcatacgggcatcgtgcgcaagatcgacgccgaatcgatccgtcattcgctctcgagccgcaagctcgtgctgctgtcgccgctcgggttctcgccgaccggcgaagcgttcaacctgtcgatggaagacgtggcgtcggccgccgcgatcgcgctgcgcgccgacaagatcgtgttcctgaccgaaggccccggcatcgtcgacgacgaaggcgagctgatccgcgaaatgtcgctcgacgcggcggccgagctgctcgattccggcaacgtccagggcgacgacgcgttcttcctgaagcattcgatccgcgcgtgccgcggcggcgtgacccgggcgcacctgatcccgcaatcgctcgacggcagcatgctgctcgaactgttcctgcacgacggcgtcggcacgatgatctcgtacgagaacctcgagagcctgcgcgaagcgacgccggacgacgtcggcggcatcctgtcgctgatcgagccgctcgagtcggacggcacgctggtgcgacgcggccgccaccagatcgaacgcgacatcgaccacttctcggtgatcgagcacgatggcgtgctgttcggctgcgcggcgctgtatccgtaccagcaggaaaagatcggcgagatggcgtgcctgacggtcgcgccggaagcgcagggctcgggcgacggcgaacgcctgctcaagcggatcgagcagcgcgcccgcgcgcgcggcctcacgcatatcttcgtgctcacgacgcgcaccgagcactggttcctcaagcgcggcttcgtcaaggtcagcgtcgacgacctgccggaagaccgccgcaaactctataactggcagcgcaagtcgctcgtgctgatgaaacagctctga

SEQ ID NO: 16204 - protein, 459 aa, Burkholderia sp. 383
MNSQTDLPPAQTGATTPPAADDSAASHAQFVDWMRSVAPYIHKFRNSTFVVGFGGEVVQQGLLNALVSDIALLQAMGIQIVLVHGSRPQVEEQLSLHGVESEFSHGLRITDARALESAKEAAGEVRLDIEAAISQGLPNSPMAHAHISVVSGNFVTARPVGILDGVDFAHTGIVRKIDAESIRHSLSSRKLVLLSPLGFSPTGEAFNLSMEDVASAAAIALRADKIVFLTEGPGIVDDEGELIREMSLDAAAELLDSGNVQGDDAFFLKHSIRACRGGVTRAHLIPQSLDGSMLLELFLHDGVGTMISYENLESLREATPDDVGGILSLIEPLESDGTLVRRGRHQIERDIDHFSVIEHDGVLFGCAALYPYQQEKIGEMACLTVAPEAQGSGDGERLLKRIEQRARARGLTHIFVLTTRTEHWFLKRGFVKVSVDDLPEDRRKLYNWQRKSLVLMKQL

SEQ ID NO: 16205 - DNA, 1320 bp, Saccharophagus degradans 2-40
  CDS (1)..(1320): transl_table=11
gtgagcgaacacaccgaccaatacgtcaattggtttagagcttcatcgccctacatcaatgcccatcgcggcaaaacttttgtcattatgttgcccggcgattgtatcgatcagcccaacttccccaacatcattagcgatatagccctgctaaacagcctcggcgttaagcttgtggttgtgcacggcgcacgcacgcaaattgaagcgcagcttaatgcatcgggcgtgcaatctaaatttcatcgcggtgtgcgcattaccgagcgcgaacacttggccgacgtacttaaagcagttggccaaacacgctttaccttggaagcaaatttatcttcaggcctgccaaactcccccatgcacggctctaaaattcgcattcgaggcggcaactttattaccgctatgccgcaaggtgtaatagatggcatagaccaccaccttaccggcaaggtgcgcagcgtagataccaaaggcgtgcgcgaacagctggatgaaggctctattacactggtttcgcctctaggcaactcgtttaccggcgaggtgttcaacctctcttttgccgatgtggccattcatattgctaccgcaatacaagcagataagcttatcgcctataacgacgacggccccatttgcgataaagatggcagtcgctaccgagaactcacacttatcaagtgtgagaaatttttggtggatcaaggccaaaacaatacaagtaatacttacttttcgttgcgcgcttgctacaaagcttgtgacggtggcgtaccaagggcccatgttatatctgccgcagaagacggcgccctgcttaaagagctgtttacccgagacggctctggtaccatggtgtatcgcgatagctacgaaaccatacgccgcgcacgcatagaagatgtgctgggcatacttaacctaattgagcccctagaaaatgaaggcatattggttaaacgctcgcgcgagcgcctagaaaccgaaatcgacttctttactgttatggagaaagacaacctaattattggctgctcggccctgtaccccatagaagacgagaacttcgccgaaattgcctgtgtggccatacaccccgcttaccagcgcggcggtcgcgcggccaagctgctatcgcacctagagaagcaagccgaaggcgccaagctaaaacgcttattagtacttaccactcaaacatcgcactggttcgtggagcaaggctttgtggaaggccatatagatatgctgccgttaaagcgcaaagagctgtacaactaccaccgcaactctaaaatctttatcaaaaacctctaa

SEQ ID NO: 16206 - protein, 439 aa, Saccharophagus degradans 2-40
MSEHTDQYVNWFRASSPYINAHRGKTFVIMLPGDCIDQPNFPNIISDIALLNSLGVKLVVVHGARTQIEAQLNASGVQSKFHRGVRITEREHLADVLKAVGQTRFTLEANLSSGLPNSPMHGSKIRIRGGNFITAMPQGVIDGIDHHLTGKVRSVDTKGVREQLDEGSITLVSPLGNSFTGEVFNLSFADVAIHIATAIQADKLIAYNDDGPICDKDGSRYRELTLIKCEKFLVDQGQNNTSNTYFSLRACYKACDGGVPRAHVISAAEDGALLKELFTRDGSGTMVYRDSYETIRRARIEDVLGILNLIEPLENEGILVKRSRERLETEIDFFTVMEKDNLIIGCSALYPIEDENFAEIACVAIHPAYQRGGRAAKLLSHLEKQAEGAKLKRLLVLTTQTSHWFVEQGFVEGHIDMLPLKRKELYNYHRNSKIFIKNL

SEQ ID NO: 16207 - DNA, 1566 bp, Methylobacillus flagellatus KT
  CDS (1)..(1566): transl_table=11
atggctttaggaaacgcaatccgcaaacgtcgcaaagcgctcaacatgacgttgcaagaactggcccgcaaggtcaacgcgaatagcggcaacctatcccgcattgaacgcggagcgcaaggcgtatccgaaaccatgttgcgcaagctatgcactgcactggattgcactgcagcctacctatatgcccaaagtgatgcagaaagcgggcatagcaccaatacctcacgcctgaccctgcaccaacctcaggagttcgtccgctggttccgctctgctgccccttatatccacgcatttggggggcggaccttcgtgattgcctttggcggcgaggtcgtggatgacggccagttcgttgccctttcgcacgacctcaacctgcttgccagcctggatgtgcgtcttgtgctcgtgcatggcgcacgcccgcaaatagaacgccgcctcaggcgtgccaagctgcagaccaaactggtcaatggcttgcgtgtcacggatgacgaagccatggaagccgtcaaggaagcgaacggcgccgttcgcgttgaaatagaatccttgctttctatggggctgatcaactcgccgatggcaggcgcagacattcgcgttgccagcggcaacttcgtcaccgccaagccgctcggcgtgcgcgacggtatagacctgcagcataccggcgaagtacgcaaaatcgatgctattggtatccaaaagcgcctggacgacggtgagctggtattgctatcgcccctgggctactcgcctaccggggaagtattcaacctgacgctggaagatgttgccaccagcacggccattgccctggacgctgacaagctgattttcctcatggactccagcggcgtgcacaatattcgcggggagctgctgcgggaaatgaccaccgacaaggccagaaaccttctgcgccatatcggtaacaacggtgcccaacagattaccgaagatgaattgtattacctgcctgccgcagtccgcgcctgcggacaaggcgtagcacgcactcacctgatcagtcggcatgtggacggcgcgattttgcaggagctcttcacacacgacggcatcggcaccatggtgaccgaggatccgctggaagccatgcggcctgcggatattggtgatgtcggcggcatactgcaattgatcgagcccttggaaaacgagggaatactggtcaggcgcgggcgcgaacgcctggaaatggaaatcaaccacttttatgtcatggagcatgacggcaagatcattggctgcgcagcgctctacccctttgctgatgccaagaccgcggagctcgcctgcatggccatccactcctcattccgccgtggcggacgcggcgaccgactgctcagctattgcgaaggacaagcgcgcgagctgggcttgaaatccatctttgtcctcacgacgcgcacagagcattggttcctcgaacgaggctttattgaaaccagcgtcgagcaactgccgggtgaaaagcagaaactctacaacctgcagcgccgctccaaggttttcatcaagcatatttga

SEQ ID NO: 16208 - protein, 521 aa, Methylobacillus flagellatus KT
MALGNAIRKRRKALNMTLQELARKVNANSGNLSRIERGAQGVSETMLRKLCTALDCTAAYLYAQSDAESGHSTNTSRLTLHQPQEFVRWFRSAAPYIHAFGGRTFVIAFGGEVVDDGQFVALSHDLNLLASLDVRLVLVHGARPQIERRLRRAKLQTKLVNGLRVTDDEAMEAVKEANGAVRVEIESLLSMGLINSPMAGADIRVASGNFVTAKPLGVRDGIDLQHTGEVRKIDAIGIQKRLDDGELVLLSPLGYSPTGEVFNLTLEDVATSTAIALDADKLIFLMDSSGVHNIRGELLREMTTDKARNLLRHIGNNGAQQITEDELYYLPAAVRACGQGVARTHLISRHVDGAILQELFTHDGIGTMVTEDPLEAMRPADIGDVGGILQLIEPLENEGILVRRGRERLEMEINHFYVMEHDGKIIGCAALYPFADAKTAELACMAIHSSFRRGGRGDRLLSYCEGQARELGLKSIFVLTTRTEHWFLERGFIETSVEQLPGEKQKLYNLQRRSKVFIKHI

SEQ ID NO: 16209 - DNA, 1437 bp, Ralstonia metallidurans CH34
  CDS (1)..(1437): transl_table=11
atgaacgccagaaccgactccccgcagcaggaccccgatcctgcctccgccccgctcccgctgcccgtaaaggccgcgcccgacacccagaatccgcccgtcgccacggagcttgccgagcccgccggcccggaccagcagcagttcgtcgactggctgcgatcggtcgcgccctatatccatgccttccgcggcaagacgttcgtaatcgccttcagcggcgaactggtcaaggccggggtgctcaacggactggtcaatgacgtggcgctgctgcacgcgatgggcatgcagatcgtgctggtgttcggatcccgaccgcaggtggaagaacagctcgcgctgcgcaatgtccagtcgcagtacgcggaaggcatccgaatcaccgacaatgccgcgctggaatgcgccaaggaagccgccggcgagttgcgcctcgacattgaggccgcgttcagccagggactgccgaacacgccgatggctggcgcccagctttccgtggtgtcgggcaacttcatcaccgcgcgcccggtgggcatcgtcaatggcgtggactatcagcacaccggtctggtccgcaagatcgacggcgactcgatgcgcatgtcgctatcgcacggcaaggtggtgctgctgtcgccgctcggcttctcgccgaccggccaggcattcaacctgtcaatggaggacgtggccagcgccacggccagcgcgctcaaggcggacaagctgatcttcatcaccgaggtacccggcgtgcccgaccaggtgggcaagctgatgaaggaaatgtcgctgcgcaccgccgtggaacggctgcagaacaaccacctgccacccgacgtcgcgtactacctccagcatctggtcaaagcgctcaagggcggcgtgccgcgcgcgcacctgatcccgttctcgctggacggttcggtgctgctggagctgttcctgcacgacggcgtgggcaccatgctgtccgacagcgatctggaaagcctgcgtgaagccacgcttgacgacgttggcggcattctgcagctcatcgccccgcttgaggccgatggcacgctggttccccgtggccgccatctgatcgagcgcgacatcgacaagttctcggtgatcgagcacgatggcgtgctgttcggctgcgccgcgctctacgaatttccacgcgagaacatgggcgagatggcctgcctgaccgtatcgcaggaagcccagggcaccggcgacggcgaacggctgctcaagcggatcgagcgccgcgcccgcgcgctgggcctggaacgcctgttcgtgctcaccacgcgtaccgaacactggttcctcaagcgtgggttcgtccacgccacggtcgacgatctgcccgaagacaagcgcaagctctacaactggcagcgcaagtcgatggtcctgatgaagaagctctga

SEQ ID NO: 16210 - protein, 478 aa, Ralstonia metallidurans CH34
MNARTDSPQQDPDPASAPLPLPVKAAPDTQNPPVATELAEPAGPDQQQFVDWLRSVAPYIHAFRGKTFVIAFSGELVKAGVLNGLVNDVALLHAMGMQIVLVFGSRPQVEEQLALRNVQSQYAEGIRITDNAALECAKEAAGELRLDIEAAFSQGLPNTPMAGAQLSVVSGNFITARPVGIVNGVDYQHTGLVRKIDGDSMRMSLSHGKVVLLSPLGFSPTGQAFNLSMEDVASATASALKADKLIFITEVPGVPDQVGKLMKEMSLRTAVERLQNNHLPPDVAYYLQHLVKALKGGVPRAHLIPFSLDGSVLLELFLHDGVGTMLSDSDLESLREATLDDVGGILQLIAPLEADGTLVPRGRHLIERDIDKFSVIEHDGVLFGCAALYEFPRENMGEMACLTVSQEAQGTGDGERLLKRIERRARALGLERLFVLTTRTEHWFLKRGFVHATVDDLPEDKRKLYNWQRKSMVLMKKL

SEQ ID NO: 16211 - DNA, 1338 bp, Shewanella sp. MR-7
  CDS (1)..(1338): transl_table=11
atgaggtgtaaacaacgcgtgcgtaccactgaactggttgatggatttcgtcattctgccccttacgtcaatgcccatagagggaaaacctttgtggtgatgttgggtggcgaggctttagcacaaaatcaatttcgcggcattttaaatgacgtggccctgttgcacagtttaggcattaaagtggtgttagtgtatggcgcgaggccgcaaatcgatgcggcattagcggccaatgggattgaacccgcctaccacgaaggtgtacgtatcaccgatgaagactcactcaaagtaattaagcaggttgcgggtgcattgcagtttgatatcaccgcacgtttatcgatgagtctaagtaatacaccgatgcaaggcgcgcaaattaacttagtcagcggtaactttgtgatcgcccagcctctgggggtcgataatggcatcgatttttgcctaagcggcaaagtgcgccgtatcgatactcaagggcttaagcgtcagctcgataaccactgtatcgtgttgatggggccgattgccgcatccgttactggcgaaagctttaacctcacggccgaagagattgccactcaggttgcgatcaagcttaaggccgacaagatgatcggctttagttcgcaaaacggcatcctcgatcgcaatggcgatgtgattgccgaattaatgccaaatgatgcgcaaaacattctgacgaagctcgctgagcaaggttcggcctgtattggtactatggccttcctcaaggcgagtattgatgcgtgccgcaatggtgtgccccgttgtcatttggtcagttacctcgatgatggtgccttgctacaggagttgttctcccgtgaaggcataggcacgcaaatcgtgactgaaagcgctgagcgtctgcgccgcgcatcgattagcgatattggcggtgtactgaacttaattcgtcctctggaagaacagggcattttagtgcgccgaagccgtgagcagctggagattgaaatcgagcagtttatgttgattgagcgtgatggcttagtcattggctgcgccgccctgtatccctttgaagaggataacgctggcgagtttgcctgtttggtggtgcatccagattatcgcgatgcggataggggcagtttgctgctgaaaaatatcataggccaggcgcgtaatcggggttattcccgtttgtttgccttgactacccgcagcattcactggtttttagaacatggctttgtgatcgaagatgtggaagccttaccgcagaagaaaaagcagctgtacaactatcagcgccgctctaaaattctcgccctcgatctttaa

SEQ ID NO: 16212 - protein, 445 aa, Shewanella sp. MR-7
MRCKQRVRTTELVDGFRHSAPYVNAHRGKTFVVMLGGEALAQNQFRGILNDVALLHSLGIKVVLVYGARPQIDAALAANGIEPAYHEGVRITDEDSLKVIKQVAGALQFDITARLSMSLSNTPMQGAQINLVSGNFVIAQPLGVDNGIDFCLSGKVRRIDTQGLKRQLDNHCIVLMGPIAASVTGESFNLTAEEIATQVAIKLKADKMIGFSSQNGILDRNGDVIAELMPNDAQNILTKLAEQGSACIGTMAFLKASIDACRNGVPRCHLVSYLDDGALLQELFSREGIGTQIVTESAERLRRASISDIGGVLNLIRPLEEQGILVRRSREQLEIEIEQFMLIERDGLVIGCAALYPFEEDNAGEFACLVVHPDYRDADRGSLLLKNIIGQARNRGYSRLFALTTRSIHWFLEHGFVIEDVEALPQKKKQLYNYQRRSKILALDL

SEQ ID NO: 16213 - DNA, 1335 bp, Alkalilimnicola ehrlichei MLHE-1
  CDS (1)..(1335): transl_table=11
atgaagaccagcgatctggacccggaactctacgtgcgctggttccgcaacagcgcgccctatatcaacgcccaccgggggcgcacctttgtggtggccttctccggcgcggcgctgcaggacggcgacttccccgacatcatccacgacctggcgctgctctccagcctgggtgtgcgcctggtgctggtgcccggggcccggccgcaggtggaggcgcgcctgcgcgagcgcggcgccgagctgcgctatgtcaacggcctgcggatcaccgacgatgcggccctggcctgcgtgaaggaggcggtgggcgcggtgcgcctggagatcgaggcgctgttcaccatgggcctggccaattcgccgatggccggcgcgcgcctgcgactggcctccggcaatctggtgacggcccggcccctgggggtgcgcgacggggtggactaccagcacaccggtgaggtgcgccgggtggatgccgagggcatccgcgcccgcctggacgatggcgatatggtgctgctctcgccgctgggctgttcgcgcacgggcgaggtgttcaacctggccggcgatgaggtggcgctggaggcggcgcgggcgttgcgggccgacaagctgatctttctgcaggagggcgagtcggtctgcgatgaccggggccagcgggtgggcgagatgacgctgagccaggtccgggccctgctgaacgcgccgccgcgctgcctgacgaaggagaccggccgcctgctggagcgcgcgctgcgggcgtgcagttccggggtgcatcgggtgcacctgctggaccggcaccgagacggggccctgctgttggagttgtttacccgcgacggggtggggacgctggtgacgccggagcggtttgagacccagcgccgcgccacgccggaggatgtgccggggattgtggccctgctggagccgctggagcgggatggcacgctggtgagccggccgcgggatctgctggagacggatatcgaccacttcattgtggtggagcgcgatggcagcattatcgcctgctcggcgctctacccgatcccgggctcgaccacgggcgagctggcgggcttcgcggtgcatcccgattaccggggcggtggccggggcgacgccctgctggcccaggtggaggccgacgcccgggcggaagggctggaccggctttacgtgctgacgacccggacggcgcactggttccaggagcgggggttccagccggccgcgccggaggacctgcccgaggcccggcgcagggcctacgatcagaatcgggcgtcgcgggttttcgtcaagtccctggttggttga

SEQ ID NO: 16214 - protein, 444 aa, Alkalilimnicola ehrlichei MLHE-1
MKTSDLDPELYVRWFRNSAPYINAHRGRTFVVAFSGAALQDGDFPDIIHDLALLSSLGVRLVLVPGARPQVEARLRERGAELRYVNGLRITDDAALACVKEAVGAVRLEIEALFTMGLANSPMAGARLRLASGNLVTARPLGVRDGVDYQHTGEVRRVDAEGIRARLDDGDMVLLSPLGCSRTGEVFNLAGDEVALEAARALRADKLIFLQEGESVCDDRGQRVGEMTLSQVRALLNAPPRCLTKETGRLLERALRACSSGVHRVHLLDRHRDGALLLELFTRDGVGTLVTPERFETQRRATPEDVPGIVALLEPLERDGTLVSRPRDLLETDIDHFIVVERDGSIIACSALYPIPGSTTGELAGFAVHPDYRGGGRGDALLAQVEADARAEGLDRLYVLTTRTAHWFQERGFQPAAPEDLPEARRRAYDQNRASRVFVKSLVG

SEQ ID NO: 16215 - DNA, 1299 bp, Pseudomonas putida GB-1
  CDS (1)..(1299): transl_table=11
atgcccgattacgtcaactggctgcgtcatgcctccccgtacatcaatgcccatcgcgactgcaccttcgtggtcatgctccctggcgatggggtggagcaccctaacttcggcaatatcgtccacgacctggtactgctgcacagcctgggcgtgcgcctggtgctggtacatggttcgcgcccacagatcgaaagccgcctggccgatcgcggcctgaccccgcactaccatcggggcatgcgcattaccgatgccgccacgctggactgcgtgatcgatgctgtcggcgccctgcgcctggccatcgaagcgcgcctgtcgatggatatcgccgcttcgcccatgcagggctcgcgcttgcgcgtggcatccggcaacctggtgaccgcacggccgattggcgtgcttgaaggggttgattaccaccacaccggtgaagtgcgccgggtcgaccgcaagggcatcagccgtctgctcgacgagcgttccatcgtcctgttgtcgcccctgggctactcgcctaccggggaaattttcaacctggcctgcgaagacgtggctacccgtgcggccatcgagctgggcgccgacaagttgctgttgttcggcgccgagcctggcctgctggacgccgacggtaaactggtgcgcgaactgcgcccgcagcaggttgccccgcatctgcagcgcctgggcagcgattaccagggcgaactgctggatgccgcagccgaggcctgcaaaggcggcgtggcacgtagccatatcgtcagctatgccgaggatggtgcgctgctgaccgagctgttcacccgtggtggtggcggtacgctggtgtcgcaggagcagttcgaagtggtgcgcgaggcgagcatcgaggacgttggcggcttgctggagttgatcagcccgctggaagaacagggcattctggtgcgccgttcgcgcgaggtgctggagcgcgagatcgaacagttcagcgtggtcgagcgtgaaggcatgatcatcgcctgtgcggcgctgtacccgattgccgattccgaggcgggggagctggcgtgcctggcagtgaacccggagtaccgccatggtgggcgtggggacgagctgctggagcgcatcgagagccgggcgcggcagatgggcttgaataccttgtttgtgctcacaacgcgcactgcgcactggttccgcgagcgcggctttgcgccgagtggggtagagcggctgccggcggcgcgggcttcgctgtacaactaccagcgtaattcgaagattttcgagaaggccctgtaa

SEQ ID NO: 16216 - protein, 432 aa, Pseudomonas putida GB-1
MPDYVNWLRHASPYINAHRDCTFVVMLPGDGVEHPNFGNIVHDLVLLHSLGVRLVLVHGSRPQIESRLADRGLTPHYHRGMRITDAATLDCVIDAVGALRLAIEARLSMDIAASPMQGSRLRVASGNLVTARPIGVLEGVDYHHTGEVRRVDRKGISRLLDERSIVLLSPLGYSPTGEIFNLACEDVATRAAIELGADKLLLFGAEPGLLDADGKLVRELRPQQVAPHLQRLGSDYQGELLDAAAEACKGGVARSHIVSYAEDGALLTELFTRGGGGTLVSQEQFEVVREASIEDVGGLLELISPLEEQGILVRRSREVLEREIEQFSVVEREGMIIACAALYPIADSEAGELACLAVNPEYRHGGRGDELLERIESRARQMGLNTLFVLTTRTAHWFRERGFAPSGVERLPAARASLYNYQRNSKIFEKAL

SEQ ID NO: 16217 - DNA, 1308 bp, Marinobacter sp. ELB17
  CDS (1)..(1308): transl_table=11
ttgaacgccaacggctggttgcacggctttcgccattcgtcgccttacattaatgcacaccgcggccgtaccgtggtactgaccctgccgggcgatgccatcagccaggaaaatttcatcaatatcgttcacgatattgccttgctgagcagcttgggcgtgcgattagtcgtagcgttcggtgcccgctcccagatacaacagcggctgcaagacgccggccttgaatccacctttgcccgcggcttgcgggtaaccaccgaacagcaattgccgctggtgatggaagccataggcggattgcgggcatacattgagagccagttgtctatgggccttgtcagttcgcccatgcacaatgcccgcatacgggtgtgcagcggcaactatgtgaccgctaaaccggttggcgtattagacggtgtcgattttggttataccggcaaggttcggcgcgttgatgtttccggtatcgaaaagctgctcgaccaaggccagatcgtgttgttgccacccatgggtttctcccccaccggtgacgtttttaatctatcttacgaagacgttggaagccaggttgcggccgctttgcgcgctgaaaagctgatgatatttatcgacgccccgggcctgttgacggcggacggcacgctggtgcgtgaattatctgcggctcaggcagccgaccagttgagtgctggccaggtgacaggccacgatgcagagctgctaaaggcggcgtgcgatgcctgtgtcaagggtgtgcgccgcgctcacatcatcagctatctggatgacggtgcgctgctcaaggagctgtttacccgtgacggttccggtactctggtcagtggcgacacttacgagcaaatccgagctgccagggtagaagacgtgggcggtattaccaatctgatttatccgttggaagagcagggcattctggtgcggcgctcgccagaaatgctggaaaccgaaattggccgttttgtggtggccgaacgcgacggcaccattgttgggtgcgccgcgctatacccttacggccaggatgacgctggcgagctgtcctgttttgcagtagaccccaattaccgccgcgcaggacgtggcgatgaactactggcgatgattgaacagcaggctcgtgctcagggttttcagcgcctgtttgttctgaccacgcaaaccgagcactggtttcgcgaacgcgatttcaaagcgatgccagtacagtcgctgccgggctctaaactggcggtttacaacacccagcgcaactccaaagttttttgtaaagctctttga

SEQ ID NO: 16218 - protein, 435 aa, Marinobacter sp. ELB17
MNANGWLHGFRHSSPYINAHRGRTVVLTLPGDAISQENFINIVHDIALLSSLGVRLVVAFGARSQIQQRLQDAGLESTFARGLRVTTEQQLPLVMEAIGGLRAYIESQLSMGLVSSPMHNARIRVCSGNYVTAKPVGVLDGVDFGYTGKVRRVDVSGIEKLLDQGQIVLLPPMGFSPTGDVFNLSYEDVGSQVAAALRAEKLMIFIDAPGLLTADGTLVRELSAAQAADQLSAGQVTGHDAELLKAACDACVKGVRRAHIISYLDDGALLKELFTRDGSGTLVSGDTYEQIRAARVEDVGGITNLIYPLEEQGILVRRSPEMLETEIGRFVVAERDGTIVGCAALYPYGQDDAGELSCFAVDPNYRRAGRGDELLAMIEQQARAQGFQRLFVLTTQTEHWFRERDFKAMPVQSLPGSKLAVYNTQRNSKVFCKAL

SEQ ID NO: 16219 - DNA, 1329 bp, Moritella sp. PE36
  CDS (1)..(1329): transl_table=11
atggaattgagtcaacaagataaccagttagtacgttggtttcggcaatcagcgccttacctcaatgcgcatcgagataaaacaattgtgctgacattaagtggtgaagccatagcacatgctaacttcatcaatatcgtcaatgacattgccttattaaatattctcggcattcgcattgtattagtctttggcgcacgtcctcaaatcaacagcatactcgcgaataataactgcgagagtcagtttcataaacgccgacgcgtcactgatgagcaagccttcccgttaattaagcaagttattggtcaacttcaatatgaaatcaccgccgctttctctatgggactggtcaatacccaaatgcacggtgtcaaaatcaatatcgtcagtggtaacttcattaccgcacaaccaattggggttgatgaaggtgttgatttttgccataccggtcgtgtccgccgagttgatactgacgcgctggaatatcaacttgcgcaaaatgcgatcaccgtgatcccaccactcggctattctgtcaccggtgagagttttaatctgagcgcagaagaagtggcgacaaaaatagccatcaaactcaatgcccataagttaattaacttttgctctgcacagggcgtactcgattataacggcaatttaatttcagaaatgtttcctgaacaagcgcaagagcgtttagccgaacttgaaactgaaggtggaataaacacaggcacagcctcttacttacgcgcggcaatcaacgcttctgtagcaggggtcccccgttgtcatttggtgagttacaaaaccgatggttcgttattacaagagctgttttcacgcgatggtgtcggtactcaaatcgtacgtcaaagtgcagagcaaacacgaccagcaaagattgaagatgtgccaggcattatgctactgattcagcccttagttgaccaggggatgctagtacaacgcaccagagagcagttattacgagatatcgagcactttaccgtggtcgaacgtgatggcaccattattggctgcgcttcactttattgtttctctggtaatattgctgaaatggccagtgtcgcaacccaccctgaatatcgacgcttgagtcgtggtgacttattggtcaaagaaatcgagaaacaagccaagcaacaaggcatggatcgcctgtttgtgttgacaacacacagcatccattggtttagagaacgcggttttgaacctgtcgaactggaacgattacccgttgaaaagcaagagttgtataatttacagcgtcgttcgaaaatattaatgaagaatttataa

SEQ ID NO: 16220 - protein, 442 aa, Moritella sp. PE36
MELSQQDNQLVRWFRQSAPYLNAHRDKTIVLTLSGEAIAHANFINIVNDIALLNILGIRIVLVFGARPQINSILANNNCESQFHKRRRVTDEQAFPLIKQVIGQLQYEITAAFSMGLVNTQMHGVKINIVSGNFITAQPIGVDEGVDFCHTGRVRRVDTDALEYQLAQNAITVIPPLGYSVTGESFNLSAEEVATKIAIKLNAHKLINFCSAQGVLDYNGNLISEMFPEQAQERLAELETEGGINTGTASYLRAAINASVAGVPRCHLVSYKTDGSLLQELFSRDGVGTQIVRQSAEQTRPAKIEDVPGIMLLIQPLVDQGMLVQRTREQLLRDIEHFTVVERDGTIIGCASLYCFSGNIAEMASVATHPEYRRLSRGDLLVKEIEKQAKQQGMDRLFVLTTHSIHWFRERGFEPVELERLPVEKQELYNLQRRSKILMKNL

SEQ ID NO: 16221 - DNA, 1770 bp, Oryza sativa subsp
  CDS (1)..(1770)
atgccgatgcggcggcagtgcgccaggggcgtcgtcgtgcggtgcgcgggggcgggggcggggcggtcgttcggtggggcctcctgcgggagcgggggagggggcgggggcgggggcggggcggaggatcaggaggaggaggggacgaggttcgtggggtggtttcgggaggcctggccctacgtccgtggccaccgggggagcaccttcgtcgtcgtcgtctccggtgaggtcgtcgccgggccccacctcgacggcattctccaggctgtgtcgctgcctgatttcattacatcacaggatatttcacttcttcatggtcttgggatcaaatttgttcttgttcctggaacacatgttcagattgataagctcctatctgagagagggaagaaggccaagtatgctggtcgttaccgtattactgattctgattcattagaggctgcaatggaggcagcaggcagaatacgcttaactatagaagcaaaactatcccctggtcccccaatgttgaatcttcgtcggcatggtgttaatggtcgttggcatgaaatatgtgataatgttgcaagtggaaactttcttggcgctaagagacggggggttgttggtggcattgattatggattcactggtgaagttaagaaaatagatgtttcacggataaaagaaagacttgatagagatagcatagttgttgtgagcaatatgggatattccagctctggcgaggtgttgaattgcaacacatatgaagtcgctacagcttgtgctttagctatcgaggcagacaagcttatctgcattgttgatggtcaaatatttgatgaacatggtcgagtcaatcgtttcatgtctattgaagaagcggacatgttgatcagaacacgtgctaagcagagtgagattgctgcaaattatgtcgaagttgtaggtgaggaggatattagttatgctcgcaatcttcctatcaaagaggagaaagaattaggattgattggaagggacttcgttgatgggtatactgcatctttccggaatggtgtgggtttcaataacggaaatggtctgtctggtgagcaagggtttgcaattggtggggaagagcggttgagtaggtcaaatggttacctttcagagttagcagcagcagcatatgtatgcaatggaggcgttcaaagggttcacattatagatggcactgttggcggatcattgttgttggaattattcacaagagatggtgttggaacgatgatagctagagacatgtatgaaggaacaaggatggctagagaagaagatctttctggtattagaaagatcatccgacccttagaagaatctggtgtcctagtgcggcgaacagataaagagcttctagaagcattgaagtcatttatcgtcgtggaaagagatggttcaatcattgcatgtgctgctctctttccatttcttgaggataaatctggggaagttgccgctattgctgtatctgaagaatgtcgaggacagggtcaaggggataagttacttgattacgtcgagaagaaggcattatcgcttggtcttgagaaaatattcttgctcaccacacgaacagcagactggtttgttcggcgtggcttcaaggagtgttcgattgagtccctgcctgcgcagaggagaaaacgaatcgatctttcacgtggatcaaaatattacatcaagcggctccgggcagcagagattgggcagatggctgttaacaattttgctgtcagatga

SEQ ID NO: 16222 - protein, 589 aa, Oryza sativa subsp
MPMRRQCARGVVVRCAGAGAGRSFGGASCGSGGGGGGGGGAEDQEEEGTRFVGWFREAWPYVRGHRGSTFVVVVSGEVVAGPHLDGILQAVSLPDFITSQDISLLHGLGIKFVLVPGTHVQIDKLLSERGKKAKYAGRYRITDSDSLEAAMEAAGRIRLTIEAKLSPGPPMLNLRRHGVNGRWHEICDNVASGNFLGAKRRGVVGGIDYGFTGEVKKIDVSRIKERLDRDSIVVVSNMGYSSSGEVLNCNTYEVATACALAIEADKLICIVDGQIFDEHGRVNRFMSIEEADMLIRTRAKQSEIAANYVEVVGEEDISYARNLPIKEEKELGLIGRDFVDGYTASFRNGVGFNNGNGLSGEQGFAIGGEERLSRSNGYLSELAAAAYVCNGGVQRVHIIDGTVGGSLLLELFTRDGVGTMIARDMYEGTRMAREEDLSGIRKIIRPLEESGVLVRRTDKELLEALKSFIVVERDGSIIACAALFPFLEDKSGEVAAIAVSEECRGQGQGDKLLDYVEKKALSLGLEKIFLLTTRTADWFVRRGFKECSIESLPAQRRKRIDLSRGSKYYIKRLRAAEIGQMAVNNFAVR

SEQ ID NO: 16223 - DNA, 1863 bp, Arabidopsis thaliana
  CDS (1)..(1863)
atggcaaattgcagaactccacgaccgtgcgttggcaagctcagccgcggcgtggtttgggaaaactccgattttcggtctgaacctccaggttcttggggatgtccgaagcaaatgagacacaatcacgtgtcttcttcgacaacggagcatcaacgacgaagctggaccaacgctaacggtaaagaaacaaagagccattccaattttgcagactctggtgggattgttgcggtggaggaagcggagttagtggcagtgttgagggaggctcatccgtacgtgaatttacatagagacagtaaatttgtcgttatgttgtcggctgagctacttgactccggattccaaagtgaaatcattataacatgtgtgcaggacatagcatttcttcatcatctgggcattaagtttgttctagttcctggaactcaagtgcaaatcgaccagcttctagctgagagaggacgcgagcctacatatgtaggtcgttacagagtcacagactcagcatctcttcaggctgctaaggaagctgcgggagcaatatctgtaatgattgaggccaaactatctcccggaccttctatttacaatatacgccgacatggtgatagtagtcgtttgcatgaaacaggcgttagggtcgatactggtaacttctttgcagcaaagagaagaggtgttgttgatggtgttgattttggagcaactggtttagtgaagaagatagatgtagatcgaatccgtgagaggcttgatagtggttctgtagttttattgaggaacttgggccattccagcaccggagaagtcttaaattgcaatacctatgaggttgctacagcatgtgctttagctataggagcagataagcttatttgcataatggatggtccagttcttgatgagaatggacatcttgttcggttcttgactcttcaggaagcagatacattagtcagaaaacgggcacagcaaagcgagatcgctgccaattacgtgaaggctgttggggatggaggcataagtagttttcctgaacctcttggttacaatggtatggtgacgactcccaacaatcatattgggagaccgatttgggaaaaactcagtccgacctttcagaatggtgttggatttgacaacggaaatgggttgtggtctggggagcaaggttttgctattggcggtgaggagagaattagccgtttgaatggatatctctctgaactggctgcagcagcgttcgtttgcagaggtggtgtcaaaagagttcacttattggatggtactataagtggagtgctattgttggagcttttcaaaagagatggaatggggactatggtggcaagtgatgtatatgaaggaaaccgggaggcgaaagtggaagatcttgctggaataagacaaataatcaaacccctggaagaatctggggctttagttcgtagaactgatgaggagcttctgcgagctttggattcgtttgtggttgtggaaagggaaggacatattatcgcttgcgcggctttgttccctttctttgaagaaaaatgtggagaagttgcagctatcgcagttgcatcagattgccgtggacaaggccagggagataaattgctcgattacattgagaagaaagcgtcagctcttggacttgagatgctatttctgctgacaacgagaaccgcggactggtttgtgagacgcgggtttcaggaatgtccaatcgagatgataccagaggcaagacgggaaagaatcaatctttcgaggagatcaaagtattacatgaagaagctgttgccagacaggagtggaatttctgttgttcgaacatttcagtatgattcttga

SEQ ID NO: 16224 - protein, 620 aa, Arabidopsis thaliana
MANCRTPRPCVGKLSRGVVWENSDFRSEPPGSWGCPKQMRHNHVSSSTTEHQRRSWTNANGKETKSHSNFADSGGIVAVEEAELVAVLREAHPYVNLHRDSKFVVMLSAELLDSGFQSEIIITCVQDIAFLHHLGIKFVLVPGTQVQIDQLLAERGREPTYVGRYRVTDSASLQAAKEAAGAISVMIEAKLSPGPSIYNIRRHGDSSRLHETGVRVDTGNFFAAKRRGVVDGVDFGATGLVKKIDVDRIRERLDSGSVVLLRNLGHSSTGEVLNCNTYEVATACALAIGADKLICIMDGPVLDENGHLVRFLTLQEADTLVRKRAQQSEIAANYVKAVGDGGISSFPEPLGYNGMVTTPNNHIGRPIWEKLSPTFQNGVGFDNGNGLWSGEQGFAIGGEERISRLNGYLSELAAAAFVCRGGVKRVHLLDGTISGVLLLELFKRDGMGTMVASDVYEGNREAKVEDLAGIRQIIKPLEESGALVRRTDEELLRALDSFVVVEREGHIIACAALFPFFEEKCGEVAAIAVASDCRGQGQGDKLLDYIEKKASALGLEMLFLLTTRTADWFVRRGFQECPIEMIPEARRERINLSRRSKYYMKKLLPDRSGISVVRTFQYDS

SEQ ID NO: 16225 - DNA, 1851 bp, Ostreococcus tauri
  CDS (1)..(1851)
atggccgtcacgcgcgcgcacgtcagcgcgtacgccacgtgcgcgtcgttcacgtcgatcgatgcgcgtctaaaacgcttcgagacgcgaagaaacggcgtcacgcgtcgtccgggacgattccaactcgcgcaggaatccaacgccaagcgcccgcacggcgtcgttcacgtcccgcgcgacgcgcgaacacgcgcgtcgtcgatcgatcgtccgtcgacatcgaacgcgacgaccaacgggtctcacatcgacgccaacgcgctcgcattcgtggatttcttccgtcaggcgtcgccgtacatcgcgctgcaccgcgggtcgacgttcgtcgtgttgatcccgggcgagacggccgcggatcccgagagattgggtggagtcgttcgtgacgtcgcgttattacacgatttaggcgttcgcgtcgtcttggtcgtcggggcgagcgatcaggtgagcgaactgacgcgagtaaaaggcgggtcggtgacgttcttcgacgactatcgcgtgacggacgacgtggcgatggagagcgcgatggaggcgaacgggaggaatcaagtcttagtacaagcgttgttgagtcgagcgccgacggtttcgatcgcgaggaggcataaggatggggacggggatggcgacggcggcatagggagcaacggagcgagcgtggtggcgacgagcgggaattacatcttcgcaaagcgtatgggcacggtgagagggacggattttcaacgtacgggagaggtaacgagagtggacgcgagagggattaagaagaaactcgcgcaaggtgacatcgtgctcctgtcgtctctcggattcaacgccgccggggaggttttgaattgtcagtcgttcgacgtggctctcgcgacggcaatcgatttgaaggcggacaagctcattgtcatgacggatccgtcgcatatgccgtacgaggggagtcacggagtgggcgagcgcgtaccgagattcctatcgcttcgctcggcggagcaatatttggcgaagacgtacgcggcaaaggaatcaagcaaggtaggcgtgaacggatcgtcaagctggcgatggttacagatggactacatgatcgacggatctgacgcagtggacgtgaacgcttcgatggatgttcgtgcggaacacatgttcgacaacatgcgaggcgtgaacgacagtatctcgcgatttgaggcgatcatggagcgcgacttgacgtggcgcgttccacattgtcctcaagagctcagtctcgcgacgttcgcgtgcaaggcgggtgtgcgtcgagcgcacttggtggacccgacggtttcgggatcacttctcgtcgagctgtacacgcgcgatggtatcggttgcatggtcgctcgggatcgatacgaagggatgcgtctggcttcgatggcagattgggagagcatcaagcgcattcttgaaccgctcgtcgcgaacggcgccgtgatcgagcgatccgacgaagatctcatcgatgaagtaaataagggttacttccacgtcaccgagcgcgacggtaaagtcatcgcctgttgcgcgctcaagccatgcggctcaaacggagacgcgcacgaggtcgccgcgttcgcggtgttgccagagtaccgacgcggaggacgaggcgacgccctgctcgagtacgcagaaaactacgccgtagagacgcttggagcgtccaacttgttccttctgaccacacgcacggcggactggttcgttcagcgtggtttcgagaacaagggactggcggaaggtaacgatgagcttccgcccgggaaaaccgtccagagcggtcgtggtagcatcctcttcgtcaagtatatctaa

SEQ ID NO: 16226 - protein, 616 aa, Ostreococcus tauri
MAVTRAHVSAYATCASFTSIDARLKRFETRRNGVTRRPGRFQLAQESNAKRPHGVVHVPRDARTRASSIDRPSTSNATTNGSHIDANALAFVDFFRQASPYIALHRGSTFVVLIPGETAADPERLGGVVRDVALLHDLGVRVVLVVGASDQVSELTRVKGGSVTFFDDYRVTDDVAMESAMEANGRNQVLVQALLSRAPTVSIARRHKDGDGDGDGGIGSNGASVVATSGNYIFAKRMGTVRGTDFQRTGEVTRVDARGIKKKLAQGDIVLLSSLGFNAAGEVLNCQSFDVALATAIDLKADKLIVMTDPSHMPYEGSHGVGERVPRFLSLRSAEQYLAKTYAAKESSKVGVNGSSSWRWLQMDYMIDGSDAVDVNASMDVRAEHMFDNMRGVNDSISRFEAIMERDLTWRVPHCPQELSLATFACKAGVRRAHLVDPTVSGSLLVELYTRDGIGCMVARDRYEGMRLASMADWESIKRILEPLVANGAVIERSDEDLIDEVNKGYFHVTERDGKVIACCALKPCGSNGDAHEVAAFAVLPEYRRGGRGDALLEYAENYAVETLGASNLFLLTTRTADWFVQRGFENKGLAEGNDELPPGKTVQSGRGSILFVKYI

SEQ ID NO: 16227 - DNA, 1728 bp, Oryza sativa subsp
  CDS (1)..(1728)
atggcctcgccgtcgtcggtcgcctccgctcgcgccgccgccgaaggagcggcgacggtggctgctcggggtggcgccgagcccgcccgggccctgcggctgcctccggcgaacggggcgcggcgcggtgtccggtgctgctgcggggccgcgaatcccggcggcggtagcggtggcggtggcggcgcggtcgcgcgggaggagttcgtcgggttcttcagggaggcgtggccgtacatccggggccacagggggagcaccttcgtggtcgtcatctccagcgaggtcgtgtcagggccgcacttcgacggcattctgcaggatatttcacttcttcatggtttggggattcaatttgttcttgttcctggaacacatgtccaaattgataagctcttgtcagaaagaaggatggctaagtatgttggccagtaccgagttactgattctgattcattagaggctgcaatggaggcagctggaagaatacgattaactattgaggccaagctttctcctggtcctccaatgttgaatcttcgtagacatggtgttattggacgttggcatggtcttgtggataatgttgcaagtggcaacttccttggtgctaagagaagaggagtagttagtggtattgattatgggttcaccggcgaggttaagaaaattgatgtttcacgaataaaagaaaggcttgatagtgatagcatagttgttgtgagcaatatgggatactcgagctcaggagaagtgctaaactgcacttatgaagtagctactgcgtgtgctttagccattgaggcggataagctgatctgcattgtagatggccagatatttgatgagcatggacgtgtcattcctttcatgtctcttgaggaagcagatatgttgatcagaaagcgtgctaagcaaagtgatatcgcagcaaattatgtcaaggttgtggacgaggagggtatcagtcatttgcatgaggatgtcaaaccatttttgaacggaagcggtcctcttggtgcatatgctgcttctttccataatggcttgggtttcaacaatggaaatggtattttatctggtgagcaaggatttgctattggtggtgaagagcggttaagtagatcaaatgcctatctttctgagttggcagcagcagcatttgtatgccatggtggtgttcaaagagttcatatcatagatggaacagttgatggatcactgctattagaattgtttacaagagatggtacaggaacaatgatagctgatgtgtatgaaggaacaaggatagctagagaggaggatcttcttgggataagaaaaattcttcgaccactagaagaatctggtgttttggtgaagagaactgataaggagcttcttgaagcactggagtcgttctatgttgttgaaagggatggttcaatcattggatgtgctgctctgttcccatttcccgaagataaatctggagaagttgctgcgattgctgtatctgaagaatgccgaggaagaggtcaaggggacaagttgcttattatgatgatgcttcagactatattgagaaggcagcaatgtcccttggtctggagaaattattcttgctcacgacacggacagctgattggtttgtgcggcgtggcttcttggagtgttcgattgaatccattcctgagcaaaggagaaaacgcatcaatttatcacgaggatcaaagtattatataa

SEQ ID NO: 16228 - protein, 575 aa, Oryza sativa subsp
MASPSSVASARAAAEGAATVAARGGAEPARALRLPPANGARRGVRCCCGAANPGGGSGGGGGAVAREEFVGFFREAWPYIRGHRGSTFVVVISSEVVSGPHFDGILQDISLLHGLGIQFVLVPGTHVQIDKLLSERRMAKYVGQYRVTDSDSLEAAMEAAGRIRLTIEAKLSPGPPMLNLRRHGVIGRWHGLVDNVASGNFLGAKRRGVVSGIDYGFTGEVKKIDVSRIKERLDSDSIVVVSNMGYSSSGEVLNCTYEVATACALAIEADKLICIVDGQIFDEHGRVIPFMSLEEADMLIRKRAKQSDIAANYVKVVDEEGISHLHEDVKPFLNGSGPLGAYAASFHNGLGFNNGNGILSGEQGFAIGGEERLSRSNAYLSELAAAAFVCHGGVQRVHIIDGTVDGSLLLELFTRDGTGTMIADVYEGTRIAREEDLLGIRKILRPLEESGVLVKRTDKELLEALESFYVVERDGSIIGCAALFPFPEDKSGEVAAIAVSEECRGRGQGDKLLIMMMLQTILRRQQCPLVWRNYSCSRHGQLIGLCGVASWSVRLNPFLSKGENASIYHEDQSII

SEQ ID NO: 16229 - DNA, 1332 bp, Escherichia coli O157
  CDS (1)..(1332): transl_table=11
gtggtaaaggaacgtaaaaccgagctggtcgagggattccgccattcggttccctatatcaatacccaccggggaaaaacgtttgtcatcatgctcggcggtgaagccattgagcatgagaatttctccagtatcgttaatgatatcgggttgttgcacagcctcggcatccgtctggtggtggtctatggcgcacgtccgcagatcgacgcaaatctggctgcgcatcaccacgaaccgctgtatcacaagaatatacgtgtgaccgacgccaaaacactggaactggtgaagcaggctgcgggaacattgcaactggatattactgctcgcctgtcgatgagtctcaataacacgccgctacagggcgcgcatatcaacgtcgtcagtggcaattttattattgcccagccgctgggcgtcgatgacggcgtggattactgccatagcgggcgtatccggcggattgatgaagacgcgatccatcgtcaactggacagcggtgcaatagtgctaatggggccggtcgctgtttcagtcactggcgagagctttaatctgacctcggaagagattgccactcaactggccatcaaactgaaagctgagaagatgattggtttttgctcttcccagggcgtcactaatgacgacggtgatattgtctccgaacttttccctaacgaagcgcaagcgcgggtagaagcccaggaagagaaaggcgattacaactccggtacggtgcgctttttgcgtggcgcagtgaaagcctgccgcagcggcgtgcgtcgctgtcatttaatcagttatcaggaagatggcgcgctgttgcaagagttgttctcacgcgacggtatcggtacgcagattgtgatggaaagcgccgagcagattcgtcgcgcaacaatcaacgatatcggcggtattctggagttgattcgcccgctggagcagcaaggtattctggtacgccgttctcgcgagcagctggagatggaaatcgacaaattcaccattattcagcgcgataacacgactattgcctgcgccgcgctctatccgttcccggaagagaagattggggaaatggcctgtgtggcagttcacccggattaccgcagctcatcacggggcgaggttctgctggaacgcattgccgctcaggcgaagcagagcggcttaagcaaattgtttgtgctgaccacgcgcagtattcactggttccaggaacgtggatttaccccggtggatattgatttattgcccgaaagcaaaaagcagttgtacaactaccagcgtaaatccaaagtgttgatggcggatttagggtaa

SEQ ID NO: 16230 - protein, 443 aa, Escherichia coli O157
MVKERKTELVEGFRHSVPYINTHRGKTFVIMLGGEAIEHENFSSIVNDIGLLHSLGIRLVVVYGARPQIDANLAAHHHEPLYHKNIRVTDAKTLELVKQAAGTLQLDITARLSMSLNNTPLQGAHINVVSGNFIIAQPLGVDDGVDYCHSGRIRRIDEDAIHRQLDSGAIVLMGPVAVSVTGESFNLTSEEIATQLAIKLKAEKMIGFCSSQGVTNDDGDIVSELFPNEAQARVEAQEEKGDYNSGTVRFLRGAVKACRSGVRRCHLISYQEDGALLQELFSRDGIGTQIVMESAEQIRRATINDIGGILELIRPLEQQGILVRRSREQLEMEIDKFTIIQRDNTTIACAALYPFPEEKIGEMACVAVHPDYRSSSRGEVLLERIAAQAKQSGLSKLFVLTTRSIHWFQERGFTPVDIDLLPESKKQLYNYQRKSKVLMADLG

SEQ ID NO: 16231 - DNA, 1299 bp, Pseudomonas aeruginosa
  CDS (1)..(1299): transl_table=11
atgcccgactacgtcaactggttacgtcacgcttcgccctacatcaactcgcaccgggaccgcaccttcgtggtcatgctccccggcgaaggggtggagcatcccaatttcggcaatatcgtccacgacctggtccttctccacagcctcggcgcgcgcctggtgctggtgcacggttcgcgcccgcagatcgaggcgcgcctggccgcgcgcggcctggctccgcgctatcaccgcgacctgcgagtgaccgatgcgccgaccctggaatgcgtcatcgacgccgtgggtagtctgcgcatcgccatcgaggcgcggctgtcgatggacatggccgcctcgccgatgcagggcgcgcgcctgcgggtcgctggcggcaacctggtcaccgcgcggccgatcggcgtggtcgagggtgtcgactaccaccataccggcgaggtccgtcgcatcgaccgcaagggcattggccgccttctcgacgagcgcagcatcgtcctgctctcgccgctgggctactcgccgaccggggaaatcttcaacctggcctgcgaagacgtggccatgcgcgccgccatcgacctggaagcggaaaagctgattctctacggcgccgaacagggcctgctggacgcatccggcaagctggtccgcgaactgcgcccgcagcaggtgcccgcgcacctgcaacggctgggcaacagctaccaggccgagctgctggacgccgcggcgcaggcctgccgggccggggtcaagcgcagccatatcgtcagctacaccgaggacggcgcgctgctcagcgagctgttcacccgcaccggcaacggcaccctggtcgcccaagagcagttcgaacagttgcgcgaggcgggcatcgaggacgttggcgggctgatcgagctgatccgcccgctggaagagcagggcatcctggtacgccgttcccgcgaggtgctggaacgcgagatcgaacagttcagcatcgtcgagcgcgaagggctgatcatcgcctgcgccgcgctctacccgatcgccgattccgaggcgggcgagctggcctgtctggcggtcaacccggagtaccgccacggcgggcgtggcgacgaactgctggagcggatcgaggagcgcgcgcgcggactcggcctgaagaccctgttcgtgctcaccacgcggaccgcgcactggttccgcgagcgcggcttccagcccagcagcgtagagcggctaccggcggcgcgggcctcgctgtacaacttccagcgcaattcgcaggtattcgagaagagcctgtga

SEQ ID NO: 16232 - protein, 432 aa, Pseudomonas aeruginosa
MPDYVNWLRHASPYINSHRDRTFVVMLPGEGVEHPNFGNIVHDLVLLHSLGARLVLVHGSRPQIEARLAARGLAPRYHRDLRVTDAPTLECVIDAVGSLRIAIEARLSMDMAASPMQGARLRVAGGNLVTARPIGVVEGVDYHHTGEVRRIDRKGIGRLLDERSIVLLSPLGYSPTGEIFNLACEDVAMRAAIDLEAEKLILYGAEQGLLDASGKLVRELRPQQVPAHLQRLGNSYQAELLDAAAQACRAGVKRSHIVSYTEDGALLSELFTRTGNGTLVAQEQFEQLREAGIEDVGGLIELIRPLEEQGILVRRSREVLEREIEQFSIVEREGLIIACAALYPIADSEAGELACLAVNPEYRHGGRGDELLERIEERARGLGLKTLFVLTTRTAHWFRERGFQPSSVERLPAARASLYNFQRNSQVFEKSL

SEQ ID NO: 16233 - DNA, 1299 bp, Pseudomonas putida
  CDS (1)..(1299): transl_table=11
atgcccgattacgtcaactggctgcgtcatgcatccccctatatcaatgcccatcgcgactgcaccttcgtggtcatgctccctggcgatggggtggaacaccctaatttcggcaatatcgtccacgacctggtgctgctgcacagcctcggcgtgcggctggtgctggtgcatggctcgcgcccgcagatcgaaagccggctggccgatcgcggcctgaccccgcactaccaccggggcatgcgtattactgatgcggccaccctggactgcgtgatcgatgccgtcggcgccctgcgcctggccattgaagcgcggctgtcgatggacatcgccgcttcgccgatgcagggctcgcgcctgcgcgtggcctccggcaacctggtcaccgcgcggccgatcggcgtgctcgaaggcgtggactaccaccacactggcgaagtgcgccgggtcgaccgcaagggcatcagccgcctgctcgacgagcgttccatcgtgctgttgtcgcccttgggctactcgcctaccggggaaattttcaacctggcctgcgaagacgtggctacccgtgcggccatcgaactgggcgccgacaagttgctgctgttcggcgccgagccgggcctgttggacgctgacggtaggctggtgcgcgaactgcgcccgcagcaggttgctccgcatctgcagcgtctaggcagcgattaccagggcgaactgctggatgctgcggccgaggcttgcaaaggcggtgtggcgcgcagccatatcgtcagctatgccgaggacggcgcgctgctcaccgagctgttcacacggggcggtggcggtacgctggtgtcgcaggagcagttcgaagtggtgcgcgaggcgaccatcgaggacgtcggtggcctgctggaattgatcagcccgctggaagagcagggcatcctggtgcgccgctcgcgcgaagtgctggagcgagagatcgagcagttcagcgtggtcgagcgcgagggcatgatcatcgcctgtgcggcgctgtacccgattgccgattccgaagcaggggagctggcttgcctggctgtgaacccggagtaccgccatggcgggcgtggcgatgagctgctggaacgcatcgaaagccgggcacggcagatgggcttgagtactttgttcgtgctgactacgcgcactgcgcactggttccgcgagcgcggctttgcgccgagtggcgtggagcggctgccggcggcgcgggcttcgctgtacaactaccagcgcaattcgaagattttcgagaagcccctgtaa

SEQ ID NO: 16234 - protein, 432 aa, Pseudomonas putida
MPDYVNWLRHASPYINAHRDCTFVVMLPGDGVEHPNFGNIVHDLVLLHSLGVRLVLVHGSRPQIESRLADRGLTPHYHRGMRITDAATLDCVIDAVGALRLAIEARLSMDIAASPMQGSRLRVASGNLVTARPIGVLEGVDYHHTGEVRRVDRKGISRLLDERSIVLLSPLGYSPTGEIFNLACEDVATRAAIELGADKLLLFGAEPGLLDADGRLVRELRPQQVAPHLQRLGSDYQGELLDAAAEACKGGVARSHIVSYAEDGALLTELFTRGGGGTLVSQEQFEVVREATIEDVGGLLELISPLEEQGILVRRSREVLEREIEQFSVVEREGMIIACAALYPIADSEAGELACLAVNPEYRHGGRGDELLERIESRARQMGLSTLFVLTTRTAHWFRERGFAPSGVERLPAARASLYNYQRNSKIFEKPL

SEQ ID NO: 16235 - DNA, 1299 bp, Pseudomonas syringae pv
  CDS (1)..(1299): transl_table=11
atgcccgaatacgtcaactggcttcgccacgcgtctccgtacatcaatgctcaccgcgattgcaccttcgtcgtcatgctgcccggcgacggcgttgcgcaccccaatttcggcaatatcgtccacgatctggtgctgctgcacagcctgggcgtgcgtctggtgctggttcacggttcccgtccgcagatcgagagccgcctggcccagcgcgggattacgccgcgttaccaccgcgacctgcggatcaccgataccgaaacgctggaatgcgtgatcgatgccgtgggtcagttgcgtatttcgatcgaggcgcgtctgtcgatggacatggccgcctcgcccatgcagggctcgcgcttgcgagtgaccagcggcaatgtcgtcaccgcacggcctatcggcgtgcttgagggggtcgattatcagcacaccggcgaagtgcgccgcgtcgaccgcaagggtatcaatcgcctgctggacgagcgccatatcgtgctgctgtcgccactgggttattcgccgaccggcgagattttcaacctggcctgtgaagacgtcgccacccgcgcggccatcgatctggctgctgacaaactgctgctgttcggcgccgaaaccggcttgctggacgagcagggccggttggtgcgcgaactgcgtccgcaacaggtgcccgcgcacctgcagcgtctgggtgccaactatcaggcggaattgctggacgctgcggccgaggcctgccgtggcggtgtggcgcgcagccatatcgtcagttatgccgagaacggcgcgctgctgaccgagctgtttacccgtgacggtggcggcacgctggtcgcgcaggagcagttcgaactggtgcgcgaagcggccatcgaggatgtcggcggtttgatggacctgatcacgccgctggaagagcagggcattctggtgcgtcgttcccgcgaagtgctggaacgcgagatcacccagttcagcgtggtcgagcgggaagggctgatcatcgcctgtgctgcgctgtatccgattgccgattcggagtcgggcgagctggcgtgtctggccgtcaatccggaataccggcacggtggccgtggcgacgagttgctggagcgtattgaaaaccgcgcccgggctttgggtatcaagaccctgttcgtcctcaccacccgcaccgcacactggttccgcgaacgcggtttcgaacccagcagcgtcgaccgcctgccaagcgctcgcgcctcgctgtacaactaccagcgtaattcgaagatcttcgaaaaggcgatataa

SEQ ID NO: 16236 - protein, 432 aa, Pseudomonas syringae pv
MPEYVNWLRHASPYINAHRDCTFVVMLPGDGVAHPNFGNIVHDLVLLHSLGVRLVLVHGSRPQIESRLAQRGITPRYHRDLRITDTETLECVIDAVGQLRISIEARLSMDMAASPMQGSRLRVTSGNVVTARPIGVLEGVDYQHTGEVRRVDRKGINRLLDERHIVLLSPLGYSPTGEIFNLACEDVATRAAIDLAADKLLLFGAETGLLDEQGRLVRELRPQQVPAHLQRLGANYQAELLDAAAEACRGGVARSHIVSYAENGALLTELFTRDGGGTLVAQEQFELVREAAIEDVGGLMDLITPLEEQGILVRRSREVLEREITQFSVVEREGLIIACAALYPIADSESGELACLAVNPEYRHGGRGDELLERIENRARALGIKTLFVLTTRTAHWFRERGFEPSSVDRLPSARASLYNYQRNSKIFEKAI

SEQ ID NO: 16237 - DNA, 1356 bp, Ralstonia solanacearum
  CDS (1)..(1356): transl_table=11
gtggcgcacacgcccgccaccgccgacgtcgctccgatcccgcccacgcccgagcagcagcagttcgtggactggctgcgcgcggtggcgccctatatccacgccttccgcgacaagaccttcgtgatcggcttcggcggcgagctggtcaaggccggcatgctcggggcgctggtcaacgacatcgcgctgctgcacgccatgggcatgcacatcgtgctggtgcacggctcgcggccgcaggtggaagaacagctggcgctgcgccacgtgcagacccagttcgtcgacggcatccgcgtgaccgacaacgccgcgctggaatcggccaaggaggcctcgggcgaactgcggctcgacatcgaggccaccttcagccaggcgctgcccaatacgccgatggcgggggcccgcatttcggtggtgtcgggcaacttcgtgacggcgcggccggtgggcatcgtcaacggcgtcgatttccagcacacggggctggtgcgcaagatcgacgcggaatcgatccagcactcgctgtccaaccgcaagatcgtgctgctgtcgccgctgggcttctcgcccacggggcaggcgttcaacctgtcgatggaagacgtggccaccaacacggcgaccgcgctcaaggccgacaagctgatcttcatcaccgaggtgccgggcatcatggaccgggtcggcaagctacagcaggagctgtcgatggaatcggccatcgagcgcctgcgcgaagggcggctctccgccgacaccgcgtactacctgcagcacatcgtcaaggccatgcgcggcggcgtgcgccgggcgcacctgatcccgttcgcgctggacggcagcatcctgctggagctgttcctgcacgacggcgtcggcaccatggtctcgcacaccgacctggaatacctgcgcgaggccacgctggacgacgtgggcggcatcgtccagctgatcgagccgctggaagccgacggcacgctggtgccacgcgagcgccggctgctggagcgcgacatcgccaacttctccgtgatcgagcacgacggcatcatcttcggctgcgcggcgctctacccctacccgaaggaaggcgtgggcgagatggcctgcctgacggtggcgcccgatacccagggcaccggcgacggcgaacgcctgctcaagcacgtcgaggcccgcgcccgcgccgtggggctcaagcgcctgttcgtgctcaccacgcgcaccgagcactggttcctcaagcgcggcttcgtgcacgccaccgtggacgacctgccggaagaccgccgcaagctgtacaactggcagcggcggtcgatggtgctgatgaagaagctgtaa

SEQ ID NO: 16238 - protein, 451 aa, Ralstonia solanacearum
MAHTPATADVAPIPPTPEQQQFVDWLRAVAPYIHAFRDKTFVIGFGGELVKAGMLGALVNDIALLHAMGMHIVLVHGSRPQVEEQLALRHVQTQFVDGIRVTDNAALESAKEASGELRLDIEATFSQALPNTPMAGARISVVSGNFVTARPVGIVNGVDFQHTGLVRKIDAESIQHSLSNRKIVLLSPLGFSPTGQAFNLSMEDVATNTATALKADKLIFITEVPGIMDRVGKLQQELSMESAIERLREGRLSADTAYYLQHIVKAMRGGVRRAHLIPFALDGSILLELFLHDGVGTMVSHTDLEYLREATLDDVGGIVQLIEPLEADGTLVPRERRLLERDIANFSVIEHDGIIFGCAALYPYPKEGVGEMACLTVAPDTQGTGDGERLLKHVEARARAVGLKRLFVLTTRTEHWFLKRGFVHATVDDLPEDRRKLYNWQRRSMVLMKKL

SEQ ID NO: 16239 - DNA, 1332 bp, Shigella flexneri
  CDS (1)..(1332): transl_table=11
gtggtaaaggaacgtaaaaccgagctggtcgagggattccgccattcggttccctatatcaatacccaccggggaaaaacgtttgtcatcatgctcggcggtgaagccattgagcatgagaatttctccagtatcgttaatgatatcgggttgttgcacagcctcggcatccgtctggtggtggtctatggcgcacgtccgcagatcgacgcaaatctggctgcgcatcaccacgaaccgctgtatcacaagaatatacgtgtgaccgacgccaaaacactggaactggtgaagcaggctgcgggaacattgcaactggatattactgctcgcctgtcaatgagtctcaataacacgccgctgcagggcgcgcatatcaacgtcgttagtggcaattttattattgcccagccgctgggcgtcgatgacggcgtggattactgccatagcgggcgtatccggcggattgatgaagacgcgctccatcgtcaactggaaagcggtgcaatagtgctaatggggccggtcgctgtttcagtcactggcgagagctttaatctgacctcggaagagattgccactcaactagccatcaaactgaaagctgaaaagatgattggtttttgctcttcccagggcgttactaatgacgacggtgatattgtctccgaacttttccctaacgaagcgcaagcacgggtagaagcccaggaagagaaaggcgattacaactccggtacggtgcgctttttgcgtggcgcagtgaaagcctgccgcagcggcgtgcgccgctgtcatttaatcagttatcaggaagatggcgcgctgttgcaagagttgttctcacgcgacggtatcggtacgcagattgtgatggaaagcgccgagcagattcgtcgcgcaacaatcaacgatattggcggtattctggagttgattcgcccgctggagcagcaaggtattctggtgcgccgttctcgcgagcagctggagatggaaatcgacaaattcaccattattcagcgcgataacacgactattgcctgcgccgcgctctatccgttcccggaagagaagattggggaaatggcctgtgtggcagttcacccggattaccgcagttcatcacggggcgaggttctgctggaacgcattgccgctcaggcgaagcagagcggcttaagcaaattgtttgtgctgaccacgcgcagtattcactggttccaggaacgtggatttaccccggtggatattgatttactgcccgagagcaaaaagcagttgtacaactaccagcgtaaatccaaagtgttgatggcggatttagggtaa

SEQ ID NO: 16240 - protein, 443 aa, Shigella flexneri
MVKERKTELVEGFRHSVPYINTHRGKTFVIMLGGEAIEHENFSSIVNDIGLLHSLGIRLVVVYGARPQIDANLAAHHHEPLYHKNIRVTDAKTLELVKQAAGTLQLDITARLSMSLNNTPLQGAHINVVSGNFIIAQPLGVDDGVDYCHSGRIRRIDEDALHRQLESGAIVLMGPVAVSVTGESFNLTSEEIATQLAIKLKAEKMIGFCSSQGVTNDDGDIVSELFPNEAQARVEAQEEKGDYNSGTVRFLRGAVKACRSGVRRCHLISYQEDGALLQELFSRDGIGTQIVMESAEQIRRATINDIGGILELIRPLEQQGILVRRSREQLEMEIDKFTIIQRDNTTIACAALYPFPEEKIGEMACVAVHPDYRSSSRGEVLLERIAAQAKQSGLSKLFVLTTRSIHWFQERGFTPVDIDLLPESKKQLYNYQRKSKVLMADLG

SEQ ID NO: 16241 - DNA, 1731 bp, Oryza sativa
  CDS (1)..(1731)
atgccgatgcggcggcagtgcgccaggggcgtcgtcgtgcggtgcgcaggggcgggggcggggcggtcgttcggtggggcctcctgcgggggcgggggcgggggcgggggcggggcggaggatcaggaggaggaggggacgaggttcgtggggtggtttcgggaggcctggccctacgtccgtggccaccgggggagcaccttcgtcgtcgtcgtctccggtgaggtcgtcgccgggccccacctcgacggcattctccaggatatttcacttcttcatggtcttgggatcaaatttgttcttgttcctggaacacatgttcagattgataagctcctatctgagagagggaagaaggccaagtatgctggtcgttaccgtattactgattctgattcattagaggctgcaatggaggcagcaggcagaatacgcttaactatagaagcaaaactatcccctggtcccccaatgttgaatcttcgtcggcatggtgttaatggtcgttggcatgaaatatgtgataatgttgcaagtggaaactttcttggcgctaagagacggggggttgttggtggcattgattatggattcactggtgaagttaagaaaatagatgtttcacggataaaagaaagacttgatagagatagcatagttgttgtgagcaatatgggatattccagctctggcgaggtgttgaattgcaacacatatgaagtcgctacagcttgtgctttagctatcgaggcagacaagcttatctgcattgttgatggtcaaatatttgatgaacatggtcgagtcaatcgtttcatgtctattgaagaagcggacatgttgatcagaacacgtgctaagcagagtgagattgctgcaaattatgtcgaagttgtaggtgaggaggatattagttatgctcgcaatcttcctatcaaagaggagaaagaattaggattgattggaagggacttcgttgatgggtatactgcatctttccggaatggtgtgggtttcaataacggaaatggtctgtctggtgagcaagggtttgcaattggtggggaagagcggttgagtaggtcaaatggttacctttcagagttagcagcagcagcatatgtatgcaatggaggcgttcaaagggttcacattatagatggcactgttggcggatcattgttgttggaattattcacaagagatggtgttggaacgatgatagctagagacatgtatgaaggaacaaggatggctagagaagaagatctttctggtattagaaagatcatccgacccttagaagaatctggtgtcctagtgcggcgaacagataaagagcttctagaagcattgaagtcatttatcgtcgtggaaagagatggttcaatcattgcatgtgctgctctctttccatttcttgaggataaatctggggaagttgccgctattgctgtatctgaagaatgtcgaggacagggtcaaggggataagttacttgattacgtcgagaagaaggcattatcgcttggtcttgagaaaatattcttgctcaccacacgaacagcagactggtttgttcggcgtggcttcaaggagtgttcgattgagtccctgcctgcgcagaggagaaaacgaatcgatctttcacgtggatcaaaatattacatcaagcggctccgggcagcagagattgggcagatggctgttaacaattttgctgtcagatga

SEQ ID NO: 16242 - protein, 576 aa, Oryza sativa
MPMRRQCARGVVVRCAGAGAGRSFGGASCGGGGGGGGGAEDQEEEGTRFVGWFREAWPYVRGHRGSTFVVVVSGEVVAGPHLDGILQDISLLHGLGIKFVLVPGTHVQIDKLLSERGKKAKYAGRYRITDSDSLEAAMEAAGRIRLTIEAKLSPGPPMLNLRRHGVNGRWHEICDNVASGNFLGAKRRGVVGGIDYGFTGEVKKIDVSRIKERLDRDSIVVVSNMGYSSSGEVLNCNTYEVATACALAIEADKLICIVDGQIFDEHGRVNRFMSIEEADMLIRTRAKQSEIAANYVEVVGEEDISYARNLPIKEEKELGLIGRDFVDGYTASFRNGVGFNNGNGLSGEQGFAIGGEERLSRSNGYLSELAAAAYVCNGGVQRVHIIDGTVGGSLLLELFTRDGVGTMIARDMYEGTRMAREEDLSGIRKIIRPLEESGVLVRRTDKELLEALKSFIVVERDGSIIACAALFPFLEDKSGEVAAIAVSEECRGQGQGDKLLDYVEKKALSLGLEKIFLLTTRTADWFVRRGFKECSIESLPAQRRKRIDLSRGSKYYIKRLRAAEIGQMAVNNFAVR

SEQ ID NO: 16243 - DNA, 1776 bp, Oryza sativa
  CDS (1)..(1776)
atggcctcgccgtcgtcggtcgcctccgctcgcgccgccgccgaaggagcggcgacggtggctgctcggggtggcgccgagcccgcccgggccctgcggctgcctccggcgaacggggcgcggcgcggtgtccggtgctgctgcggggccgcgaatcccggcggcggtagcggtggcggtggcggcgcggtcgcgcgggaggagttcgtcgggttcttcagggaggcgtggccgtacatccggggccacagggggagcaccttcgtggtcgtcatctccagcgaggtcgtgtcagggccgcacttcgacggcattctgcaggatatttcacttcttcatggtttggggattcaatttgttcttgttcctggaacacatgtccaaattgataagctcttgtcagaaagagggaggatggctaagtatgttggccagtaccgagttactgattctgattcattagaggctgcaatggaggcagctggaagaatacgattaactattgaggccaagctttctcctggtcctccaatgttgaatcttcgtagacatggtgttattggacgttggcatggtcttgtggataatgttgcaagtggcaacttccttggtgctaagagaagaggagtagttagtggtattgattatgggttcaccggcgaggttaagaaaattgatgtttcacgaataaaagaaaggcttgatagtgatagcatagttgttgtgagcaatatgggatactcgagctcaggagaagtgctaaactgcaacacttatgaagtagctactgcgtgtgctttagccattgaggcggataagctgatctgcattgtagatggccagatatttgatgagcatggacgtgtcattcctttcatgtctcttgaggaagcagatatgttgatcagaaagcgtgctaagcaaagtgatatcgcagcaaattatgtcaaggttgtggacgaggagggtatcagtcatttgcatgaggatgtcaaaccatttttgaacggaagcggtcctcttggtgcatatgctgcttctttccataatggcttgggtttcaacaatggaaatggtattttatctggtgagcaaggatttgctattggtggtgaagagcggttaagtagatcaaatgcctatctttctgagttggcagcagcagcatttgtatgccatggtggtgttcaaagagttcatatcatagatggaacagttgatggatcactgctattagaattgtttacaagagatggtacaggaacaatgatagctagggatgtgtatgaaggaacaaggatagctagagaggaggatcttcttgggataagaaaaattcttcgaccactagaagaatctggtgttttggtgaagagaactgataaggagcttcttgaagcactggagtcgttctatgttgttgaaagggatggttcaatcattggatgtgctgctctgttcccatttcccgaagataaatctggagaagttgctgcgattgctgtatctgaagaatgccgaggaagaggtcaaggggacaagttgcttgactatattgagaaggcagcaatgtcccttggtctggagaaattattcttgctcacgacacggacagctgattggtttgtgcggcgtggcttcttggagtgttcgattgaatccattcctgagcaaaggagaaaacgcatcaatttatcacgaggatcaaagtattatataaagcagcttcagccaaagcacgccagtgttactcccaacaatattactgccagatga

SEQ ID NO: 16244 - protein, 591 aa, Oryza sativa
MASPSSVASARAAAEGAATVAARGGAEPARALRLPPANGARRGVRCCCGAANPGGGSGGGGGAVAREEFVGFFREAWPYIRGHRGSTFVVVISSEVVSGPHFDGILQDISLLHGLGIQFVLVPGTHVQIDKLLSERGRMAKYVGQYRVTDSDSLEAAMEAAGRIRLTIEAKLSPGPPMLNLRRHGVIGRWHGLVDNVASGNFLGAKRRGVVSGIDYGFTGEVKKIDVSRIKERLDSDSIVVVSNMGYSSSGEVLNCNTYEVATACALAIEADKLICIVDGQIFDEHGRVIPFMSLEEADMLIRKRAKQSDIAANYVKVVDEEGISHLHEDVKPFLNGSGPLGAYAASFHNGLGFNNGNGILSGEQGFAIGGEERLSRSNAYLSELAAAAFVCHGGVQRVHIIDGTVDGSLLLELFTRDGTGTMIARDVYEGTRIAREEDLLGIRKILRPLEESGVLVKRTDKELLEALESFYVVERDGSIIGCAALFPFPEDKSGEVAAIAVSEECRGRGQGDKLLDYIEKAAMSLGLEKLFLLTTRTADWFVRRGFLECSIESIPEQRRKRINLSRGSKYYIKQLQPKHASVTPNNITAR

SEQ ID NO: 16245 - DNA, 1824 bp, Glycine max
  CDS (1)..(1824)
atggcacgttccttatgcctatcccttccaaatacttccggaaccttgtctgatttcaacaaactatactcttcctctcattctcaccatttaccaaaaccgaacctgcaatttaactctagctggggcccagaggtgcggcccgtgacggcggcccatttgggtaaccgaaagaagcttaatgcgttgagcgaagatggagagagcagctaccatgggtcgatggaggataagcaattcgtgcgttcgtttcgcgaggcctggccttacttgtgggcctatcgtggtagcacctttgttgtcattatttccggtgaaattgtttctggccctttcttggatgtcattctcaaggatatagctttccttaatcacctaggaatccgctttgttcttgttccggggacacatgtgcagatagacaagcttctgaatgagagagggtgccagcctatgtatgttggtagatataggataactgatgatgaatctctggaagctgccatggaagcagctgggggcataagattgatgatagaagcaaaactttctcctggaccttccatatgcaacattcgccgtcatggtgacaatagtcgatggcacgaagttggtgtcagtgttgccagtggtaactttcttgcagccaagagaagaggggtggtcaatggaattgattttgggtcaactggggaagttaaaaaagtagacgtaactcgcatgcgtgagagacttgatggtggctgtgtagttgtattaaccaacttgggctattccagctctggagaagtattaaattgcaacacctatgaagttgccactgcttgtgccttggctataggggcagacaagctaatatgcataatagatggtccaatacttgatgagagtggacacctaattcgtttcttgcctcttcaagaagcagacatgctaattcgtaaacgggctaagcaaagtgatgcagctgctaactatgtgaaagctgttgacgaagaaggtttcaactctcttgagtgtaacaattttaatggaacagtcaaatcaccacctattggatgttttacagaatggcataatgcaaccttccataatggtgttggttttgagaatggaaatggcttagggtccggtgagcaaggttttgctattggaggtcaagagcggctaagtcgaatgaatggctacctgtcagaattggccgctgcagctttcgtttgcagaggtggtgttcaaagagttcacttgctggatggaactattagtggagttttgttgttggaattgtttaaaagagatgggatgggaacaatggtggctagtgacctttacgaaggcactcggacagcagaggtaaaagatatttctggaataaaacaacttattcatcctttggaggcatctggcatattggttaagcggactgatgaagagctgttaaaaacattggattcattcgttgttgtggaaagagaaggtcacataattgcttgtgctgccatttttcctcactttgaggagaagtgtggagaggttgcttgtattgcagtatctcctgattgtcgtggccaaggacagggtgacaaattgcttgattatatggagaagaaagcatcatctcttggatttaatatgcttttccttcttacaacacgtactgcagattggtttgtaaggcgtggattttcagaatgttcaattgattatattcctgaaaagaaaaggagaatgatcaatctttcccgcaattctaagtattatatgaagaagcttctgccaaatattagtggaattactgttggtgtaaaatctgcttcaagttag

SEQ ID NO: 16246 - protein, 607 aa, Glycine max
MARSLCLSLPNTSGTLSDFNKLYSSSHSHHLPKPNLQFNSSWGPEVRPVTAAHLGNRKKLNALSEDGESSYHGSMEDKQFVRSFREAWPYLWAYRGSTFVVIISGEIVSGPFLDVILKDIAFLNHLGIRFVLVPGTHVQIDKLLNERGCQPMYVGRYRITDDESLEAAMEAAGGIRLMIEAKLSPGPSICNIRRHGDNSRWHEVGVSVASGNFLAAKRRGVVNGIDFGSTGEVKKVDVTRMRERLDGGCVVVLTNLGYSSSGEVLNCNTYEVATACALAIGADKLICIIDGPILDESGHLIRFLPLQEADMLIRKRAKQSDAAANYVKAVDEEGFNSLECNNFNGTVKSPPIGCFTEWHNATFHNGVGFENGNGLGSGEQGFAIGGQERLSRMNGYLSELAAAAFVCRGGVQRVHLLDGTISGVLLLELFKRDGMGTMVASDLYEGTRTAEVKDISGIKQLIHPLEASGILVKRTDEELLKTLDSFVVVEREGHIIACAAIFPHFEEKCGEVACIAVSPDCRGQGQGDKLLDYMEKKASSLGFNMLFLLTTRTADWFVRRGFSECSIDYIPEKKRRMINLSRNSKYYMKKLLPNISGITVGVKSASS

SEQ ID NO: 16247 - DNA, 1773 bp, Brassica napus
  CDS (1)..(1773)
atgatggagcaggaagctttgttgcgttctgcgtcttttcaattacgccgaacgaggaacgatctttcgtctttcaagccggaaaataagttaaaccctggtcaaatccggtttaggtttaaaccggttggttccgtggaggcgaaatgcaatacgtacaacagctacgcggcgagtggaggcggcgacgcgggggctgagcatccagtggacgacaaagagttcgtgcgctggttccgtgaagcttggccttatctgtgggcccacggtggctgcactttcgtcgttgtcatctccggcgatatactcgccggcccttactgtgatcccattttaaaggacatagcgtttctccatcatcttgggataagattcgttctagttccaggaacacaagtgcaaatcgaccagcttctgtctgaaagaggacgcgaggctacatatgtgggacgttacagagtaacagacgcagcatcgttgcaagccgccacggaagctgcgggagctatctcagtgatgcttgaggctaaactatctcctggaccttccatttgcaatatccgtaggcatggtgatagtagtcgtttacatgatataggtgtcagggttgataccggcaacttctttgcagcaaaaaggagaggcgttgttgatggtgttgattttggagcgacaggtgaagtgaagaagatagatgtagaccggatttgtgagaggcttgacggtggttctgtagtcttgttgaggaacctgggccactcgagctccggagaagtcttaaattgcaatacctatgaggttgctacagcttgtgcattagctataggagcagacaagctaatctgcataatggacggtccaattcttgatgagagtggacatctgattagtttcttgacactccaagaagcagacacgttagtaagaaaacgggcacagcaaagcgacattgctgctaactacgtaaaagcagttggagatggaagcatcacttaccaagaacctcctggtaacgggagaccaccgttttggggaaacggaaaccacactccaatctttcaaaacggtgttggatttgacaatgggaacgggttagggtctggtgagcaaggctttgctattggtggtgaagagagactaagccgccaaaacggttatctctccgaactggctgctgctgcttttgtctgcaaagggggagtcaaaaaaactcacttgttggatgggactataactggagtcctattgttggagcttttcaaaagagatggaatggggactatggtcgctagtgatgtatacgaaggaacacgagacgccaaagtaaatgatctggcaggaatcagacgtatcatcaaaccttgggaggaagctgggatctgggtccgcagaaccgacgaggagttactccaagctttggactccttcgtggtagtcgaaagggaaggtcaaatcatcgcttgtgcagctctgttcccattcttccaagacaaatgcggagaagtcgcagccatcgcggttgcatcagactgccgcggtcaaggccaaggcgataaactactagattacatggagaagaaagcatcctctctcgggttagacacgctgtttctcctcacaacgcgagcagcagactggttcgtgagacgcgggttccaagaatgctcaatcgaggtcataccagagaccagaaggcaaagaatcaacctctcaagaaaatcaaagtactacatgaagaagctactacctgataagagtggcatctcaatataa

SEQ ID NO: 16248 - protein, 590 aa, Brassica napus
MMEQEALLRSASFQLRRTRNDLSSFKPENKLNPGQIRFRFKPVGSVEAKCNTYNSYAASGGGDAGAEHPVDDKEFVRWFREAWPYLWAHGGCTFVVVISGDILAGPYCDPILKDIAFLHHLGIRFVLVPGTQVQIDQLLSERGREATYVGRYRVTDAASLQAATEAAGAISVMLEAKLSPGPSICNIRRHGDSSRLHDIGVRVDTGNFFAAKRRGVVDGVDFGATGEVKKIDVDRICERLDGGSVVLLRNLGHSSSGEVLNCNTYEVATACALAIGADKLICIMDGPILDESGHLISFLTLQEADTLVRKRAQQSDIAANYVKAVGDGSITYQEPPGNGRPPFWGNGNHTPIFQNGVGFDNGNGLGSGEQGFAIGGEERLSRQNGYLSELAAAAFVCKGGVKKTHLLDGTITGVLLLELFKRDGMGTMVASDVYEGTRDAKVNDLAGIRRIIKPWEEAGIWVRRTDEELLQALDSFVVVEREGQIIACAALFPFFQDKCGEVAAIAVASDCRGQGQGDKLLDYMEKKASSLGLDTLFLLTTRAADWFVRRGFQECSIEVIPETRRQRINLSRKSKYYMKKLLPDKSGISI

SEQ ID NO: 16249 - DNA, 1794 bp, Zea mays
  CDS (1)..(1794)
atggcggcgtccctcgccgccgccgcctctcgcctcgccgccaccggcggcgagttgtcgtggtcggcgcggccctgccccgggagtctcgtggcgagcttccccagcgccgggcggctccggcgccccgcttcgggcgtgcggtgcggaggtggggttttgcccgcggccgcggggacgggggcggaagcggaggaagggggccgcttcgttggctggttccgggaggcgtggccttacatccggggccaccggggcagcaccttcgtcgtcgtcatctccggggaggtcatcgccggcccgcacctcgacggcattctgcaggatatatcccttcttcatggtctcgggatcaaatttgttcttgttcctggaacacatgtccagattgataagctcttggctgagagagggaagaaggctaagtatgctggtcgctaccgcattactgattcagattcattagatgctgcaatggaggcagctggccgaatacggctaactatagaagcgaagctgtctcctggaccaccaatgttaaatctccgtaggcatggtgttaatggccgttggcatgaaatctctgataatgttgcaagtggaaatttccttggtgctaagaggcgaggggttgttggtggcattgattatggattcaccggtgaagttaaaaaaatagatgtttcacggataagagaaaggcttgatagagacagcatagttgttgtgagcaacatggggtactccagcgcaggagaggtcttgaattgcaatacctatgaagttgctacagcatgtgctttatccatagaggcggacaagcttatttgcattgttgatggccaaatatttgatgagcatggtagagtcaatcgttttatgtctattgaagaagcagatatgttgatcagaacacgtgctaagcagagtgaaattgctgcaaattatgtgaaggttgttgatgaggaggacatcaatcatgtccgctgcctcccaatgaaacatggtacagaacatggtatgaatggaagggaccatattaatgggtatactgcatcttttcggaatggtgtgggtttcaatgatggaaatggtctgtctggtgagcaagggtttgctattggcggggaggagcgcttgagcaggtcaaatggttacctatcagagttagcagcggcagcatacgtatgccatggtggtgtccaaagagtgcatatcatagatggtactgttggtggagcattgttgctagaactattcactagagatggtgttggaacgatgatagctagggatatgtatgaaggaacaagaatggccagagaggaagatctttctggtattagaaagatcattcgtcctctagaagaatctggtgtcctggtgcgccgaacagatcaagagcttcttgaagcattgacatcatttattgtcgtggaaagagatggctcaatcatagcgtgtgctgccctcttcccttttcttgaggataaatctggggaagttgctgctattgctgtatctgaagaatgtcgaggccaaggtcaaggagacaaattacttgattacgttgagaagaaggctttgtcccttggacttgagaaactattcttgcttaccacaaggacagcggattggtttgttcgtcgcggctttaaggagtgctcgttcgattccctgcctttggtgaggagaaaacgtatcgacctctcgcgcgggtcaaaatattacatgaagtggctccaggcagcagaggttgggcatatggctgccgacggttttgccatgagatga

SEQ ID NO: 16250 - protein, 597 aa, Zea mays
MAASLAAAASRLAATGGELSWSARPCPGSLVASFPSAGRLRRPASGVRCGGGVLPAAAGTGAEAEEGGRFVGWFREAWPYIRGHRGSTFVVVISGEVIAGPHLDGILQDISLLHGLGIKFVLVPGTHVQIDKLLAERGKKAKYAGRYRITDSDSLDAAMEAAGRIRLTIEAKLSPGPPMLNLRRHGVNGRWHEISDNVASGNFLGAKRRGVVGGIDYGFTGEVKKIDVSRIRERLDRDSIVVVSNMGYSSAGEVLNCNTYEVATACALSIEADKLICIVDGQIFDEHGRVNRFMSIEEADMLIRTRAKQSEIAANYVKVVDEEDINHVRCLPMKHGTEHGMNGRDHINGYTASFRNGVGFNDGNGLSGEQGFAIGGEERLSRSNGYLSELAAAAYVCHGGVQRVHIIDGTVGGALLLELFTRDGVGTMIARDMYEGTRMAREEDLSGIRKIIRPLEESGVLVRRTDQELLEALTSFIVVERDGSIIACAALFPFLEDKSGEVAAIAVSEECRGQGQGDKLLDYVEKKALSLGLEKLFLLTTRTADWFVRRGFKECSFDSLPLVRRKRIDLSRGSKYYMKWLQAAEVGHMAADGFAMR

SEQ ID NO: 16251 - DNA, 23 bp, Artificial sequence
  primer
atggcaccttccttatgtctatc

SEQ ID NO: 16252 - DNA, 21 bp, Artificial sequence
  primer
ctaacttgaagcagattttac

SEQ ID NO: 16253 - protein, 556 aa, Artificial sequence
  consensus sequence
  Variant (2)..(4): Xaa in position 2 to 4 is any amino acid
  Variant (6)..(8): Xaa in position 6 to 8 is any amino acid
  Variant (11)..(14): Xaa in position 11 to 14 is any amino acid
  Variant (16)..(17): Xaa in position 16 to 17 is any amino acid
  Variant (21)..(24): Xaa in position 21 to 24 is any amino acid
  Variant (26)..(38): Xaa in position 26 to 38 is any amino acid
  Variant (39)..(49): Xaa in position 39 to 49 is any or no amino acid
  Variant (51)..(52): Xaa in position 51 to 52 is any amino acid
  Variant (55)..(56): Xaa in position 55 to 56 is any amino acid
  Variant (59)..(61): Xaa in position 59 to 61 is any amino acid
  Variant (63)..(63): Xaa in position 63 is any amino acid
  Variant (65)..(65): Xaa in position 65 is any amino acid
  Variant (67)..(69): Xaa in position 67 to 69 is any amino acid
  Variant (72)..(74): Xaa in position 72 to 74 is any amino acid
  Variant (76)..(87): Xaa in position 76 to 87 is any amino acid
  Variant (88)..(88): Xaa in position 88 is any or no amino acid
  Variant (90)..(90): Xaa in position 90 is any amino acid
  Variant (93)..(95): Xaa in position 93 to 95 is any amino acid
  Variant (97)..(101): Xaa in position 97 to 101 is any amino acid
  Variant (103)..(103): Xaa in position 103 is any amino acid
  Variant (105)..(109): Xaa in position 105 to 109 is any amino acid
  Variant (113)..(113): Xaa in position 113 is any amino acid
  Variant (116)..(125): Xaa in position 116 to 125 is any amino acid
  Variant (126)..(145): Xaa in position 126 to 145 is any or no amino acid
  Variant (147)..(148): Xaa in position 147 to 148 is any amino acid
  Variant (151)..(153): Xaa in position 151 to 153 is any amino acid
  Variant (155)..(157): Xaa in position 155 to 157 is any amino acid
  Variant (160)..(161): Xaa in position 160 to 161 is any amino acid
  Variant (163)..(163): Xaa in position 163 is any amino acid
  Variant (165)..(167): Xaa in position 165 to 167 is any amino acid
  Variant (170)..(170): Xaa in position 170 is any amino acid
  Variant (172)..(174): Xaa in position 172 to 174 is any amino acid
  Variant (176)..(182): Xaa in position 176 to 182 is any amino acid
  Variant (184)..(188): Xaa in position 184 to 188 is any amino acid
  Variant (190)..(194): Xaa in position 190 to 194 is any amino acid
  Variant (196)..(196): Xaa in position 196 is any amino acid
  Variant (198)..(199): Xaa in position 198 to 199 is any amino acid
  Variant (202)..(203): Xaa in position 202 to 203 is any amino acid
  Variant (205)..(208): Xaa in position 205 to 208 is any amino acid
  Variant (209)..(209): Xaa in position 209 is any or no amino acid
  Variant (212)..(214): Xaa in position 212 to 214 is any amino acid
  Variant (216)..(219): Xaa in position 216 to 219 is any amino acid
  Variant (221)..(221): Xaa in position 221 is any amino acid
  Variant (224)..(235): Xaa in position 224 to 235 is any amino acid
  Variant (236)..(241): Xaa in position 236 to 241 is any or no amino acid
  Variant (243)..(268): Xaa in position 243 to 268 is any amino acid
  Variant (269)..(349): Xaa in position 269 to 349 is any or no amino acid
  Variant (351)..(352): Xaa in position 351 to 352 is any amino acid
  Variant (354)..(356): Xaa in position 354 to 356 is any amino acid
  Variant (358)..(359): Xaa in position 358 to 359 is any amino acid
  Variant (362)..(362): Xaa in position 362 is any amino acid
  Variant (364)..(364): Xaa in position 364 is any amino acid
  Variant (366)..(372): Xaa in position 366 to 372 is any amino acid
  Variant (374)..(374): Xaa in position 374 is any amino acid
  Variant (377)..(377): Xaa in position 377 is any amino acid
  Variant (381)..(381): Xaa in position 381 is any amino acid
  Variant (385)..(385): Xaa in position 385 is any amino acid
  Variant (388)..(393): Xaa in position 388 to 393 is any amino acid
  Variant (394)..(394): Xaa in position 394 is any or no amino acid
  Variant (396)..(397): Xaa in position 396 to 397 is any amino acid
  Variant (399)..(399): Xaa in position 399 is any amino acid
  Variant (401)..(403): Xaa in position 401 to 403 is any amino acid
  Variant (405)..(406): Xaa in position 405 to 406 is any amino acid
  Variant (408)..(411): Xaa in position 408 to 411 is any amino acid
  Variant (413)..(413): Xaa in position 413 is any amino acid
  Variant (417)..(418): Xaa in position 417 to 418 is any amino acid
  Variant (420)..(420): Xaa in position 420 is any amino acid
  Variant (423)..(423): Xaa in position 423 is any amino acid
  Variant (425)..(428): Xaa in position 425 to 428 is any amino acid
  Variant (430)..(435): Xaa in position 430 to 435 is any amino acid
  Variant (436)..(437): Xaa in position 436 to 437 is any or no amino acid
  Variant (439)..(439): Xaa in position 439 is any amino acid
  Variant (441)..(441): Xaa in position 441 is any amino acid
  Variant (443)..(444): Xaa in position 443 to 444 is any amino acid
  Variant (446)..(449): Xaa in position 446 to 449 is any amino acid
  Variant (454)..(454): Xaa in position 454 is any amino acid
  Variant (456)..(461): Xaa in position 456 to 461 is any amino acid
  Variant (462)..(466): Xaa in position 462 to 466 is any or no amino acid
  Variant (468)..(468): Xaa in position 468 is any amino acid
  Variant (470)..(471): Xaa in position 470 to 471 is any amino acid
  Variant (474)..(477): Xaa in position 474 to 477 is any amino acid
  Variant (479)..(482): Xaa in position 479 to 482 is any amino acid
  Variant (484)..(485): Xaa in position 484 to 485 is any amino acid
  Variant (488)..(489): Xaa in position 488 to 489 is any amino acid
  Variant (490)..(496): Xaa in position 490 to 496 is any or no amino acid
  Variant (498)..(498): Xaa in position 498 is any amino acid
  Variant (499)..(499): Xaa in position 499 is any or no amino acid
  Variant (501)..(503): Xaa in position 501 to 503 is any amino acid
  Variant (504)..(504): Xaa in position 504 is any or no amino acid
  Variant (506)..(508): Xaa in position 506 to 508 is any amino acid
  Variant (511)..(511): Xaa in position 511 is any amino acid
  Variant (516)..(518): Xaa in position 516 to 518 is any amino acid
  Variant (521)..(522): Xaa in position 521 to 522 is any amino acid
  Variant (526)..(533): Xaa in position 526 to 533 is any amino acid
  Variant (535)..(541): Xaa in position 535 to 541 is any amino acid
  Variant (542)..(543): Xaa in position 542 to 543 is any or no amino acid
  Variant (545)..(546): Xaa in position 545 to 546 is any amino acid
  Variant (548)..(548): Xaa in position 548 is any amino acid
  Variant (550)..(553): Xaa in position 550 to 553 is any amino acid
  Variant (555)..(555): Xaa in position 555 is any amino acid
VXXXRXXXPYXXXXRXXTFVXXXXGXXXXXXXXXXXXXXXXXXXXXXXXDXXLLXXLGXXXVXVXGXXXQIXXXLXXXXXXXXXXXXXRXTDXXXLXXXXXAXGXXXXXIEAXLSXXXXXXXXXXXXXXXXXXXXXXXXXXXXXXVXXGNXXXAXXXGVXXGXDXXXTGXVXXXDXXXXXXXLXXXXXVXXXXXGXSXXGEXXNXXXXXVAXXXAXXXXAXKLXXXXXXXXXXXXXXXXXXGXXXXXXXXXXXXXXXXXXXXXXXXXXXXXXXXXXXXXXXXXXXXXXXXXXXXXXXXXXXXXXXXXXXXXXXXXXXXXXXXXXXXXXXXXXXXXXXXXXXXXXXXXXXLXXAXXXCXXGVXRXHXXXXXXXGXLLXELFXRDGXGTXXXXXXXEXXRXAXXXDXXGXXXXIXPLEXXGXLVXRXXXXLXXXXXXXXFXVXEXXGXXXXCAALXPXXXXXXXXXXXEXAXXAVXXXXRXXXXGXXLLXXXXXXXXXEXXAXXXXGXXXLFXLTTRXXXWFXXRGFXXXXXXXXPXXXXXXXXXNXXRXSXXXXKXL

SEQ ID NO: 16254 - protein, 57 aa, Artificial sequence
  protein pattern
  Variant (3)..(3): Xaa in position 3 is any amino acid
  Variant (4)..(4): Xaa in position 4 is Phe, Ile, Leu or Val
  Variant (5)..(5): Xaa in position 5 is any amino acid
  Variant (7)..(9): Xaa in position 7 to 9 is any amino acid
  Variant (11)..(11): Xaa in position 11 is any or no amino acid
  Variant (13)..(13): Xaa in position 13 is any amino acid
  Variant (14)..(14): Xaa in position 14 is any or no amino acid
  Variant (16)..(16): Xaa in position 16 is any amino acid
  Variant (18)..(20): Xaa in position 18 to 20 is any amino acid
  Variant (21)..(21): Xaa in position 21 is Ser or Thr
  Variant (23)..(23): Xaa in position 23 is any amino acid
  Variant (24)..(24): Xaa in position 24 is Ile or Val
  Variant (25)..(26): Xaa in position 25 to 26 is any amino acid
  Variant (27)..(27): Xaa in position 27 is Ile or Val
  Variant (29)..(31): Xaa in position 29 to 31 is any amino acid
  Variant (32)..(32): Xaa in position 32 is Ile, Leu, Met or Val
  Variant (33)..(35): Xaa in position 33 to 35 is any amino acid
  Variant (37)..(37): Xaa in position 37 is Ala, Asp, Glu, Asn or Ser
  Variant (38)..(40): Xaa in position 38 to 40 is any amino acid
  Variant (41)..(41): Xaa in position 41 is Ile, Leu, Met or Val
  Variant (42)..(42): Xaa in position 42 is Thr or Val
  Variant (43)..(43): Xaa in position 43 is Leu or Val
  Variant (44)..(44): Xaa in position 44 is Ile, Leu, Met or Val
  Variant (45)..(45): Xaa in position 45 is any amino acid
  Variant (46)..(46): Xaa in position 46 is Asn, Pro or Ser
  Variant (47)..(47): Xaa in position 47 is Ile, Leu, Met or Val
  Variant (48)..(48): Xaa in position 48 is Ala or Gly
  Variant (49)..(49): Xaa in position 49 is any amino acid
  Variant (50)..(50): Xaa in position 50 is Asn or Ser
  Variant (51)..(51): Xaa in position 51 is any amino acid
  Variant (52)..(52): Xaa in position 52 is Ala, Ser or Thr
  Variant (54)..(54): Xaa in position 54 is Asp, Glu or Gln
  Variant (55)..(55): Xaa in position 55 is any amino acid
  Variant (56)..(56): Xaa in position 56 is Phe or Leu
GNXXXAXXXGXVXXGXDXXXXGXXXXXDXXXXXXXLXXXXXXXXXXXXXXXXGXXXN

SEQ ID NO: 16255 - protein, 28 aa, Artificial sequence
  protein pattern
  Variant (2)..(4): Xaa in position 2 to 4 is any amino acid
  Variant (6)..(6): Xaa in position 6 is any amino acid
  Variant (7)..(7): Xaa in position 7 is Ala, Ser or Val
  Variant (8)..(8): Xaa in position 8 is any amino acid
  Variant (11)..(11): Xaa in position 11 is Ile, Leu or Val
  Variant (12)..(13): Xaa in position 12 to 13 is any amino acid
  Variant (14)..(14): Xaa in position 14 is Phe, His or Tyr
  Variant (16)..(16): Xaa in position 16 is Asp, Gly or Asn
  Variant (17)..(17): Xaa in position 17 is any amino acid
  Variant (21)..(21): Xaa in position 21 is Ile or Val
  Variant (22)..(22): Xaa in position 22 is any amino acid
  Variant (23)..(23): Xaa in position 23 is Phe, Ile, Leu or Val
  Variant (24)..(24): Xaa in position 24 is Asp, Gly, Pro or Ser
  Variant (25)..(25): Xaa in position 25 is Gly or Ser
  Variant (26)..(27): Xaa in position 26 to 27 is any amino acid
  Variant (28)..(28): Xaa in position 28 is Ala, Ile, Leu or Val
VXXXRXXXPYXXXXRXXTFVXXXXXXXX

SEQ ID NO: 16256 - protein, 24 aa, Artificial sequence
  protein pattern
  Variant (2)..(2): Xaa in position 2 is any or no amino acid
  Variant (6)..(6): Xaa in position 6 is Ala, Ser or Thr
  Variant (7)..(7): Xaa in position 7 is any amino acid
  Variant (8)..(8): Xaa in position 8 is Asp or His
  Variant (11)..(11): Xaa in position 11 is any amino acid
  Variant (12)..(12): Xaa in position 12 is Glu, Lys or Arg
  Variant (13)..(13): Xaa in position 13 is His or Arg
  Variant (16)..(18): Xaa in position 16 to 18 is any amino acid
  Variant (19)..(19): Xaa in position 19 is Ala, Asp, Gly, Asn, Pro, Ser or Thr
  Variant (20)..(20): Xaa in position 20 is any amino acid
  Variant (21)..(21): Xaa in position 21 is Ala, Asp or Glu
  Variant (22)..(22): Xaa in position 22 is any amino acid
  Variant (23)..(23): Xaa in position 23 is Ile or Leu
LXTTRXXXWFXXXGFXXXXXXXXP

SEQ ID NO: 16257 - protein, 29 aa, Artificial sequence
  protein pattern
  Variant (3)..(3): Xaa in position 3 is any or no amino acid
  Variant (5)..(5): Xaa in position 5 is any amino acid
  Variant (6)..(6): Xaa in position 6 is any or no amino acid
  Variant (8)..(9): Xaa in position 8 to 9 is Ile, Leu or Val
  Variant (10)..(10): Xaa in position 10 is Asp, Gly or Ser
  Variant (11)..(13): Xaa in position 11 to 13 is any amino acid
  Variant (14)..(14): Xaa in position 14 is Asp, Gly, Asn, Ser or Thr
  Variant (16)..(16): Xaa in position 16 is Ala, Gly, Ser or Val
  Variant (19)..(19): Xaa in position 19 is any amino acid
  Variant (21)..(21): Xaa in position 21 is Phe or Leu
  Variant (22)..(22): Xaa in position 22 is Phe or Tyr
  Variant (23)..(23): Xaa in position 23 is any amino acid
  Variant (24)..(24): Xaa in position 24 is His or Arg
  Variant (25)..(25): Xaa in position 25 is Ala, Asp, Glu, Gly or Thr
  Variant (27)..(27): Xaa in position 27 is any amino acid
  Variant (29)..(29): Xaa in position 29 is Cys or Thr
GVXRXXHXXXXXXXGXLLXEXXXXXGXGX

SEQ ID NO: 16258 - protein, 27 aa, Artificial sequence
  protein pattern
  Variant (2)..(2): Xaa in position 2 is any amino acid
  Variant (4)..(5): Xaa in position 4 to 5 is any amino acid
  Variant (6)..(6): Xaa in position 6 is Asp, Glu, Gly, Asn, Gln or Ser
  Variant (8)..(8): Xaa in position 8 is Ile, Leu or Val
  Variant (9)..(9): Xaa in position 9 is any amino acid
  Variant (11)..(11): Xaa in position 11 is Ile, Leu or Val
  Variant (12)..(13): Xaa in position 12 to 13 is any amino acid
  Variant (14)..(15): Xaa in position 14 to 15 is Ile or Leu
  Variant (16)..(16): Xaa in position 16 is any amino acid
  Variant (20)..(20): Xaa in position 20 is any amino acid
  Variant (21)..(21): Xaa in position 21 is Ala, Asp, Glu, Gln, Ser or Thr
  Variant (23)..(23): Xaa in position 23 is any amino acid
  Variant (26)..(26): Xaa in position 26 is any amino acid
RXAXXXDXXGXXXXXXPLEXXGXLVXR

SEQ ID NO: 16259 - protein, 26 aa, Artificial sequence
  protein pattern
  Variant (2)..(2): Xaa in position 2 is Ile, Leu or Val
  Variant (3)..(3): Xaa in position 3 is Ala, Gly, Asn, Ser or Val
  Variant (4)..(4): Xaa in position 4 is Phe or Leu
  Variant (6)..(7): Xaa in position 6 to 7 is any amino acid
  Variant (8)..(8): Xaa in position 8 is Leu or Met
  Variant (10)..(11): Xaa in position 10 to 11 is any amino acid
  Variant (12)..(12): Xaa in position 12 is Phe, Ile, Leu or Val
  Variant (14)..(14): Xaa in position 14 is Ile, Leu or Val
  Variant (16)..(16): Xaa in position 16 is any amino acid
  Variant (18)..(18): Xaa in position 18 is Ala, Ser, Thr or Val
  Variant (19)..(20): Xaa in position 19 to 20 is any amino acid
  Variant (22)..(22): Xaa in position 22 is Ile or Val
  Variant (23)..(23): Xaa in position 23 is Asp, Glu or Asn
  Variant (24)..(25): Xaa in position 24 to 25 is any amino acid
DXXXLXXXGXXXVXVXGXXXQXXXXL

SEQ ID NO: 16260 - protein, 18 aa, Artificial sequence
  protein pattern
  Variant (2)..(2): Xaa in position 2 is any amino acid
  Variant (3)..(3): Xaa in position 3 is Ile or Val
  Variant (4)..(6): Xaa in position 4 to 6 is any amino acid
  Variant (7)..(7): Xaa in position 7 is Asp or Glu
  Variant (8)..(8): Xaa in position 8 is Glu, Gly or Asn
  Variant (9)..(11): Xaa in position 9 to 11 is any amino acid
  Variant (12)..(12): Xaa in position 12 is Ala or Gly
  Variant (17)..(17): Xaa in position 17 is Phe or Tyr
  Variant (18)..(18): Xaa in position 18 is Glu, Pro or Gln
FXXXXXXXXXXXCAALXX

SEQ ID NO: 16261 - protein, 26 aa, Artificial sequence
  protein pattern
  Variant (2)..(2): Xaa in position 2 is any or no amino acid
  Variant (4)..(5): Xaa in position 4 to 5 is any amino acid
  Variant (6)..(6): Xaa in position 6 is any or no amino acid
  Variant (8)..(9): Xaa in position 8 to 9 is any amino acid
  Variant (10)..(10): Xaa in position 10 is Ala or Val
  Variant (11)..(11): Xaa in position 11 is any amino acid
  Variant (12)..(12): Xaa in position 12 is Asp, Glu or Gln
  Variant (14)..(14): Xaa in position 14 is Ala, Ser, Thr or Val
  Variant (16)..(16): Xaa in position 16 is any amino acid
  Variant (17)..(17): Xaa in position 17 is Ile, Leu or Val
  Variant (18)..(20): Xaa in position 18 to 20 is any amino acid
  Variant (21)..(21): Xaa in position 21 is Ile or Leu
  Variant (22)..(22): Xaa in position 22 is Glu or Thr
  Variant (24)..(24): Xaa in position 24 is any amino acid
  Variant (25)..(25): Xaa in position 25 is Phe, Ile or Leu
  Variant (26)..(26): Xaa in position 26 is Ser or Thr
TXDXXXLXXXXXAXGXXXXXXXAXXX

SEQ ID NO: 16262 - protein, 18 aa, Artificial sequence
  protein pattern
  Variant (3)..(4): Xaa in position 3 to 4 is any or no amino acid
  Variant (6)..(7): Xaa in position 6 to 7 is any amino acid
  Variant (9)..(9): Xaa in position 9 is any amino acid
  Variant (10)..(11): Xaa in position 10 to 11 is any or no amino acid
  Variant (13)..(13): Xaa in position 13 is Asp, Glu or His
  Variant (15)..(15): Xaa in position 15 is Leu or Met
  Variant (16)..(16): Xaa in position 16 is Ile or Leu
  Variant (17)..(17): Xaa in position 17 is any amino acid
  Variant (18)..(18): Xaa in position 18 is Phe, Ile, Leu, Met or Val
ATXXAXXLXXXAXKXXXX

SEQ ID NO: 16263 - DNA, 1509 bp, Glycine max; identical to SEQ ID NO: 8879
  CDS (1)..(1509)

SEQ ID NO: 16264 - protein, 502 aa, Glycine max; identical to SEQ ID NO: 8880

SEQ ID NO: 16265 - DNA, 2347 bp, Oryza sativa; identical to SEQ ID NO: 15534
  CDS (116)..(1648)

SEQ ID NO: 16266 - protein, 510 aa, Oryza sativa; identical to SEQ ID NO: 15535

SEQ ID NO: 16267 - DNA, 1712 bp, Glycine max; identical to SEQ ID NO: 15536
  CDS (25)..(1533)

SEQ ID NO: 16268 - protein, 502 aa, Glycine max; identical to SEQ ID NO: 15537

SEQ ID NO: 16269 - DNA, 1984 bp, Sorghum bicolor; identical to SEQ ID NO: 15538
  CDS (202)..(1710)

SEQ ID NO: 16270 - protein, 502 aa, Sorghum bicolor; identical to SEQ ID NO: 15539

SEQ ID NO: 16271 - DNA, 1898 bp, Zea mays subsp. mays
  CDS (70)..(1653)
gaggcgatcgcatcggagactcggagccggcaaaaccctaaggggaaggtttctgcaaggaggagggagatgcagggcgccagccacatgctcctggaggagcccttccgcctcgcctccgtcctctcccccgccaagcctaaagtattcccatcactcaccaagatagttgggacgctcgggcccaattcacactcggttgagattattcaggaatgcctcactgctggaatgtcagttgcacgatttgatttctcatggatggatgctgcgtatcaccaggagacccttgataatttgaggaaagcggcacagaatgtgaagaagttgtgccctgtaatgttggatactcttggtccagaaattcaggttcacaattccactggtgagccaattgagttgaaagctgggaatcatgttatcataactccagatatttctaaagctctctctgctgagatcctaccaattaagtttggtgatctggcaaaagctgtgaagaagggtgatactctttttatgggccaatatctcttcacaggaagtgaaacaacatctgtctggctagaagttgtggaaacttctggggaaaatgtaaattgtctagtgaagaatgcagctacacttgccggccccatattcactctgcatgcttcacaagttcacatcaatttgcccactttgagtgaatatgataaacatgtcatttcaacttggggttcatgtaacagtgttgacattatatcactttcccatacccgctctgctgaagatgtcagggagctcagggcctttttacaagcacacgcccttcctgacacacaaatatacgcgaagattgaaaattctgagggtttggataattttgatgacattctcaacgcggcagatggtatcattatttctcgaggagacctgggtattgaccttcctccagaaaacgttttcatgttccaaaagacagctattcataaatgcaatctggagggtaaacctgtgatcatcactagagttgtggacagcatgattgacaatctacgccctacccgtgcagaggcaactgatgttgcaaatgctgtcctagatggcactgatggcattttgcttggtgcggagacacttcgagggctttatcctgttgatgcagtgagtactgtggggagaatatgtgcagaagctgagactgtgtataatcagccgcttcaattcaagaaagtaatgtggcatgtaggtgacccaatgccccacgaggaatctgtggcatcagcagcggttggttctgcaatcaaagtaaaagctgctgccattgttgtgttcacattctcagggagagctgcgaggttagttgccaagtataggccaacaatgccaattttagcagttatcttcccacgtcaaggatccgatccatcaaagtggcgttcttatggcacaacacaggcaagacaatgtttcgcagtgagaggcgtgtaccctttgatggggagtactgatgaggccgaaactggtgggctaacaaaggaagagtatgggataaaacttgcgatgagctatggtcggtcggtcggcatagtgaagcctttcgacagggtgataatctttgaaaagattggtgattcttctgttgtcaagatcattgagtgtgaaggttaggcattagatgattgatacctacaaggctacaacccatgctgtagtttcatgtatcgcatgggagattacctccagttccatctcacttatttaaccaacaagtagagtacagcaagagcacaagatatcttgttagggaattttgccctcttttcagattgtcttttgatttgacgcaataaattatgatgtcacagatttatactggaattatgatttgattatgcaaatataggattgttggc

SEQ ID NO: 16272 - protein, 527 aa, Zea mays subsp. mays
MQGASHMLLEEPFRLASVLSPAKPKVFPSLTKIVGTLGPNSHSVEIIQECLTAGMSVARFDFSWMDAAYHQETLDNLRKAAQNVKKLCPVMLDTLGPEIQVHNSTGEPIELKAGNHVIITPDISKALSAEILPIKFGDLAKAVKKGDTLFMGQYLFTGSETTSVWLEVVETSGENVNCLVKNAATLAGPIFTLHASQVHINLPTLSEYDKHVISTWGSCNSVDIISLSHTRSAEDVRELRAFLQAHALPDTQIYAKIENSEGLDNFDDILNAADGIIISRGDLGIDLPPENVFMFQKTAIHKCNLEGKPVIITRVVDSMIDNLRPTRAEATDVANAVLDGTDGILLGAETLRGLYPVDAVSTVGRICAEAETVYNQPLQFKKVMWHVGDPMPHEESVASAAVGSAIKVKAAAIVVFTFSGRAARLVAKYRPTMPILAVIFPRQGSDPSKWRSYGTTQARQCFAVRGVYPLMGSTDEAETGGLTKEEYGIKLAMSYGRSVGIVKPFDRVIIFEKIGDSSVVKIIECEG

SEQ ID NO: 16273 - DNA, 1898 bp, Zea mays subsp. mays; identical to SEQ ID NO: 16271
  CDS (88)..(1653)

SEQ ID NO: 16274 - protein, 521 aa, Zea mays subsp. mays
MLLEEPFRLASVLSPAKPKVFPSLTKIVGTLGPNSHSVEIIQECLTAGMSVARFDFSWMDAAYHQETLDNLRKAAQNVKKLCPVMLDTLGPEIQVHNSTGEPIELKAGNHVIITPDISKALSAEILPIKFGDLAKAVKKGDTLFMGQYLFTGSETTSVWLEVVETSGENVNCLVKNAATLAGPIFTLHASQVHINLPTLSEYDKHVISTWGSCNSVDIISLSHTRSAEDVRELRAFLQAHALPDTQIYAKIENSEGLDNFDDILNAADGIIISRGDLGIDLPPENVFMFQKTAIHKCNLEGKPVIITRVVDSMIDNLRPTRAEATDVANAVLDGTDGILLGAETLRGLYPVDAVSTVGRICAEAETVYNQPLQFKKVMWHVGDPMPHEESVASAAVGSAIKVKAAAIVVFTFSGRAARLVAKYRPTMPILAVIFPRQGSDPSKWRSYGTTQARQCFAVRGVYPLMGSTDEAETGGLTKEEYGIKLAMSYGRSVGIVKPFDRVIIFEKIGDSSVVKIIECEG

SEQ ID NO: 16275 - DNA, 1875 bp, Triticum aestivum; identical to SEQ ID NO: 15546
  CDS (86)..(1630)

SEQ ID NO: 16276 - protein, 514 aa, Triticum aestivum
MANIDMAAVLADMDRDAAADARTPRTKLVCTLGPASRSVPMLEKLLRAGMNVARFNFSHGTHEYHKETLDALRQAMHNTGILCAVMLDTKGPEIRTGFLKDGKPIKLTKGQEITVSTDYDIKGDTNTISMSYKKLPQDVKPGHVILCADGTISLSVLSCDPAAGTVRCRCENTAMLGERKNCNLPGIVVDLPTLTEKDKEDILGWGVPNDIDMIALSFVRKGSDLVTVRQLLGQHAKRIKLMSKVENQEGIVNFDDILRETDAFMVARGDLGMEIPVEKIFLAQKMMIYKCNLAGKPVVTATQMLESMIKSPRPTRAEATDVANAVLDGTDCVMLSGESAAGAYPEVAVKIMARICVEAESSLDNDAVFKEMIKAAPLPMSPLESLASSAVRTANKARATLIVVLTRGGTTAKLVAKYRPRVPILSVVVPVLTTDSFDWTVSSEGPARHSLIYRGLIPLLAEGSAKATDSESTEEILQAALKSAVKKQLCKAGDAVVVLHRIGVASVIKICTVK

SEQ ID NO: 16277 - DNA, 1875 bp, Triticum aestivum; identical to SEQ ID NO: 15546
  CDS (101)..(1630)

SEQ ID NO: 16278 - protein, 509 aa, Triticum aestivum; identical to SEQ ID NO: 15547

SEQ ID NO: 16279 - DNA, 1953 bp, Triticum aestivum; identical to SEQ ID NO: 15548
  CDS (152)..(1693)

SEQ ID NO: 16280 - protein, 513 aa, Triticum aestivum; identical to SEQ ID NO: 15549

SEQ ID NO: 16281 - DNA, 1953 bp, Triticum aestivum; identical to SEQ ID NO: 15548
  CDS (209)..(1693)

SEQ ID NO: 16282 - protein, 494 aa, Triticum aestivum; identical to SEQ ID NO: 15551

SEQ ID NO: 16283 - DNA, 1896 bp, Triticum aestivum
  CDS (80)..(1672)
atcgcgtcacatccgagggaggcaaaaccctaggcagatccctcccgaagcctaccgcgaccttccgcccccggaggagatgcagggcggcaaccacatgctcctcgaggagcccgtccgcctcgcctccgtcctcgcccccgccaagcccaaagttttcccatccctcactaagattgttgggacgcttgggcccaactcgcactcagtcgaagtgattgaagaatgtctcactgctgggatgtcagttgcgcggtttgatttctcttggaaggatgctacttatcatcaggagaccctcgacaatctgaggaaagcggcacagaatgtgaagaagttatgtcctataatgctggatacagtgggtccagaaattcaggttcacaattcaactggtggagcaatcgagttgataggggggaatcatgtcacaataacaccagatctttctaaagctccttcggctgatatcctaccaattaaatttggcgatcttgcaaaagttgtgaagaagggtgatactcttttcattggtcaatatcttttcacaggaagtgaaacaacatctctatggcttgaagttacggagacttctggtgcagaagtgatttgttacgtgaagaacacagctacactgtcagggcccattttcactctgcatgtttcacaagtacatatcagtatgcccactttgagtgaatatgataaacaggtcatatcaacgtgggggctgcaaaacagtgttgacattatatcgctttcccatacccgctcttctgaagatgtcagggagcttagagcctttttaaaatctcatgatcttcaagacacacagatatatgcgaaggttgaaaatgctgagggtttggagcattttgatgaaattctccaagaggcggatggtatcatcatatcgcgaggagacctgggaattgacctcccaccagagagggtgttcatgtcccaaaagactggtattcataaatgcaacatggccggcaaacctgtgatcattactagagttgtggacagcatgattgacaatctgcgccctactcgcgcagaagctactgatgttgcaaatgctgtcctagatggaactgatggcattttgctcggtgcggagacacttcgagggcagtatcctgttgacgctgtgcgtactgtgggcagaatatgtgcagaagctgagaccgtgtataaccagtcacttcacttcaagaaagtagtgaggcatgtaggtgaaccaatggtccatgaagaatctgtggcatcatcagcggttcgttctgcaatgaaggtaaaagctgctgcaattgttgtgttcaccttctcggggagagctgctaggttaattgctaaatacagggccccaatgccagttttagcagttgtgttcccgcgtgagggctctgatccatcgaagtggcgttcttatggcacgacacaggcgaggcaatgtttttctgtgagaggtgtctaccctttgatggggagtactgacgatgctgaaactggtgggctcaccaaggaagaatacgggataaaacttgcactgaactatggccggtcagtaggcataataaagccatacgacagggtgattatttttgaaaagatcggtgattcctctgttgtcaagatcatcgagtgcgacgattctgaaagatgaatgacccttctcaggcaacagtttcaactatacgcctgagattgcctcctctttttgttctccattcactttgaccagagataaaagagtagtatagcacgacaaggttgtcatgtttagcaccttggtattttagatttacatacttgttgccctaataaagtgaagagagctcattcactcaaacatccaagttttggacaaaattataggattgttgagat

SEQ ID NO: 16284 - protein, 530 aa, Triticum aestivum
MQGGNHMLLEEPVRLASVLAPAKPKVFPSLTKIVGTLGPNSHSVEVIEECLTAGMSVARFDFSWKDATYHQETLDNLRKAAQNVKKLCPIMLDTVGPEIQVHNSTGGAIELIGGNHVTITPDLSKAPSADILPIKFGDLAKVVKKGDTLFIGQYLFTGSETTSLWLEVTETSGAEVICYVKNTATLSGPIFTLHVSQVHISMPTLSEYDKQVISTWGLQNSVDIISLSHTRSSEDVRELRAFLKSHDLQDTQIYAKVENAEGLEHFDEILQEADGIIISRGDLGIDLPPERVFMSQKTGIHKCNMAGKPVIITRVVDSMIDNLRPTRAEATDVANAVLDGTDGILLGAETLRGQYPVDAVRTVGRICAEAETVYNQSLHFKKVVRHVGEPMVHEESVASSAVRSAMKVKAAAIVVFTFSGRAARLIAKYRAPMPVLAVVFPREGSDPSKWRSYGTTQARQCFSVRGVYPLMGSTDDAETGGLTKEEYGIKLALNYGRSVGIIKPYDRVIIFEKIGDSSVVKIIECDDSER

SEQ ID NO: 16285 - DNA, 1896 bp, Triticum aestivum; identical to SEQ ID NO: 16283
  CDS (98)..(1672)

SEQ ID NO: 16286 - protein, 524 aa, Triticum aestivum
MLLEEPVRLASVLAPAKPKVFPSLTKIVGTLGPNSHSVEVIEECLTAGMSVARFDFSWKDATYHQETLDNLRKAAQNVKKLCPIMLDTVGPEIQVHNSTGGAIELIGGNHVTITPDLSKAPSADILPIKFGDLAKVVKKGDTLFIGQYLFTGSETTSLWLEVTETSGAEVICYVKNTATLSGPIFTLHVSQVHISMPTLSEYDKQVISTWGLQNSVDIISLSHTRSSEDVRELRAFLKSHDLQDTQIYAKVENAEGLEHFDEILQEADGIIISRGDLGIDLPPERVFMSQKTGIHKCNMAGKPVIITRVVDSMIDNLRPTRAEATDVANAVLDGTDGILLGAETLRGQYPVDAVRTVGRICAEAETVYNQSLHFKKVVRHVGEPMVHEESVASSAVRSAMKVKAAAIVVFTFSGRAARLIAKYRAPMPVLAVVFPREGSDPSKWRSYGTTQARQCFSVRGVYPLMGSTDDAETGGLTKEEYGIKLALNYGRSVGIIKPYDRVIIFEKIGDSSVVKIIECDDSER

SEQ ID NO: 16287 - DNA, 1958 bp, Triticum aestivum; identical to SEQ ID NO: 15552
  CDS (135)..(1718)

SEQ ID NO: 16288 - protein, 527 aa, Triticum aestivum; identical to SEQ ID NO: 15553

SEQ ID NO: 16289 - DNA, 1958 bp, Triticum aestivum; identical to SEQ ID NO: 15552
  CDS (174)..(1718)

SEQ ID NO: 16290 - protein, 514 aa, Triticum aestivum; identical to SEQ ID NO: 15555

SEQ ID NO: 16291 - DNA, 1958 bp, Triticum aestivum; identical to SEQ ID NO: 15552
  CDS (219)..(1718)

SEQ ID NO: 16292 - protein, 499 aa, Triticum aestivum; identical to SEQ ID NO: 15557

SEQ ID NO: 16293 - DNA, 1524 bp, Oryza sativa; identical to SEQ ID NO: 15558
  CDS (1)..(1524)

SEQ ID NO: 16294 - protein, 507 aa, Oryza sativa; identical to SEQ ID NO: 15559

SEQ ID NO: 16295 - DNA, 1883 bp, Brassica napus; identical to SEQ ID NO: 15560
  CDS (119)..(1651)

SEQ ID NO: 16296 - protein, 510 aa, Brassica napus; identical to SEQ ID NO: 8816

SEQ ID NO: 16297 - DNA, 1911 bp, Brassica napus; identical to SEQ ID NO: 15562
  CDS (85)..(1668)

SEQ ID NO: 16298 - protein, 527 aa, Brassica napus; identical to SEQ ID NO: 8820

SEQ ID NO: 16299 - DNA, 1930 bp, Brassica napus; identical to SEQ ID NO: 15564
  CDS (109)..(1692)

SEQ ID NO: 16300 - protein, 527 aa, Brassica napus; identical to SEQ ID NO: 8822

SEQ ID NO: 16301 - DNA, 1903 bp, Brassica napus
  CDS (122)..(1618)
ttccctagtccccaaggcccaagccagatctctctctctctctctataaatctctctcggtctctactaccatctctgatccaacctatttccccattgaactcgctgttttcttccaaagatggcgatgatagagcaaaggccgaagacgaagatcgtgtgtaccgttggtcccgcttccagatccgttgagatggtcgagaagcttctcagggctggcatgaacgtcgctaggtttaacttctctcacggatctcatgagtaccaccaggagactctcgataatctccgtcaagctatgctcaacactggtatcctctgcgccgtcatgctcgataccaagggtccagagatccgaaccggattcttgaaagatgggaaaccaatccagttgaaacaaggccaagagatcaccatctccactgactacgacttgcagggagacgaggaaacaatctgcatgagctacaagaagttggctgaggatgtgaacccagggatggttatcctctgtgctgacggtacaatctcgttactggtcctctcctgtgacacagagaacggcacagtccgttgccgctgcgagaactctgccatgcttggtgagaggaagaacgttaatctcccaggtgttgttgtggacctcccaactctaactgagaaagacaaagaagacatcatgaagtggggagtcccgaatcagatcgatatgatcactttgtcttttgtcagaaaaggttcggacttggttcaggtcaggaaactgttaggagatcatgccaagaacattcttctcatgtcaaaggttgagaaccaagaaggtgtggcgaacttcgatgacattcttgtcaactccgacgcgtttatgattgcaagaggagatctcggcatggagatcccaatcgagaagatcttcctagctcagaaagtgatgatctacaaatgcaacatccagggaaaaccagtggtcacagcgactcagatgctcgagtccatgatcaaatcccctcgacccacaagagctgaagccactgacgtagcaaacgcagtcctcgacggcaccgactgtgtcatgctcagcggagaaaccgcagctggagcttaccctgagctagctgtacgcacgatggccaagatctgcgttgaagccgagagcacgcttgactacggagacgtcttcaagaggatcatgcagtactctccggttccaatgtccccgctggagtcactggcctcctctgcagtcagaacagctaactcggctagagccacgctcatcatggtcctaaccaggggaggaagcacggcgaggcttgtggctaaatacagaccagggatgcctattttgtcagtcgttgttcccgagatgaaaacagacttctttgactggtcttgcagcgacgaatcgccggcgaggcacagtctcatcttccgtgggttgattccggtgctgtacgcagggtctgctagagcctcgcatgatgagtccacagaagaagctattgagtttgcgactcagcatgggaaagagaagcagctgtgtaagactggagactctgttgttgctctgctccgagttggtaatgcttctctaatcaagatcttgaccgtcaagtgatgattgatgattcacgatctttaaaaaggagtcccgtttttggcgtttggcggttgggggaaacgcaactataatcggtttttgttatgaattttttttattcaagattgtgattacatatcttgagataggaaactcaagttctctttcttgctaattacaactactgtggtgaccagtgaatccacttacggctctcttttgttttggattattggttgtatggaactaatcaatcatacacgtatctattatcatgattttcttctgaaaaaaaaaaaaaaa

SEQ ID NO: 16302 - protein, 498 aa, Brassica napus; identical to SEQ ID NO: 8854

SEQ ID NO: 16303 - DNA, 1976 bp, Glycine max; identical to SEQ ID NO: 15568
  CDS (116)..(1696)

SEQ ID NO: 16304 - protein, 526 aa, Glycine max; identical to SEQ ID NO: 8826

SEQ ID NO: 16305 - DNA, 1825 bp, Helianthus annuus; identical to SEQ ID NO: 15574
  CDS (128)..(1624)

SEQ ID NO: 16306 - protein, 498 aa, Helianthus annuus; identical to SEQ ID NO: 8834

SEQ ID NO: 16307 - DNA, 1922 bp, Zea mays
  CDS (148)..(1677)
cccggggaagaatccttctcgacgccgcccccattcattcttggagggcaagaagaacgcgcagtccaaaagcgaaacaaggggaaggggcgaggcagccaaacgaatcccagcacctgcctctcctttgcttgcgcagatctagcgatggcggcgggcggtgagttggcgtggggggaggagcccgtggcgcggcgccggcctaagaccaagatcgtctgcacgctcggcccggcgtcgcgatccgtcgagatgatctcgcgcctgctgcgcgccgggatgtgcgtcgcgcgcttcaacttctcccatggctcccacgagtaccaccaggagacgctcgacaacctgcacgccgccatggagctcaccgggatcctctgcgccgttatgctcgacaccaagggtccagagattagaactggatttttgaaagatgggaagcctattcaattgataaaaggccaagaaatcacaatttctacagactatagcattcagggtgatgagaaaatgatatcaatgagctacaagaagcttgctgttgatctgaagccaggcagtgtcatattgtgtgctgatggtaccatcactcttactgttcttcactgtgataaagaacaaggcttggttcgctgccgctgtgagaacactttcaagcttggcgagaggaagaatgttaatcttccaggagttattgttgatctccccacactcacagacaaggacaaggaggacatccttaaatggggtgttccaaacaagattgacatgattgccttgtcatttgttcggaagggttcggatcttgtggaggttaggaaggtacttggtgagcatgccaagtccataatgctgatgtcaaaggttgagaatcaagagggagtagctaactttgatgatatcctggcaaactctgatgcttttatggtggcaagaggtgatttaggaatggaaattcctatagagaagattttctttgcacagaaggtgatgattttcaagtgcaatattcaaggcaagcctgttgtgactgcaacccagatgttggaatctatgatcaagtctcctcgccctactcgggcagaagcaacggatgttgcaaacgcagttcttgatggcacagactgtgttatgctcagtggtgagactgctgctggggcttatccagggttggcggtgcagactatggctaagatctgcctgcaagcagagtcttgcgtagaccatgctgctattttcaaatcaatcatggcttcagctccaattccaatgagtccattggagagccttgcatcatcagctgttcgcacagcaaactctgccagggcagcacttatcttggtcctgaccaggggaggaactactgctaggcttgtagccaagtataggccatccatgccgattctgtccgttgtggttcctgagctgaagacagactcgttcgactgggcctgcagtgacgagggtccggcaaggcacagcctcattgtgaggggtgtcatcccaatgctgagtgccgccactgccaaggcctttgacaacgaagccactgacgaagctattggttttgccattgaaaatgcgaagacgatggggctatgcaacaccggtcaatccgttgtggccctgcaccgcatcgggatttcatccgtcatcaagcttcttactgtgaagtaggggtccaagggtgagggacaccattttgcttggtgaatttttgtgaggctgcttacgcacatcagcgtatccacagcttttctgttgccaaagatacagactttgcgttctggtacaccttggtgttacaaggttgtgggaatttgtcgtttagatattagcgatttaaacagtttatcaactgctatagctaattaatttgcagctgtgctgcaactttatcgtactgaaaaaaaaaaaaaaaa

SEQ ID NO: 16308 - protein, 509 aa, Zea mays
MAAGGELAWGEEPVARRRPKTKIVCTLGPASRSVEMISRLLRAGMCVARFNFSHGSHEYHQETLDNLHAAMELTGILCAVMLDTKGPEIRTGFLKDGKPIQLIKGQEITISTDYSIQGDEKMISMSYKKLAVDLKPGSVILCADGTITLTVLHCDKEQGLVRCRCENTFKLGERKNVNLPGVIVDLPTLTDKDKEDILKWGVPNKIDMIALSFVRKGSDLVEVRKVLGEHAKSIMLMSKVENQEGVANFDDILANSDAFMVARGDLGMEIPIEKIFFAQKVMIFKCNIQGKPVVTATQMLESMIKSPRPTRAEATDVANAVLDGTDCVMLSGETAAGAYPGLAVQTMAKICLQAESCVDHAAIFKSIMASAPIPMSPLESLASSAVRTANSARAALILVLTRGGTTARLVAKYRPSMPILSVVVPELKTDSFDWACSDEGPARHSLIVRGVIPMLSAATAKAFDNEATDEAIGFAIENAKTMGLCNTGQSVVALHRIGISSVIKLLTVK

SEQ ID NO: 16309 - DNA, 2075 bp, Zea mays; identical to SEQ ID NO: 15576
  CDS (198)..(1739)

SEQ ID NO: 16310 - protein, 513 aa, Zea mays; identical to SEQ ID NO: 8894

SEQ ID NO: 16311 - DNA, 1413 bp, Klebsiella pneumoniae subsp. pneumoniae MGH 78578; identical to SEQ ID NO: 15584
  CDS (1)..(1413): transl_table=11

SEQ ID NO: 16312 - protein, 470 aa, Klebsiella pneumoniae subsp. pneumoniae MGH 78578; identical to SEQ ID NO: 15585

SEQ ID NO: 16313 - DNA, 1557 bp, Xanthobacter autotrophicus Py2; identical to SEQ ID NO: 8651
  CDS (1)..(1557): transl_table=11

SEQ ID NO: 16314 - protein, 518 aa, Xanthobacter autotrophicus Py2; identical to SEQ ID NO: 8652

SEQ ID NO: 16315 - DNA, 1533 bp, Arabidopsis thaliana; identical to SEQ ID NO: 8391
  CDS (1)..(1533)

SEQ ID NO: 16316 - protein, 510 aa, Arabidopsis thaliana; identical to SEQ ID NO: 8392

SEQ ID NO: 16317 - DNA, 1494 bp, Arabidopsis thaliana; identical to SEQ ID NO: 8393
  CDS (1)..(1494)

SEQ ID NO: 16318 - protein, 497 aa, Arabidopsis thaliana; identical to SEQ ID NO: 8394

SEQ ID NO: 16319 - DNA, 1533 bp, Arabidopsis thaliana; identical to SEQ ID NO: 8395
  CDS (1)..(1533)

SEQ ID NO: 16320 - protein, 510 aa, Arabidopsis thaliana; identical to SEQ ID NO: 8396

SEQ ID NO: 16321 - DNA, 1479 bp, Arabidopsis thaliana; identical to SEQ ID NO: 8397
  CDS (1)..(1479)

SEQ ID NO: 16322 - protein, 492 aa, Arabidopsis thaliana; identical to SEQ ID NO: 8398

SEQ ID NO: 16323 - DNA, 1533 bp, Arabidopsis thaliana; identical to SEQ ID NO: 8399
  CDS (1)..(1533)

SEQ ID NO: 16324 - protein, 510 aa, Arabidopsis thaliana; identical to SEQ ID NO: 8400

SEQ ID NO: 16325 - DNA, 1740 bp, Arabidopsis thaliana; identical to SEQ ID NO: 8401
  CDS (1)..(1740)

SEQ ID NO: 16326 - protein, 579 aa, Arabidopsis thaliana; identical to SEQ ID NO: 8402

SEQ ID NO: 16327 - DNA, 1497 bp, Arabidopsis thaliana; identical to SEQ ID NO: 8403
  CDS (1)..(1497)

SEQ ID NO: 16328 - protein, 498 aa, Arabidopsis thaliana; identical to SEQ ID NO: 8404

SEQ ID NO: 16329 - DNA, 1533 bp, Arabidopsis thaliana; identical to SEQ ID NO: 8405
  CDS (1)..(1533)

SEQ ID NO: 16330 - protein, 510 aa, Arabidopsis thaliana; identical to SEQ ID NO: 8406

SEQ ID NO: 16331 - DNA, 1413 bp, Vibrio cholerae O1 biovar eltor str. N16961; identical to SEQ ID NO: 15602
  CDS (1)..(1413): transl_table=11

SEQ ID NO: 16332 - protein, 470 aa, Vibrio cholerae O1 biovar eltor str. N16961; identical to SEQ ID NO: 15603

SEQ ID NO: 16333 - DNA, 1755 bp, Bacillus halodurans C-125; identical to SEQ ID NO: 15604
  CDS (1)..(1755): transl_table=11

SEQ ID NO: 16334 - protein, 584 aa, Bacillus halodurans C-125; identical to SEQ ID NO: 15605

SEQ ID NO: 16335 - DNA, 1740 bp, Halobacterium sp. NRC-1; identical to SEQ ID NO: 8411
  CDS (1)..(1740): transl_table=11

SEQ ID NO: 16336 - protein, 579 aa, Halobacterium sp. NRC-1; identical to SEQ ID NO: 8412

SEQ ID NO: 16337 - DNA, 1473 bp, Neisseria meningitidis Z2491; identical to SEQ ID NO: 15612
  CDS (1)..(1473): transl_table=11

SEQ ID NO: 16338 - protein, 490 aa, Neisseria meningitidis Z2491; identical to SEQ ID NO: 15613

SEQ ID NO: 16339 - DNA, 1443 bp, Escherichia coli O157:H7 EDL933; identical to SEQ ID NO: 15614
  CDS (1)..(1443): transl_table=11
  misc_feature (850)..(850): r is g or a

SEQ ID NO: 16340 - protein, 480 aa, Escherichia coli O157:H7 EDL933; identical to SEQ ID NO: 15615
  misc_feature (284)..(284): The Xaa at location 284 stands for Ala, or Thr.

SEQ ID NO: 16341 - DNA, 1419 bp, Clostridium acetobutylicum ATCC 824; identical to SEQ ID NO: 15622
  CDS (1)..(1419): transl_table=11

SEQ ID NO: 16342 - protein, 472 aa, Clostridium acetobutylicum ATCC 824; identical to SEQ ID NO: 15623

SEQ ID NO: 16343 - DNA, 1440 bp, Agrobacterium tumefaciens str. C58; identical to SEQ ID NO: 8419
  CDS (1)..(1440): transl_table=11

SEQ ID NO: 16344 - protein, 479 aa, Agrobacterium tumefaciens str. C58; identical to SEQ ID NO: 8420

SEQ ID NO: 16345 - DNA, 1440 bp, Sinorhizobium meliloti 1021
  CDS (1)..(1440): transl_table=11
atgagacggaacaggaaagtcaaaatcctcgcgacgctcgggccggcatcggccgacgagcaaatgattcagaagctgcacgaggcgggggccgatctgttccgtatcaacatgagccatgcaagccatgaggtcatgcgcacgctgatcgagcggatccgtgtggtcgaggcgcgctgcggccgtccgatcggcatcctcgccgatctgcaggggccgaagctgcgcgtcggaaagttcgccgaaggcaaggtcgagctcaagatcggccagacattcacgctcgacaaccgcgacgtgcccggcgacagccgccgcgtctatcttccgcatccggagatcctcgaagcggtgaagcccggccatcgcctgctcatcgacgatggcaagctgcatctgcgcgccgaaaagaccgatggcaagagcatcgtcaccacggtcgtttccggcacgcggatttcggatcgcaagggcgtcagcctgcccgataccctgcttggcgtcggcgcgctgacggacaaggaccgcgtcgacctcgacgccgtgctggcgacaggagaggtcgattgggtggcgctttccttcatccagcgccctgaggaccttgccgaggttcgcaagatcgcccgcggccgcgttggactgatgtcgaagatcgagaagccgcaggcgatcgagcggatagacgagatcatcgagctttcggatgcgctgatggtggcacgcggcgacctgggcgtcgaaatgccgctcgaatccgtaccgggacttcagaagcaactgacgcgtgcctgccggcgagccggcaagccggtcgtcgtcgccacgcagatgctcgaatcgatgatctcctcgcctgtgccgacgcgcgcagaagtgtcggacgtggctaccgccgtgttcgagggtgccgatgcggtgatgctttcggccgaatccgcctccggcgagtaccccgtcgaggcggtttctaccatggcgtcgatcgccagcaacgtcgagcgcgatccgcattatccggggatcatctacgctcagcgcacgccgccggaggcaacgggcgcggacgccatttcgcttgccgctcaccagatcgccgagacgctcaagcttgccgcaatcgtgacctacacctcctctggcaccaccggcctgcgcgcggcgcgcgagcgcccccaggtgcctgtcatcgcgctttcgccgatcgtccagacggcccgtcgcctttccgtggtctgggggctgcactgtgtcgtcacagaggacgcgaccgacctcgacgatatggtcaaccgcgcctgtcgaatcgtctcgacggaaggcttcggcaagccgggagaccgcatcatcgttaccgccggcgtgccgctcggtacccccggcgccaccaacatgctgcgcatcgcctatatcggctcggacggccaatcgggcatctga

SEQ ID NO: 16346 - protein, 479 aa, Sinorhizobium meliloti 1021
MRRNRKVKILATLGPASADEQMIQKLHEAGADLFRINMSHASHEVMRTLIERIRVVEARCGRPIGILADLQGPKLRVGKFAEGKVELKIGQTFTLDNRDVPGDSRRVYLPHPEILEAVKPGHRLLIDDGKLHLRAEKTDGKSIVTTVVSGTRISDRKGVSLPDTLLGVGALTDKDRVDLDAVLATGEVDWVALSFIQRPEDLAEVRKIARGRVGLMSKIEKPQAIERIDEIIELSDALMVARGDLGVEMPLESVPGLQKQLTRACRRAGKPVVVATQMLESMISSPVPTRAEVSDVATAVFEGADAVMLSAESASGEYPVEAVSTMASIASNVERDPHYPGIIYAQRTPPEATGADAISLAAHQIAETLKLAAIVTYTSSGTTGLRAARERPQVPVIALSPIVQTARRLSVVWGLHCVVTEDATDLDDMVNRACRIVSTEGFGKPGDRIIVTAGVPLGTPGATNMLRIAYIGSDGQSGI

SEQ ID NO: 16347 - DNA, 1758 bp, Listeria innocua Clip11262; identical to SEQ ID NO: 15628
  CDS (1)..(1758): transl_table=11

SEQ ID NO: 16348 - protein, 585 aa, Listeria innocua Clip11262; identical to SEQ ID NO: 15629

SEQ ID NO: 16349 - DNA, 1431 bp, Nostoc sp. PCC 7120; identical to SEQ ID NO: 15630
  CDS (1)..(1431): transl_table=11

SEQ ID NO: 16350 - protein, 476 aa, Nostoc sp. PCC 7120; identical to SEQ ID NO: 15631

SEQ ID NO: 16351 - DNA, 1716 bp, Arabidopsis thaliana; identical to SEQ ID NO: 8433
  CDS (1)..(1716)

SEQ ID NO: 16352 - protein, 571 aa, Arabidopsis thaliana; identical to SEQ ID NO: 8434

SEQ ID NO: 16353 - DNA, 1584 bp, Arabidopsis thaliana; identical to SEQ ID NO: 8435
  CDS (1)..(1584)

SEQ ID NO: 16354 - protein, 527 aa, Arabidopsis thaliana; identical to SEQ ID NO: 8436

SEQ ID NO: 16355 - DNA, 1791 bp, Arabidopsis thaliana; identical to SEQ ID NO: 8437
  CDS (1)..(1791)

SEQ ID NO: 16356 - protein, 596 aa, Arabidopsis thaliana; identical to SEQ ID NO: 8438

SEQ ID NO: 16357 - DNA, 1584 bp, Arabidopsis thaliana; identical to SEQ ID NO: 8439
  CDS (1)..(1584)

SEQ ID NO: 16358 - protein, 527 aa, Arabidopsis thaliana; identical to SEQ ID NO: 8440

SEQ ID NO: 16359 - DNA, 1434 bp, Pyrococcus furiosus DSM 3638; identical to SEQ ID NO: 8441
  CDS (1)..(1434): transl_table=11

SEQ ID NO: 16360 - protein, 477 aa, Pyrococcus furiosus DSM 3638; identical to SEQ ID NO: 8442

SEQ ID NO: 16361 - DNA, 1428 bp, Fusobacterium nucleatum subsp. nucleatum ATCC 25586; identical to SEQ ID NO: 8443
  CDS (1)..(1428): transl_table=11

SEQ ID NO: 16362 - protein, 475 aa, Fusobacterium nucleatum subsp. nucleatum ATCC 25586; identical to SEQ ID NO: 8444

SEQ ID NO: 16363 - DNA, 1752 bp, Thermoanaerobacter tengcongensis MB4; identical to SEQ ID NO: 8445
  CDS (1)..(1752): transl_table=11

SEQ ID NO: 16364 - protein, 583 aa, Thermoanaerobacter tengcongensis MB4; identical to SEQ ID NO: 8446

SEQ ID NO: 16365 - DNA, 1437 bp, Streptomyces coelicolor A3(2); identical to SEQ ID NO: 8447
  CDS (1)..(1437): transl_table=11

SEQ ID NO: 16366 - protein, 478 aa, Streptomyces coelicolor A3(2); identical to SEQ ID NO: 8448

SEQ ID NO: 16367 - DNA, 1431 bp, Streptomyces coelicolor A3(2); identical to SEQ ID NO: 8449
  CDS (1)..(1431): transl_table=11

SEQ ID NO: 16368 - protein, 476 aa, Streptomyces coelicolor A3(2); identical to SEQ ID NO: 8450

SEQ ID NO: 16369 - DNA, 1785 bp, Thermosynechococcus elongatus BP-1; identical to SEQ ID NO: 8455
  CDS (1)..(1785): transl_table=11

SEQ ID NO: 16370 - protein, 594 aa, Thermosynechococcus elongatus BP-1; identical to SEQ ID NO: 8456

SEQ ID NO: 16371 - DNA, 1761 bp, Oceanobacillus iheyensis HTE831; identical to SEQ ID NO: 8457
  CDS (1)..(1761): transl_table=11

SEQ ID NO: 16372 - protein, 586 aa, Oceanobacillus iheyensis HTE831; identical to SEQ ID NO: 8458

SEQ ID NO: 16373 - DNA, 1437 bp, Brucella suis 1330
  CDS (1)..(1437): transl_table=11
atgaagcgcaaccgcaaggtcaagattctcgccacgctaggtccagcctctggcgaggaagccgtcatccgcaagctctttgaagcaggagcggatgtcttccgcatcaatatgagtcacgccgaccatgacctgatgcgaaccttggtcaagcgcattcgcaatgtagaaaaggaactgggacgccccatcggcattctggccgatcttcaggggccgaagctgcgcgttggcaagttcaaggatggcaaggtcgatctcgttcccggccagaccttcaccctcgacaataacgaggcgctgggcgatgaaacccgcgttttcctgccgcatcctgaaattctggaagctgtcgagccgggccatcgcctgttgatcgatgacggaaaactgcatctggtggctgaagcctgcgacggcaagtcgatccgctgcaaggttgtttccggcacccgcatttccgaccgcaagggggtcagccttcccgacacgacgctcggcgttggcgcgctgacggagaaagaccgctgcgatcttgatgccgtgctgaaggaagagatcgattgggtggcgctttcctttatccagcgcccggaagatctggccgaagtgcgcaaggtttcgcgcggcaaggtcggcctcatgtccaagatcgaaaagccgcaggctgttacccgtcttgatgaaattatcgagctttccgacgccttgatggttgcccgcggcgatctcggtgttgaagtgccgcttgaaaacgttcccggcattcaaaagcagattacccgcaaggcgcgtcgcgccggcaagccggtcgttgtcgcaacccagatgctggaatcgatgattaccgcgccggtgcccacccgcgctgaagtgtccgacgtggcgactgcggtgtttgaaggtgcggatgcaatcatgctttcggcggaatctgcttccggccaatatccggtcgaagctgttgcaaccatgaaccgcatcgccgagcaggtggagcgcgagccgacctattcgaccatcattgacgcacagcgcgccatgccggagccgactggcgccgacgctatctcgctcgccgcgcgtcagattgctgaaacgttgaaactctcggccatcgtgacctatacggcttccggcacgaccggcctgcgcgctgcccgcgagcgtccgcgcacacccattatcgcgctgtcgcccgttgttgataccgcccgtaaactgtccctcgtatggggcctgcattgcgtcgtcacagatgatgcccatgatcttgaagacatggtcaatcatgcctgcgaaatcgtgttccatgaggaattcggcaaagctggcgatcgcgtcatcatcacggcaggcgttcccttcggaacgccgggtgcaaccaatatgctgcgtatcgcctatataggcgctgacggaaaatccggcatttag

SEQ ID NO: 16374 - protein, 478 aa, Brucella suis 1330
MKRNRKVKILATLGPASGEEAVIRKLFEAGADVFRINMSHADHDLMRTLVKRIRNVEKELGRPIGILADLQGPKLRVGKFKDGKVDLVPGQTFTLDNNEALGDETRVFLPHPEILEAVEPGHRLLIDDGKLHLVAEACDGKSIRCKVVSGTRISDRKGVSLPDTTLGVGALTEKDRCDLDAVLKEEIDWVALSFIQRPEDLAEVRKVSRGKVGLMSKIEKPQAVTRLDEIIELSDALMVARGDLGVEVPLENVPGIQKQITRKARRAGKPVVVATQMLESMITAPVPTRAEVSDVATAVFEGADAIMLSAESASGQYPVEAVATMNRIAEQVEREPTYSTIIDAQRAMPEPTGADAISLAARQIAETLKLSAIVTYTASGTTGLRAARERPRTPIIALSPVVDTARKLSLVWGLHCVVTDDAHDLEDMVNHACEIVFHEEFGKAGDRVIITAGVPFGTPGATNMLRIAYIGADGKSGI

SEQ ID NO: 16375 - DNA, 1413 bp, Shigella flexneri 2a str. 301; identical to SEQ ID NO: 15660
  CDS (1)..(1413): transl_table=11

SEQ ID NO: 16376 - protein, 470 aa, Shigella flexneri 2a str. 301; identical to SEQ ID NO: 15661

SEQ ID NO: 16377 - DNA, 1437 bp, Leptospira interrogans serovar Lai str. 56601; identical to SEQ ID NO: 8463
  CDS (1)..(1437): transl_table=11

SEQ ID NO: 16378 - protein, 478 aa, Leptospira interrogans serovar Lai str. 56601; identical to SEQ ID NO: 8464

SEQ ID NO: 16379 - DNA, 1440 bp, Shewanella oneidensis MR-1; identical to SEQ ID NO: 8371
  CDS (1)..(1440): transl_table=11

SEQ ID NO: 16380 - protein, 479 aa, Shewanella oneidensis MR-1; identical to SEQ ID NO: 8372

SEQ ID NO: 16381 - DNA, 1539 bp, Drosophila melanogaster; identical to SEQ ID NO: 15666
  CDS (1)..(1539)

SEQ ID NO: 16382 - protein, 512 aa, Drosophila melanogaster; identical to SEQ ID NO: 15667

SEQ ID NO: 16383 - DNA, 1503 bp, Streptococcus agalactiae NEM316
  CDS (1)..(1503): transl_table=11
atgaataaacgcgtaaaaatcgttgcaacacttggtcctgcggtagaattccgtggtggtaagaagtttggtgagtctggatactggggtgaaagccttgacgtagaagcttcagcagaaaaaattgctcaattgattaaagaaggtgctaacgttttccgtttcaacttctcacatggagatcatgctgagcaaggagctcgtatggctactgttcgtaaagcagaagagattgcaggacaaaaagttggcttcctccttgatactaaaggacctgaaattcgtacagaactttttgaagatggttcagatttccattcatatacaacaggtacaaaattacgtgttgctactaagcaaggtatcaaatcaactccagaagtgattgcattgaatgttgctggtggacttgacatctttgatgacgttgaagttggtaagcaaatccttgttgatgatggtaaactaggtcttactgtgtttgcaaaagataaagacactcgtgaatttgaagtagttgttgagaatgatggccttattggtaaacaaaaaggtgtaaacatcccttatactaaaattcctttcccagcacttgcagaacgcgataatgctgatatccgttttggacttgagcaaggacttaactttattgctatctcatttgtacgtactgctaaagatgttaatgaagttcgtgctatttgtgaagaaactggcaatggacatgttaagttgtttgctaaaattgaaaatcaacaaggtatcgataatattgatgagattatcgaagcagcagatggtattatgattgctcgtggtgatatgggtatcgaagttccatttgaaatggttccagtttaccaaaaaatgatcattactaaagttaatgcagctggtaaagcagttattacagcaacaaatatgcttgaaacaatgactgataaaccacgtgcgactcgttcagaagtatctgatgtcttcaatgctgttattgatggtactgatgctacaatgctttcaggtgagtcagctaatggtaaatacccagttgagtcagttcgtacaatggctactattgataaaaatgctcaaacattactcaatgagtatggtcgcttagactcatctgcattcccacgtaataacaaaactgatgttattgcatctgcggttaaagatgcaacacactcaatggatatcaaacttgttgtgacaattactgaaacaggtaatacagctcgtgccatttctaaattccgtccagatgcagacattttggctgttacatttgatgaaaaagtacaacgttcattgatgattaactggggtgttatccctgtccttgcagacaaaccagcatctacagatgatatgtttgaggttgcagaacgtgtagcacttgaagcaggacttgttgaatcaggcgataatatcgttatcgttgcaggtgttcctgtaggtacaggtggaactaacacaatgcgtgttcgtactgttaaataa

SEQ ID NO: 16384 - protein, 500 aa, Streptococcus agalactiae NEM316
MNKRVKIVATLGPAVEFRGGKKFGESGYWGESLDVEASAEKIAQLIKEGANVFRFNFSHGDHAEQGARMATVRKAEEIAGQKVGFLLDTKGPEIRTELFEDGSDFHSYTTGTKLRVATKQGIKSTPEVIALNVAGGLDIFDDVEVGKQILVDDGKLGLTVFAKDKDTREFEVVVENDGLIGKQKGVNIPYTKIPFPALAERDNADIRFGLEQGLNFIAISFVRTAKDVNEVRAICEETGNGHVKLFAKIENQQGIDNIDEIIEAADGIMIARGDMGIEVPFEMVPVYQKMIITKVNAAGKAVITATNMLETMTDKPRATRSEVSDVFNAVIDGTDATMLSGESANGKYPVESVRTMATIDKNAQTLLNEYGRLDSSAFPRNNKTDVIASAVKDATHSMDIKLVVTITETGNTARAISKFRPDADILAVTFDEKVQRSLMINWGVIPVLADKPASTDDMFEVAERVALEAGLVESGDNIVIVAGVPVGTGGTNTMRVRTVK

SEQ ID NO: 16385 - DNA, 1455 bp, Pseudomonas putida KT2440; identical to SEQ ID NO: 15668
  CDS (1)..(1455): transl_table=11

SEQ ID NO: 16386 - protein, 484 aa, Pseudomonas putida KT2440; identical to SEQ ID NO: 15669

SEQ ID NO: 16387 - DNA, 1416 bp, Pseudomonas putida KT2440; identical to SEQ ID NO: 15670
  CDS (1)..(1416): transl_table=11

SEQ ID NO: 16388 - protein, 471 aa, Pseudomonas putida KT2440; identical to SEQ ID NO: 15671

SEQ ID NO: 16389 - DNA, 1629 bp, Escherichia coli CFT073; identical to SEQ ID NO: 15672
  CDS (1)..(1629): transl_table=11

SEQ ID NO: 16390 - protein, 542 aa, Escherichia coli CFT073; identical to SEQ ID NO: 15673

SEQ ID NO: 16391 - DNA, 1413 bp, Vibrio vulnificus CMCP6; identical to SEQ ID NO: 15674
  CDS (1)..(1413): transl_table=11

SEQ ID NO: 16392 - protein, 470 aa, Vibrio vulnificus CMCP6; identical to SEQ ID NO: 15675

SEQ ID NO: 16393 - DNA, 1755 bp, Clostridium tetani E88; identical to SEQ ID NO: 15676
  CDS (1)..(1755): transl_table=11

SEQ ID NO: 16394 - protein, 584 aa, Clostridium tetani E88; identical to SEQ ID NO: 15677

SEQ ID NO: 16395 - DNA, 1761 bp, Lactobacillus plantarum WCFS1; identical to SEQ ID NO: 15678
  CDS (1)..(1761): transl_table=11

SEQ ID NO: 16396 - protein, 586 aa, Lactobacillus plantarum WCFS1; identical to SEQ ID NO: 15679

SEQ ID NO: 16397 - DNA, 1413 bp, Vibrio parahaemolyticus RIMD 2210633; identical to SEQ ID NO: 15682
  CDS (1)..(1413): transl_table=11

SEQ ID NO: 16398 - protein, 470 aa, Vibrio parahaemolyticus RIMD 2210633; identical to SEQ ID NO: 15683

SEQ ID NO: 16399 - DNA, 1758 bp, Enterococcus faecalis V583; identical to SEQ ID NO: 8473
  CDS (1)..(1758): transl_table=11

SEQ ID NO: 16400 - protein, 585 aa, Enterococcus faecalis V583; identical to SEQ ID NO: 8474

SEQ ID NO: 16401 - DNA, 1434 bp, Coxiella burnetii RSA 493; identical to SEQ ID NO: 8475
  CDS (1)..(1434): transl_table=11

SEQ ID NO: 16402 - protein, 477 aa, Coxiella burnetii RSA 493; identical to SEQ ID NO: 8476

SEQ ID NO: 16403 - DNA, 1446 bp, Chlamydophila caviae GPIC; identical to SEQ ID NO: 15688
  CDS (1)..(1446): transl_table=11

SEQ ID NO: 16404 - protein, 481 aa, Chlamydophila caviae GPIC; identical to SEQ ID NO: 15689

SEQ ID NO: 16405 - DNA, 1758 bp, Bacillus cereus ATCC 14579; identical to SEQ ID NO: 15690
  CDS (1)..(1758): transl_table=11

SEQ ID NO: 16406 - protein, 585 aa, Bacillus cereus ATCC 14579; identical to SEQ ID NO: 15691

SEQ ID NO: 16407 - DNA, 1431 bp, Rhodopirellula baltica SH 1; identical to SEQ ID NO: 15692
  CDS (1)..(1431): transl_table=11

SEQ ID NO: 16408 - protein, 476 aa, Rhodopirellula baltica SH 1; identical to SEQ ID NO: 15693

SEQ ID NO: 16409 - DNA, 1440 bp, Wigglesworthia glossinidia endosymbiont of Glossina brevipalpis; identical to SEQ ID NO: 8481
  CDS (1)..(1440): transl_table=11

SEQ ID NO: 16410 - protein, 479 aa, Wigglesworthia glossinidia endosymbiont of Glossina brevipalpis; identical to SEQ ID NO: 8482

SEQ ID NO: 16411 - DNA, 1440 bp, Haemophilus ducreyi 35000HP; identical to SEQ ID NO: 8369
  CDS (1)..(1440): transl_table=11

SEQ ID NO: 16412 - protein, 479 aa, Haemophilus ducreyi 35000HP; identical to SEQ ID NO: 8370

SEQ ID NO: 16413 - DNA, 1467 bp, Bordetella pertussis Tohama I
  CDS (1)..(1467): transl_table=11
gtgttttcgtcggagagagcctacatgcccgtactgcgccgcaccaaaatcgttgccaccctggggcccgccacgtccacgcccgagcggctcgacgggctgatacgcgccggcatggacgtggcccgcctgaatttctcgcacggcagcgcgcaggaccatcgcgagcgcgtgcggctggtgcgcgagctggcggccgagcaagggcgcttcgtggccctcatgggcgacttgcagggcccgaagatccggatcgcccgcttcaccgaccagcaggtcaccctgcaggccggccagcctttcacgctgtcgcgttcacattccaaggaggccggcgacgcaaccatcgtgggtatcgattatcccgagctggtgcaggactgccgccctggcgacgagctgctgctcgacgatggccgcgtggtgctggtggtcgacagcgtgggggccgaggaggtccacaccaccgtgacggtgggcgggccgctgtcgaacaacaagggcatcaaccggcgcggcggcggcctttcggcgcccagcctcaccgacaaggaccgcaccgacatcaagctggccgccgagatggagctggactacgtggccgtatcgtttccgcgctatggggccgacatcgatgaagcccgcgcgctgctgcgcgcggccggcagccaggcctggatcatcgccaagatcgagcgcgccgaggcggtggccgacgacgacgcgctggatgcgctgatccgcgccagcgacggcgtgatggtggcgcgcggcgacctgggcgtggaagtgggcgacgccgaactggtcggcatccagaagcgcatcatccagcacgcgcgtacgctgaacaaggtggtcatcacggccacccagatgatggagtccatggtggccagccccatgcccacgcgcgccgaggtgtcggacgtggccaacgcggtgctcgactacacggacgccgtcatgctgtcggccgaaagcgcctcgggccagtatccgatcgaggcggtggcggcgatggcacgggtctgtctgggggcggagaagcaccctaccaccacgcattcgcaccatcgcctgggcgagacgttcacgcgctgcgacgagaccatcgcgctggcggccatgtacgcggccaaccatttcccgggcgtgaaggccatcatcgcgctgaccgaaagcgggcacacgccgctgatcatgtcgcgcatccgttcgggcgtgccgatctactgctacagcccgcatggtcccacgcagcggcgcgcggcgctgtttcgcggcgtctacacggtgcccttcgcgccggccgaatacgacccggccgacttgagcaacgcggccatcgacgagctgaagaagcgtggccgtgtcgcggcgggcgactgggtcatcctgaccaagggcgatttctaccgcgacagcggcggcaccaacggcctgaagatcctgaaggtggaatag

SEQ ID NO: 16414 - protein, 488 aa, Bordetella pertussis Tohama I
MFSSERAYMPVLRRTKIVATLGPATSTPERLDGLIRAGMDVARLNFSHGSAQDHRERVRLVRELAAEQGRFVALMGDLQGPKIRIARFTDQQVTLQAGQPFTLSRSHSKEAGDATIVGIDYPELVQDCRPGDELLLDDGRVVLVVDSVGAEEVHTTVTVGGPLSNNKGINRRGGGLSAPSLTDKDRTDIKLAAEMELDYVAVSFPRYGADIDEARALLRAAGSQAWIIAKIERAEAVADDDALDALIRASDGVMVARGDLGVEVGDAELVGIQKRIIQHARTLNKVVITATQMMESMVASPMPTRAEVSDVANAVLDYTDAVMLSAESASGQYPIEAVAAMARVCLGAEKHPTTTHSHHRLGETFTRCDETIALAAMYAANHFPGVKAIIALTESGHTPLIMSRIRSGVPIYCYSPHGPTQRRAALFRGVYTVPFAPAEYDPADLSNAAIDELKKRGRVAAGDWVILTKGDFYRDSGGTNGLKILKVE

SEQ ID NO: 16415 - DNA, 1818 bp, Gloeobacter violaceus PCC 7421; identical to SEQ ID NO: 8487
  CDS (1)..(1818): transl_table=11

SEQ ID NO: 16416 - protein, 605 aa, Gloeobacter violaceus PCC 7421; identical to SEQ ID NO: 8488

SEQ ID NO: 16417 - DNA, 1410 bp, Photorhabdus luminescens subsp. laumondii TTO1; identical to SEQ ID NO: 15702
  CDS (1)..(1410): transl_table=11

SEQ ID NO: 16418 - protein, 469 aa, Photorhabdus luminescens subsp. laumondii TTO1; identical to SEQ ID NO: 15703

SEQ ID NO: 16419 - DNA, 1488 bp, Vibrio vulnificus YJ016; identical to SEQ ID NO: 15704
  CDS (1)..(1488): transl_table=11

SEQ ID NO: 16420 - protein, 495 aa, Vibrio vulnificus YJ016; identical to SEQ ID NO: 15705

SEQ ID NO: 16421 - DNA, 1434 bp, Rhodopseudomonas palustris CGA009; identical to SEQ ID NO: 8491
  CDS (1)..(1434): transl_table=11

SEQ ID NO: 16422 - protein, 477 aa, Rhodopseudomonas palustris CGA009; identical to SEQ ID NO: 8492

SEQ ID NO: 16423 - DNA, 1341 bp, Onion yellows phytoplasma OY-M; identical to SEQ ID NO: 15706
  CDS (1)..(1341): transl_table=11

SEQ ID NO: 16424 - protein, 446 aa, Onion yellows phytoplasma OY-M; identical to SEQ ID NO: 15707

SEQ ID NO: 16425 - DNA, 1416 bp, Treponema denticola ATCC 35405; identical to SEQ ID NO: 8495
  CDS (1)..(1416): transl_table=11

SEQ ID NO: 16426 - protein, 471 aa, Treponema denticola ATCC 35405; identical to SEQ ID NO: 8496

SEQ ID NO: 16427 - DNA, 1437 bp, Mycoplasma mycoides subsp. mycoides SC str. PG1; identical to SEQ ID NO: 15712
  CDS (1)..(1437): transl_table=4

SEQ ID NO: 16428 - protein, 478 aa, Mycoplasma mycoides subsp. mycoides SC str. PG1; identical to SEQ ID NO: 15713

SEQ ID NO: 16429 - DNA, 1758 bp, Bacillus cereus ATCC 10987; identical to SEQ ID NO: 15714
  CDS (1)..(1758): transl_table=11

SEQ ID NO: 16430 - protein, 585 aa, Bacillus cereus ATCC 10987; identical to SEQ ID NO: 15715

SEQ ID NO: 16431 - DNA, 1656 bp, Nasonia vitripennis; identical to SEQ ID NO: 15718
  CDS (1)..(1656)

SEQ ID NO: 16432 - protein, 551 aa, Nasonia vitripennis; identical to SEQ ID NO: 15719

SEQ ID NO: 16433 - DNA, 1587 bp, Magnaporthe grisea 70-15; identical to SEQ ID NO: 8497
  CDS (1)..(1587)

SEQ ID NO: 16434 - protein, 528 aa, Magnaporthe grisea 70-15; identical to SEQ ID NO: 8498

SEQ ID NO: 16435 - DNA, 1623 bp, Gibberella zeae PH-1; identical to SEQ ID NO: 8499
  CDS (1)..(1623)

SEQ ID NO: 16436 - protein, 540 aa, Gibberella zeae PH-1; identical to SEQ ID NO: 8500

SEQ ID NO: 16437 - DNA, 1554 bp, Apis mellifera; identical to SEQ ID NO: 15722
  CDS (1)..(1554)

SEQ ID NO: 16438 - protein, 517 aa, Apis mellifera; identical to SEQ ID NO: 15723

SEQ ID NO: 16439 - DNA, 1515 bp, Candida albicans SC5314; identical to SEQ ID NO: 8501
  CDS (1)..(1515): transl_table=12

SEQ ID NO: 16440 - protein, 504 aa, Candida albicans SC5314; identical to SEQ ID NO: 8502

SEQ ID NO: 16441 - DNA, 1587 bp, Ustilago maydis 521; identical to SEQ ID NO: 8503
  CDS (1)..(1587)

SEQ ID NO: 16442 - protein, 528 aa, Ustilago maydis 521; identical to SEQ ID NO: 8504

SEQ ID NO: 16443 - DNA, 1590 bp, Cryptococcus neoformans var. neoformans B-3501A; identical to SEQ ID NO: 15728
  CDS (1)..(1590)

SEQ ID NO: 16444 - protein, 529 aa, Cryptococcus neoformans var. neoformans B-3501A; identical to SEQ ID NO: 15729

SEQ ID NO: 16445 - DNA, 1719 bp, Cryptococcus neoformans var. neoformans B-3501A; identical to SEQ ID NO: 15730
  CDS (1)..(1719)

SEQ ID NO: 16446 - protein, 572 aa, Cryptococcus neoformans var. neoformans B-3501A; identical to SEQ ID NO: 15731

SEQ ID NO: 16447 - DNA, 1539 bp, Tribolium castaneum; identical to SEQ ID NO: 15734
  CDS (1)..(1539)

SEQ ID NO: 16448 - protein, 512 aa, Tribolium castaneum; identical to SEQ ID NO: 15735

SEQ ID NO: 16449 - DNA, 1611 bp, Tribolium castaneum; identical to SEQ ID NO: 15736
  CDS (1)..(1611)

SEQ ID NO: 16450 - protein, 536 aa, Tribolium castaneum; identical to SEQ ID NO: 15737

SEQ ID NO: 16451 - DNA, 1674 bp, Tribolium castaneum; identical to SEQ ID NO: 15738
  CDS (1)..(1674)

SEQ ID NO: 16452 - protein, 557 aa, Tribolium castaneum; identical to SEQ ID NO: 15739

SEQ ID NO: 16453 - DNA, 1593 bp, Tribolium castaneum; identical to SEQ ID NO: 15740
  CDS (1)..(1593)

SEQ ID NO: 16454 - protein, 530 aa, Tribolium castaneum; identical to SEQ ID NO: 15741

SEQ ID NO: 16455 - DNA, 1761 bp, Clostridium difficile 630; identical to SEQ ID NO: 8505
  CDS (1)..(1761): transl_table=11

SEQ ID NO: 16456 - protein, 586 aa, Clostridium difficile 630; identical to SEQ ID NO: 8506

SEQ ID NO: 16457 - DNA, 1419 bp, Bradyrhizobium sp. ORS278; identical to SEQ ID NO: 15744
  CDS (1)..(1419): transl_table=11

SEQ ID NO: 16458 - protein, 472 aa, Bradyrhizobium sp. ORS278; identical to SEQ ID NO: 15745

SEQ ID NO: 16459 - DNA, 1455 bp, Dichelobacter nodosus VCS1703A; identical to SEQ ID NO: 8377
  CDS (1)..(1455): transl_table=11

SEQ ID NO: 16460 - protein, 484 aa, Dichelobacter nodosus VCS1703A; identical to SEQ ID NO: 8378

SEQ ID NO: 16461 - DNA, 1425 bp, Thermus thermophilus HB27; identical to SEQ ID NO: 8511
  CDS (1)..(1425): transl_table=11

SEQ ID NO: 16462 - protein, 474 aa, Thermus thermophilus HB27; identical to SEQ ID NO: 8512

SEQ ID NO: 16463 - DNA, 1797 bp, Candidatus Protochlamydia amoebophila UWE25; identical to SEQ ID NO: 8513
  CDS (1)..(1797): transl_table=11

SEQ ID NO: 16464 - protein, 598 aa, Candidatus Protochlamydia amoebophila UWE25; identical to SEQ ID NO: 8514

SEQ ID NO: 16465 - DNA, 1758 bp, Listeria monocytogenes str. 4b F2365; identical to SEQ ID NO: 15752
  CDS (1)..(1758): transl_table=11

SEQ ID NO: 16466 - protein, 585 aa, Listeria monocytogenes str. 4b F2365; identical to SEQ ID NO: 15753

SEQ ID NO: 16467 - DNA, 1437 bp, Bartonella henselae str. Houston-1; identical to SEQ ID NO: 8515
  CDS (1)..(1437): transl_table=11

SEQ ID NO: 16468 - protein, 478 aa, Bartonella henselae str. Houston-1; identical to SEQ ID NO: 8516

SEQ ID NO: 16469 - DNA, 1758 bp, Bacillus thuringiensis serovar konkukian str. 97-27; identical to SEQ ID NO: 15754
  CDS (1)..(1758): transl_table=11

SEQ ID NO: 16470 - protein, 585 aa, Bacillus thuringiensis serovar konkukian str. 97-27; identical to SEQ ID NO: 15755

SEQ ID NO: 16471 - DNA, 1413 bp, Erwinia carotovora subsp. atroseptica SCRI1043; identical to SEQ ID NO: 15756
  CDS (1)..(1413): transl_table=11

SEQ ID NO: 16472 - protein, 470 aa, Erwinia carotovora subsp. atroseptica SCRI1043; identical to SEQ ID NO: 15757

SEQ ID NO: 16473 - DNA, 1434 bp, Propionibacterium acnes KPA171202; identical to SEQ ID NO: 8521
  CDS (1)..(1434): transl_table=11

SEQ ID NO: 16474 - protein, 477 aa, Propionibacterium acnes KPA171202; identical to SEQ ID NO: 8522

SEQ ID NO: 16475 - DNA, 1467 bp, Leifsonia xyli subsp. xyli str. CTCB07; identical to SEQ ID NO: 8523
  CDS (1)..(1467): transl_table=11

SEQ ID NO: 16476 - protein, 488 aa, Leifsonia xyli subsp. xyli str. CTCB07; identical to SEQ ID NO: 8524

SEQ ID NO: 16477 - DNA, 1746 bp, Desulfotalea psychrophila LSv54; identical to SEQ ID NO: 8525
  CDS (1)..(1746): transl_table=11

SEQ ID NO: 16478 - protein, 581 aa, Desulfotalea psychrophila LSv54; identical to SEQ ID NO: 8526

SEQ ID NO: 16479 - DNA, 1755 bp, Symbiobacterium thermophilum IAM 14863; identical to SEQ ID NO: 8529
  CDS (1)..(1755): transl_table=11

SEQ ID NO: 16480 - protein, 584 aa, Symbiobacterium thermophilum IAM 14863; identical to SEQ ID NO: 8530

SEQ ID NO: 16481 - DNA, 1758 bp, Bacillus licheniformis ATCC 14580; identical to SEQ ID NO: 15768
  CDS (1)..(1758): transl_table=11

SEQ ID NO: 16482 - protein, 585 aa, Bacillus licheniformis ATCC 14580; identical to SEQ ID NO: 15769

SEQ ID NO: 16483 - DNA, 1449 bp, Azoarcus sp. EbN1; identical to SEQ ID NO: 15772
  CDS (1)..(1449): transl_table=11

SEQ ID NO: 16484 - protein, 482 aa, Azoarcus sp. EbN1; identical to SEQ ID NO: 15773

SEQ ID NO: 16485 - DNA, 1446 bp, Silicibacter pomeroyi DSS-3
  CDS (1)..(1446): transl_table=11
atgcgtcgcctgagaaaagtgaaaatcgtggcaacgctggggccagcgtccgaaacctatgagacgatccgcgccctgcacgaggccggagccgatgtgttccgcctgaacatgagtcacggcactcatgacgagattcgcgccaagcaccagatcatccgacaggtggaacaggatctggacagcccgatcgccatccttgccgatcttcaggggccgaaactgcgggtcggcacctttgtcaacgaggccgaggaactggcggagggcgcggcgttccggctcgacctcgacccggcaccgggcgatgccggtcgtgtttgtctgccacatcccgagattttccaggtgctggagccgggagcccatctgctggtcaacgatggcaagatccggctcaaggttctggattgcggccccgatttcgccgaatgcaccgtggtcaccggcgggaccatttcgaaccgcaagggcgtcaacgtgcccgacgtggtgctgcccctggcggcgctgtcggacaaggaccgcgacgatctggaattcgcctgtgctctgggtgtggactggctggcgctcagcttcgttcagcgcgcgcgcgacgtgttcgaggcgcgcgctctggccgacgggcgcgccgcgatcctgtccaagatcgagaaacccgccgcggtcgaagcattcgacgcgattctggatgcgtcggacgggatcatggtggcgcgcggcgatctgggcgtcgaactgcctgttgccgccgtgccgccgatccagaaacggctggtgcgcaaatgccgtgcggcggccaagccggtgatcgtcgccacccagatgctggaaagcatgatcgaaagcccgatgcccacccgggccgaggtctcggacgtggccaccgccatctacgagggcaccgacgccatcatgctcagcgctgaatcggcggcgggccaatacccgctggaagcggttcgcacgatggacaatgtcgctgtcgaggtcgaggcggacccgacctatacccagatcatcgccgcctcgcgcaccgccaagggcaccaccatcgccgacgggatcgtcgccgccgcgcgcgagattgcggaaaagaccgatatcaaggcgatctgctgctttacccaatcgggcaccaccgcgctgctgaccgcgcgcgaacgccccggtgtgccgatcatcgcgatgacctcgctgctggcgacggcgcggcggctgtgcctcagctggggctgtcattgcgtgatcacccccgagctggagcgattcaagggcgcggtcgtgaacgccgcgcgcgccgcgcgggcaggtggctttgccatcgagaccgaccagatcgtggtaaccgccggggtgccctttaacgtgccgggcaccaccaacatcctgcgggtcgccccctgtgacgaacgtttgatctataacaccgacccgggctaa

SEQ ID NO: 16486 - protein, 481 aa, Silicibacter pomeroyi DSS-3
MRRLRKVKIVATLGPASETYETIRALHEAGADVFRLNMSHGTHDEIRAKHQIIRQVEQDLDSPIAILADLQGPKLRVGTFVNEAEELAEGAAFRLDLDPAPGDAGRVCLPHPEIFQVLEPGAHLLVNDGKIRLKVLDCGPDFAECTVVTGGTISNRKGVNVPDVVLPLAALSDKDRDDLEFACALGVDWLALSFVQRARDVFEARALADGRAAILSKIEKPAAVEAFDAILDASDGIMVARGDLGVELPVAAVPPIQKRLVRKCRAAAKPVIVATQMLESMIESPMPTRAEVSDVATAIYEGTDAIMLSAESAAGQYPLEAVRTMDNVAVEVEADPTYTQIIAASRTAKGTTIADGIVAAAREIAEKTDIKAICCFTQSGTTALLTARERPGVPIIAMTSLLATARRLCLSWGCHCVITPELERFKGAVVNAARAARAGGFAIETDQIVVTAGVPFNVPGTTNILRVAPCDERLIYNTDPG

SEQ ID NO: 16487 - DNA, 1755 bp, Bacillus clausii KSM-K16; identical to SEQ ID NO: 8537
  CDS (1)..(1755): transl_table=11

SEQ ID NO: 16488 - protein, 584 aa, Bacillus clausii KSM-K16; identical to SEQ ID NO: 8538

SEQ ID NO: 16489 - DNA, 1437 bp, Thermococcus kodakarensis KOD1; identical to SEQ ID NO: 15776
  CDS (1)..(1437): transl_table=11

SEQ ID NO: 16490 - protein, 478 aa, Thermococcus kodakarensis KOD1; identical to SEQ ID NO: 15777

SEQ ID NO: 16491 - DNA, 1458 bp, Bacteroides fragilis NCTC 9343; identical to SEQ ID NO: 15778
  CDS (1)..(1458): transl_table=11

SEQ ID NO: 16492 - protein, 485 aa, Bacteroides fragilis NCTC 9343; identical to SEQ ID NO: 15779

SEQ ID NO: 16493 - DNA, 1434 bp, Corynebacterium glutamicum ATCC 13032; identical to SEQ ID NO: 8543
  CDS (1)..(1434): transl_table=11

SEQ ID NO: 16494 - protein, 477 aa, Corynebacterium glutamicum ATCC 13032; identical to SEQ ID NO: 8544

SEQ ID NO: 16495 - DNA, 1452 bp, Pseudomonas syringae pv. syringae B728a
  CDS (1)..(1452): transl_table=11
atgaccgttcgccgcaccaaaatcgtcgccacacttggccctgccagcaactcgccggaagtcatcgaacaactgatcctttcgggtctggacgttgctcgtctgaacttctctcacggtactccggacgagcacaaggctcgcgccaggctgatccgcgaaatcgccgccagacacgggcgcttcgtcgctctgctgggcgacctgcagggtccgaagattcgtatcgcaaagttcaccgacaagcgaatagagctgaaggtcggtgacaagttcaccttctccactgctcatccgctgaccagtggcaaccagcagatcgtgggtatcgattacccggatctggtcaaggattgcggcgtaggcgacgagttgctgctcgacgatggtcgcgtggtcatgcgcgtcgacacccagaccgctgacgaactgcactgcaccgtgctgatcggtggtccgctgtccgaccacaaaggcatcaaccgtcgtggtggtggcctgacggcgccagcactgaccgaaaaagacaagcaggacatcaagctcgctgccgagatggacctggactacctggccgtttccttcccgcgcgacgccgccgacatggaatacgcccgccagttgcgcgacgaatccggtggtacggcctggctggtggccaagatcgaacgtgccgaagccgttgccaacgacgaagtgctggatgagctgatccgcgccagtgacgcggtcatggtcgctcgtggtgacctgggtgtcgaaatcggtgatgccgaactggtcggcgtacagaaacgcatcatcctgcacgcccgtcgccacaacaaggcggtgatcgtcgccacgcagatgatggagtcgatgatctccagccccatgccgacgcgtgccgaagtgtccgacgtggccaacgccgtgctcgactacaccgacgccgtgatgctgtcggccgaaagtgctgcaggctcctacccgatcgaagcggttcaggccatggcccgtatctgcatcggtgctgaaaagcacccgaccggcaagacgtccagccaccgcatcggtcactcgttcacccgttgtgacgaaagcatcgcgctggcggccatgtacaccgccaaccacttcccgggtgtgaaggcgatcatcgcactgaccgaaagcggctacaccccgctgatcatgtcgcgcatccgctcctcggtgccgatctacgcgttctctccgcaccgtggtactcaggcgcgtgctgcgatgttccgtggcgtctacaccgtgccattcgacccggcagcgctgccgccaggtcaggtcagccaggccgcagtcgacgaactgctcaagcgtggtctggtcgagcaaggtgactgggtcatcctcaccaagggcgacagctaccacaccatcggcggcaccaacggcatgaagattctgcacgtcggcgacccgttggtctga

SEQ ID NO: 16496 - protein, 483 aa, Pseudomonas syringae pv. syringae B728a
MTVRRTKIVATLGPASNSPEVIEQLILSGLDVARLNFSHGTPDEHKARARLIREIAARHGRFVALLGDLQGPKIRIAKFTDKRIELKVGDKFTFSTAHPLTSGNQQIVGIDYPDLVKDCGVGDELLLDDGRVVMRVDTQTADELHCTVLIGGPLSDHKGINRRGGGLTAPALTEKDKQDIKLAAEMDLDYLAVSFPRDAADMEYARQLRDESGGTAWLVAKIERAEAVANDEVLDELIRASDAVMVARGDLGVEIGDAELVGVQKRIILHARRHNKAVIVATQMMESMISSPMPTRAEVSDVANAVLDYTDAVMLSAESAAGSYPIEAVQAMARICIGAEKHPTGKTSSHRIGHSFTRCDESIALAAMYTANHFPGVKAIIALTESGYTPLIMSRIRSSVPIYAFSPHRGTQARAAMFRGVYTVPFDPAALPPGQVSQAAVDELLKRGLVEQGDWVILTKGDSYHTIGGTNGMKILHVGDPLV

SEQ ID NO: 16497 - DNA, 1434 bp, Dechloromonas aromatica RCB; identical to SEQ ID NO: 8549
  CDS (1)..(1434): transl_table=11

SEQ ID NO: 16498 - protein, 477 aa, Dechloromonas aromatica RCB; identical to SEQ ID NO: 8550

SEQ ID NO: 16499 - DNA, 1431 bp, Thermobifida fusca YX; identical to SEQ ID NO: 8551
  CDS (1)..(1431): transl_table=11

SEQ ID NO: 16500 - protein, 476 aa, Thermobifida fusca YX; identical to SEQ ID NO: 8552

SEQ ID NO: 16501 - DNA, 1458 bp, Prochlorococcus marinus str. NATL2A
  CDS (1)..(1458): transl_table=11
atgaaaatactcgacctagccagaaggaccaagattgtagctaccataggacccgcaactgagagtgcgagtcaaataagcaagttagtagaggccggtgcgactactttccgtctaaattttagtcatggagatcatgaagaacatgctcaaagaataaaaacaattagaaaagtttctgatgatctaggcattcacataggaattcttcaggatcttcaggggcctaagattagacttggtagatttaaaaatggcccagttaatgtcaaaaatggcgataaatttattcttacatcgaaaaatattgactgtaatcaggaccaagcaaatgtcacttacgacaagctagctgaagaagtaaatgttgggaatcgaattctgttggatgatggaagggttgagatgaaagttgaagaagtagatttaaaagaacaaagattaatttgttcaataactgtgggtggggttctatcaaataacaaaggagttaattttcctgatgttcaactctccataagggctttaacagacaaagataaaaaagatctagcatttggtttaaaacaaggtgttgattgggtagcactaagttttgtaagaaatccatctgatttaatagaaataaaagatttaattagaaatcatggatatgacactccagtagttgcgaagatagaaaaatttgaagcaattgatcaaatagacgctgtcttaaaattatgtgatggagtcatggtggctagaggagatctaggtgtagagatgccagcagaagaagttccattattacaaaaacaacttatcaaaaaggcaaacagccttggcataccaattattacagccacacaaatgcttgattcaatggcctcaagcccaaggcctacaagagctgaggtgagtgatgttgcaaatgcaatactcgatggcacggatgctgtaatgctctcaaatgagactgcggtgggtgattatcccattgagtctgtggcgactatggctactattgcgaaaagaatcgaacgagattatccacaaaaagcattagaaagtcatcttccaagcactattccaaatgcgattagtgcggctgtaagcagtattgctagacaaataaacgctgcagcaataatacctttaacaaaaagtggtgctaccgctaaaaacgtaagcaagtttagacctcccactccagtattggcagtaactaatgaaaagagtgttgccagcacgcttcaacttgtctggggagtaacgccccttctaatagaaaatcaaacaagcacatcaaaaacatttgatgatgccatgaatatggccaaaaaaatgaaaatcctcaagcaaggagatcttgttgttgagacagctggaacactttcaggtgtaagtgggtcaacagacttggtaaaggttgggatagttagttcagaagatgaaaatgaatctttatttatctaa

SEQ ID NO: 16502 - protein, 485 aa, Prochlorococcus marinus str. NATL2A
MKILDLARRTKIVATIGPATESASQISKLVEAGATTFRLNFSHGDHEEHAQRIKTIRKVSDDLGIHIGILQDLQGPKIRLGRFKNGPVNVKNGDKFILTSKNIDCNQDQANVTYDKLAEEVNVGNRILLDDGRVEMKVEEVDLKEQRLICSITVGGVLSNNKGVNFPDVQLSIRALTDKDKKDLAFGLKQGVDWVALSFVRNPSDLIEIKDLIRNHGYDTPVVAKIEKFEAIDQIDAVLKLCDGVMVARGDLGVEMPAEEVPLLQKQLIKKANSLGIPIITATQMLDSMASSPRPTRAEVSDVANAILDGTDAVMLSNETAVGDYPIESVATMATIAKRIERDYPQKALESHLPSTIPNAISAAVSSIARQINAAAIIPLTKSGATAKNVSKFRPPTPVLAVTNEKSVASTLQLVWGVTPLLIENQTSTSKTFDDAMNMAKKMKILKQGDLVVETAGTLSGVSGSTDLVKVGIVSSEDENESLFI

SEQ ID NO: 16503 - DNA, 1434 bp, Methanosarcina barkeri str. Fusaro; identical to SEQ ID NO: 8553
  CDS (1)..(1434): transl_table=11

SEQ ID NO: 16504 - protein, 477 aa, Methanosarcina barkeri str. Fusaro; identical to SEQ ID NO: 8554

SEQ ID NO: 16505 - DNA, 1434 bp, Thiobacillus denitrificans ATCC 25259; identical to SEQ ID NO: 8555
  CDS (1)..(1434): transl_table=11

SEQ ID NO: 16506 - protein, 477 aa, Thiobacillus denitrificans ATCC 25259; identical to SEQ ID NO: 8556

SEQ ID NO: 16507 - DNA, 1431 bp, Anabaena variabilis ATCC 29413; identical to SEQ ID NO: 15790
  CDS (1)..(1431): transl_table=11

SEQ ID NO: 16508 - protein, 476 aa, Anabaena variabilis ATCC 29413; identical to SEQ ID NO: 15791

SEQ ID NO: 16509 - DNA, 1446 bp, Rhodobacter sphaeroides 2.4.1; identical to SEQ ID NO: 8559
  CDS (1)..(1446): transl_table=11

SEQ ID NO: 16510 - protein, 481 aa, Rhodobacter sphaeroides 2.4.1; identical to SEQ ID NO: 8560

SEQ ID NO: 16511 - DNA, 1752 bp, Carboxydothermus hydrogenoformans Z-2901; identical to SEQ ID NO: 8561
  CDS (1)..(1752): transl_table=11

SEQ ID NO: 16512 - protein, 583 aa, Carboxydothermus hydrogenoformans Z-2901; identical to SEQ ID NO: 8562

SEQ ID NO: 16513 - DNA, 1443 bp, Geobacter metallireducens GS-15; identical to SEQ ID NO: 8563
  CDS (1)..(1443): transl_table=11

SEQ ID NO: 16514 - protein, 480 aa, Geobacter metallireducens GS-15; identical to SEQ ID NO: 8564

SEQ ID NO: 16515 - DNA, 1794 bp, Prochlorococcus marinus str. MIT 9312; identical to SEQ ID NO: 8565
  CDS (1)..(1794): transl_table=11

SEQ ID NO: 16516 - protein, 597 aa, Prochlorococcus marinus str. MIT 9312; identical to SEQ ID NO: 8566

SEQ ID NO: 16517 - DNA, 1437 bp, Rhodospirillum rubrum ATCC 11170; identical to SEQ ID NO: 8567
  CDS (1)..(1437): transl_table=11

SEQ ID NO: 16518 - protein, 478 aa, Rhodospirillum rubrum ATCC 11170; identical to SEQ ID NO: 8568

SEQ ID NO: 16519 - DNA, 1749 bp, Moorella thermoacetica ATCC 39073; identical to SEQ ID NO: 8569
  CDS (1)..(1749): transl_table=11

SEQ ID NO: 16520 - protein, 582 aa, Moorella thermoacetica ATCC 39073; identical to SEQ ID NO: 8570

SEQ ID NO: 16521 - DNA, 1428 bp, Syntrophus aciditrophicus SB; identical to SEQ ID NO: 8571
  CDS (1)..(1428): transl_table=11

SEQ ID NO: 16522 - protein, 475 aa, Syntrophus aciditrophicus SB; identical to SEQ ID NO: 8572

SEQ ID NO: 16523 - DNA, 1416 bp, Frankia sp. CcI3; identical to SEQ ID NO: 8573
  CDS (1)..(1416): transl_table=11

SEQ ID NO: 16524 - protein, 471 aa, Frankia sp. CcI3; identical to SEQ ID NO: 8574

SEQ ID NO: 16525 - DNA, 1437 bp, Francisella tularensis subsp. holarctica; identical to SEQ ID NO: 8577
  CDS (1)..(1437): transl_table=11

SEQ ID NO: 16526 - protein, 478 aa, Francisella tularensis subsp. holarctica; identical to SEQ ID NO: 8578

SEQ ID NO: 16527 - DNA, 1734 bp, Desulfitobacterium hafniense Y51; identical to SEQ ID NO: 8579
  CDS (1)..(1734): transl_table=11

SEQ ID NO: 16528 - protein, 577 aa, Desulfitobacterium hafniense Y51; identical to SEQ ID NO: 8580

SEQ ID NO: 16529 - DNA, 1443 bp, Methylobacillus flagellatus KT; identical to SEQ ID NO: 8583
  CDS (1)..(1443): transl_table=11

SEQ ID NO: 16530 - protein, 480 aa, Methylobacillus flagellatus KT; identical to SEQ ID NO: 8584

SEQ ID NO: 16531 - DNA, 1437 bp, Burkholderia xenovorans LB400
  CDS (1)..(1437): transl_table=11
atgcatcgcgccaccaagattgtcgccaccatcggaccggcttccaatacgccggaaatcctgctgcaaatgattcaggcagggttggacgtggtgcggctcaatttttcgcacggcaccgccgacgaccaccgccagcgcgccggattcgtgcgcgaggcggcccgccaggccggccgcgaagtcgccatcatggcggacctgcaaggcccgaagatccgggtcggcaaatttgaaaacggcaagatcatgctggtcgccggcgagccgttcgtgctcgacgccgactgcgaactcggcaacgagcaacgcgccggcctcgactacaaagacctgccgcgcgacctgaaaccgggcgacgtgctgttgcttaacgacggcctgatcgtgctgaacgtctcgcgcgtgatcggcaacgagatccacacggtcgtcaagatcggcggcgaactgtcgaacaacaagggcatcaaccgccagggcggcggcctgtccgcgccggcgctgaccgccaaggacatggaagatattcgcaccgccatgtcgctcggcgtcgattatgtcgcggtatcgtttccgaagaacgcgaccgacatggaaatggcccgccagctggcgaacattgccggcgcgccgttcggcgtcaagccgaagatgatcgccaagatcgagcgcgccgaagcgattccggcgctgcaaggcattctcgacgcgtcggacggcatcatggtcgcgcgcggcgatctggccgtggaagtggggaatgccgcagttccggcgctgcaaaagcgcatgattcgtatggcgcgcgaatcgaacaagttcgtgatcaccgccacgcagatgatggagtcgatgatccacgcgccggtgccgacccgcgccgaagtgtcggacgtcgccaacgccgtgctggacggcacggacgcggtgatgctgtcggcggaatcggcggcgggcaagtatccggtgcagaccatcgagacgatggcggcgatctgtatcgaggcggagaagtcggagcagtcggagctggacaaggatttcctcgaccgcacgttcacgcggatcgaccagtcgatcgcaatgggcgcgctcttcacggcgttccatctcggcgcgaaggcgatcgtggcgttgacggaatccggctcgaccgcgctgtggatgtcgcgtcactggactcacgtgccgatcttcgcgctcacgccgcgcgtcggcagtgaacgggcaatggcgctgtatcgcaacgtgacgtcgctgcatctcgataccaacaccgaccgcgacacggcgttgcagcaggcgttggagaccgtggtgagcaagggctacgcgtcgcgcggcgacatggtggtgctgacggtcggcgagccgatggggcaggccggcggcacgaatacgctgaagatcgtacgggtcggcgagccgtattga

SEQ ID NO: 16532 - protein, 478 aa, Burkholderia xenovorans LB400
MHRATKIVATIGPASNTPEILLQMIQAGLDVVRLNFSHGTADDHRQRAGFVREAARQAGREVAIMADLQGPKIRVGKFENGKIMLVAGEPFVLDADCELGNEQRAGLDYKDLPRDLKPGDVLLLNDGLIVLNVSRVIGNEIHTVVKIGGELSNNKGINRQGGGLSAPALTAKDMEDIRTAMSLGVDYVAVSFPKNATDMEMARQLANIAGAPFGVKPKMIAKIERAEAIPALQGILDASDGIMVARGDLAVEVGNAAVPALQKRMIRMARESNKFVITATQMMESMIHAPVPTRAEVSDVANAVLDGTDAVMLSAESAAGKYPVQTIETMAAICIEAEKSEQSELDKDFLDRTFTRIDQSIAMGALFTAFHLGAKAIVALTESGSTALWMSRHWTHVPIFALTPRVGSERAMALYRNVTSLHLDTNTDRDTALQQALETVVSKGYASRGDMVVLTVGEPMGQAGGTNTLKIVRVGEPY

SEQ ID NO: 16533 - DNA, 1467 bp, Ralstonia metallidurans CH34
  CDS (1)..(1467): transl_table=11
atgagacgccagcgcaaagccaagatcgtggccacactgggcccggccagcacggacatcgcggtcatccgccaactgttcgatgccggggccgacgtgttccggctgaacttcagccacggcacgcacgaggaccaccgcgcgcgctacgacgccgtgcgtcaggtggaagccgagaccggccgtccgatcgcaatcctggccgacctgcagggcccgaaactgcgcatcggcacgttcgcggccggcaaggtggccgtgagcgccggcgacacgttcgtcctcgacagcgacccgacgccgggcgatgcgaagcgcgtctacctgccccaccccgagctgttcaaggccgccaacgcgggccagtcgctgctgatcgacgacggcaaggtacgcctgaacatcgaatcggtggctagcggcagcatcaccacgcgcgtggccaacaacggcacgctgtccgaccgcaagggtgtgaacgtgcccgacgcggtgatcccgatccccgcgctgaccgaaaaggatcgcaaggatctggccttcgcactggagcttggcgccgactggatcgcgctgtcgttcgtgcagcgtccgtcggacatcctcgaagcgcgcgaactgatcggcacgcgtgccggcgtgctgtcgaagatcgagaagccggccgcgttgcagcagctcgaggaaatcgtacgggtgtcggatgcagtgatggtcgcgcgtggtgacctcggcgtggaactgccgcccgagcgcgtgccgggtgtgcagaagcgcatcctgcgcatctgccgccagctgggcaaaccgatcgtgatcgccacgcagatgctcgaatcgatgatcgactcgccggtgccgacgcgcgccgaagcgtccgacgtggcgagtgcgatctatgacggcgccgatgccgtgatgctgtcggccgaatcggccaatggccgtcatccggtggccgctgtctcgatcatgaatcgcatcatcaccgaggtcgagaacgatccgctctaccgcaacatgatcgacgcccagcacgaggcaccgctctccacgcgccaggacgcgatctgcgcggcgctgcgcgaggtcacgcagatcatcggcgcgaaggccacggtgacgtacacgtcgtccggcgccaccgcgctgcgcgcggcacgtgagcggccatgcgcgccgatcgtcagcatcacgccgaacctggagatcgcgcgtcggctggccatcacctggggggtgcattcgactgtcagcccggacgtgcagagcgtcgacgaaatggtcgaggccgccgcgcgcgccgcgctggtggaaggctatgccgcaccgggcgaccagatcaccatcgcggccgggatgccatttggccagggcggcacgaccaacctgctgcgcgtggcagaggtgggtacggaagtggccgggctggacatcggcaaggtgccggctgccgaggcggtttga

SEQ ID NO: 16534 - protein, 488 aa, Ralstonia metallidurans CH34
MRRQRKAKIVATLGPASTDIAVIRQLFDAGADVFRLNFSHGTHEDHRARYDAVRQVEAETGRPIAILADLQGPKLRIGTFAAGKVAVSAGDTFVLDSDPTPGDAKRVYLPHPELFKAANAGQSLLIDDGKVRLNIESVASGSITTRVANNGTLSDRKGVNVPDAVIPIPALTEKDRKDLAFALELGADWIALSFVQRPSDILEARELIGTRAGVLSKIEKPAALQQLEEIVRVSDAVMVARGDLGVELPPERVPGVQKRILRICRQLGKPIVIATQMLESMIDSPVPTRAEASDVASAIYDGADAVMLSAESANGRHPVAAVSIMNRIITEVENDPLYRNMIDAQHEAPLSTRQDAICAALREVTQIIGAKATVTYTSSGATALRAARERPCAPIVSITPNLEIARRLAITWGVHSTVSPDVQSVDEMVEAAARAALVEGYAAPGDQITIAAGMPFGQGGTTNLLRVAEVGTEVAGLDIGKVPAAEAV

SEQ ID NO: 16535 - DNA, 1530 bp, Acidobacteria bacterium Ellin345; identical to SEQ ID NO: 8587
  CDS (1)..(1530): transl_table=11

SEQ ID NO: 16536 - protein, 509 aa, Acidobacteria bacterium Ellin345; identical to SEQ ID NO: 8588

SEQ ID NO: 16537 - DNA, 1434 bp, Myxococcus xanthus DK 1622; identical to SEQ ID NO: 8591
  CDS (1)..(1434): transl_table=11

SEQ ID NO: 16538 - protein, 477 aa, Myxococcus xanthus DK 1622; identical to SEQ ID NO: 8592

SEQ ID NO: 16539 - DNA, 1413 bp, Cytophaga hutchinsonii ATCC 33406; identical to SEQ ID NO: 8597
  CDS (1)..(1413): transl_table=11

SEQ ID NO: 16540 - protein, 470 aa, Cytophaga hutchinsonii ATCC 33406; identical to SEQ ID NO: 8598

SEQ ID NO: 16541 - DNA, 1404 bp, Clostridium perfringens ATCC 13124; identical to SEQ ID NO: 15822
  CDS (1)..(1404): transl_table=11

SEQ ID NO: 16542 - protein, 467 aa, Clostridium perfringens ATCC 13124; identical to SEQ ID NO: 15823

SEQ ID NO: 16543 - DNA, 1419 bp, Rhodococcus sp. RHA1
  CDS (1)..(1419): transl_table=11
gtgaaccgacgcacgaagatcgtatgcacacttggacctgctaccgccaccggtgaccgtattcgcgaactcgtcgaaagcggtatggacgtggcgcggctgaatttcagccacggcgaacacgccgaccacgaggagaactacaaacgcgtccgggcggcctcggacgcgacggggaaggcggtcggtgtcctcgccgacctgcagggcccgaagatccggctcggccggttcgccgaggggcgcaccacgtgggccaacggtgaggaagtgcggatcaccgtcgacgaggtcgagggcacccacgaccgggtgtcgaccacctacaagcagctcgccgaggacgccaaggccggtgaccgcctgctggtcgacgacggcaaggtcggtctcgtcgtctccggggtggacggcaacgacgtgatctgccgggtcaccgagggcggcccggtcagcaacaacaagggtgtgtccctgccggggatgaacgtgtcggtcccggcgctgtcggagaaggacatcgccgacctcgagttcgcgctcggtctcggtgtcgacttcatcgccctgtcgttcgtgcggtcgccggccgatgtggaactggttcacgccgtgatggatcgggtcggtcgccggatcccggtgatcgcgaagctcgagaagccggaggcgatcgacaacctcgaggcgatcgtgctggcgttcgacgcggtgatggtcgcccgtggtgatctgggggtggagttgccgctcgagcaggtgccgctggtgcagaagcgggcgatccagatcgcccgggagaacgcgaagccggtcatcgtcgcgacgcagatgctggagtcgatgatcgagaactcgcggcccacccgcgccgaggcgtccgacgtcgcgaacgcggtcctcgacggtgcggacgcggtgatgctgtcgggtgagacgtcggtgggcaagtacgtgatggagacggtgcgcacgatggcgcggatcgtcgaggcggtggagaacgagtccactcaggtgccgccgctcacgcacgtgccgcggaccaagcgcggtgtcatctcctatgcggcccgcgacatcggggagcggctggatgcgaaggcgctggtcgcgttcacccagtccggggacacggtgcgccggttggcgcggctgcacacgccgttgccgttgctggcgttcaccccgctgccggaggtgcgcagccagttgtcgctgacgtggggtaccgagacgttcatcgtcgatccggtcgagagcaccgacgcgatggtgcggcaggtcgaccacgcgctgctcgggttgggccggtaccagaagggggaactggtggtcatcgtggccgggtcgccgcccggcaccgttggctcgaccaacctgatccacgtccacagaatcggcgaagaggaccactag

SEQ ID NO: 16544 - protein, 472 aa, Rhodococcus sp. RHA1
MNRRTKIVCTLGPATATGDRIRELVESGMDVARLNFSHGEHADHEENYKRVRAASDATGKAVGVLADLQGPKIRLGRFAEGRTTWANGEEVRITVDEVEGTHDRVSTTYKQLAEDAKAGDRLLVDDGKVGLVVSGVDGNDVICRVTEGGPVSNNKGVSLPGMNVSVPALSEKDIADLEFALGLGVDFIALSFVRSPADVELVHAVMDRVGRRIPVIAKLEKPEAIDNLEAIVLAFDAVMVARGDLGVELPLEQVPLVQKRAIQIARENAKPVIVATQMLESMIENSRPTRAEASDVANAVLDGADAVMLSGETSVGKYVMETVRTMARIVEAVENESTQVPPLTHVPRTKRGVISYAARDIGERLDAKALVAFTQSGDTVRRLARLHTPLPLLAFTPLPEVRSQLSLTWGTETFIVDPVESTDAMVRQVDHALLGLGRYQKGELVVIVAGSPPGTVGSTNLIHVHRIGEEDH

SEQ ID NO: 16545 - DNA, 1440 bp, Rhizobium leguminosarum bv. viciae 3841; identical to SEQ ID NO: 8611
  CDS (1)..(1440): transl_table=11

SEQ ID NO: 16546 - protein, 479 aa, Rhizobium leguminosarum bv. viciae 3841; identical to SEQ ID NO: 8612

SEQ ID NO: 16547 - DNA, 1434 bp, Pseudomonas aeruginosa UCBPP-PA14
  CDS (1)..(1434): transl_table=11
atgacagccgacaagaaagccaagatcctcgccaccctcggcccggccacccgcagccgcgacgatatccgtgccctggtggaggccggcgccaacctgttccgcctgaacttcagccacggcgactacgccgatcacgcgcagcgcttcgcctgggtgcgcgaggtggaagcggaactgaactacccgatcggcgtgctcatggacctgcagggtccgaagctgcgggtcggccgcttcgccgccggtgccgtgcaattgcagcgcgggcagaccttcaccctcgacctcagcgacgcccccggtgacgagcggcgggtcaacctgccgcatccggagatcatccatgccctggagccgggtatgagcctgctgctggacgacggcaagatccgcctggaagtggtcaacggccacagcgacgccatcgagacccgcgtggcggtgggtggcgagctgtccgatcgcaagggcgtcaacgtgccggaagcggtgctgcaactcagcccgctgaccgacaaggaccgccgcgacctggccttcggcctggaactgggggtcgactgggtggcgctgtccttcgtgcaacgcccggaggacatcgacgaggcccgtgggctgatcggcgacaaggccttcctcatggctaagatcgagaagcccagcgcggtgagcgccatcgaggcgatcgccgagcgcgccgacgcgatcatggtggcgcgcggcgacctcggcgtagaggtgccggcggagagcgtgccgggcatccagaaacgcatcgtccaggtctgccgccagctcggcaagccggtggtggtggctacccagatgctcgagtcgatgcgcttctcccccgccccgacccgcgccgaggtgaccgacgtagccaccgcggtgggcgccggcgccgacgcggtgatgctctcggcggaaaccgcttccggacaataccctcgcgaggcggtagagatgatggcgaagatcgtccgtcaggtggaggccgagccggactaccacgtccagctcgaggtcaaccgtccgcagcccgacgctaccgtctccgatgcgatcagctgcgcgatccgccgggtcagccggatcctcccggtggcggtgctggtgaactacaccgagtcgggcaactcgaccctgcgcgccgcccgcgagcggcccaaggcgccgatcctcagcctgaccccgaacctgcgtaccgcgcggcgactgaccgtggcctggggcgtgtattcggtggtcaacgagcaactggcgcacgtcgacgagatctgctcgaccgccctcgacatcgccctggcccagcgtatggcgcgccgcggcgacaccgtggtggtcaccgccggcgtgccgttcggtcgccccggctcgaccaacatgctgcgcatcgagaccgtggcgccgccgctgggagatctctga

SEQ ID NO: 16548 - protein, 477 aa, Pseudomonas aeruginosa UCBPP-PA14
MTADKKAKILATLGPATRSRDDIRALVEAGANLFRLNFSHGDYADHAQRFAWVREVEAELNYPIGVLMDLQGPKLRVGRFAAGAVQLQRGQTFTLDLSDAPGDERRVNLPHPEIIHALEPGMSLLLDDGKIRLEVVNGHSDAIETRVAVGGELSDRKGVNVPEAVLQLSPLTDKDRRDLAFGLELGVDWVALSFVQRPEDIDEARGLIGDKAFLMAKIEKPSAVSAIEAIAERADAIMVARGDLGVEVPAESVPGIQKRIVQVCRQLGKPVVVATQMLESMRFSPAPTRAEVTDVATAVGAGADAVMLSAETASGQYPREAVEMMAKIVRQVEAEPDYHVQLEVNRPQPDATVSDAISCAIRRVSRILPVAVLVNYTESGNSTLRAARERPKAPILSLTPNLRTARRLTVAWGVYSVVNEQLAHVDEICSTALDIALAQRMARRGDTVVVTAGVPFGRPGSTNMLRIETVAPPLGDL

SEQ ID NO: 16549 - DNA, 1764 bp, Pediococcus pentosaceus ATCC 25745; identical to SEQ ID NO: 8615
  CDS (1)..(1764): transl_table=11

SEQ ID NO: 16550 - protein, 587 aa, Pediococcus pentosaceus ATCC 25745; identical to SEQ ID NO: 8616

SEQ ID NO: 16551 - DNA, 1434 bp, Oenococcus oeni PSU-1; identical to SEQ ID NO: 8617
  CDS (1)..(1434): transl_table=11

SEQ ID NO: 16552 - protein, 477 aa, Oenococcus oeni PSU-1; identical to SEQ ID NO: 8618

SEQ ID NO: 16553 - DNA, 1422 bp, Leuconostoc mesenteroides subsp. mesenteroides ATCC 8293; identical to SEQ ID NO: 15836
  CDS (1)..(1422): transl_table=11

SEQ ID NO: 16554 - protein, 473 aa, Leuconostoc mesenteroides subsp. mesenteroides ATCC 8293; identical to SEQ ID NO: 15837

SEQ ID NO: 16555 - DNA, 1413 bp, Solibacter usitatus Ellin6076; identical to SEQ ID NO: 8619
  CDS (1)..(1413): transl_table=11

SEQ ID NO: 16556 - protein, 470 aa, Solibacter usitatus Ellin6076; identical to SEQ ID NO: 8620

SEQ ID NO: 16557 - DNA, 1710 bp, Magnetococcus sp. MC-1; identical to SEQ ID NO: 15840
  CDS (1)..(1710): transl_table=11

SEQ ID NO: 16558 - protein, 569 aa, Magnetococcus sp. MC-1; identical to SEQ ID NO: 15841

SEQ ID NO: 16559 - DNA, 1434 bp, Mycobacterium smegmatis str. MC2 155; identical to SEQ ID NO: 8623
  CDS (1)..(1434): transl_table=11

SEQ ID NO: 16560 - protein, 477 aa, Mycobacterium smegmatis str. MC2 155; identical to SEQ ID NO: 8624

SEQ ID NO: 16561 - DNA, 1437 bp, Acidovorax sp. JS42; identical to SEQ ID NO: 8627
  CDS (1)..(1437): transl_table=11

SEQ ID NO: 16562 - protein, 478 aa, Acidovorax sp. JS42; identical to SEQ ID NO: 8628

SEQ ID NO: 16563 - DNA, 1776 bp, Crocosphaera watsonii WH 8501; identical to SEQ ID NO: 8631
  CDS (1)..(1776): transl_table=11

SEQ ID NO: 16564 - protein, 591 aa, Crocosphaera watsonii WH 8501; identical to SEQ ID NO: 8632

SEQ ID NO: 16565 - DNA, 1749 bp, Exiguobacterium sibiricum 255-15; identical to SEQ ID NO: 15850
  CDS (1)..(1749): transl_table=11

SEQ ID NO: 16566 - protein, 582 aa, Exiguobacterium sibiricum 255-15; identical to SEQ ID NO: 15851

SEQ ID NO: 16567 - DNA, 1569 bp, Kineococcus radiotolerans SRS30216; identical to SEQ ID NO: 8633
  CDS (1)..(1569): transl_table=11

SEQ ID NO: 16568 - protein, 522 aa, Kineococcus radiotolerans SRS30216; identical to SEQ ID NO: 8634

SEQ ID NO: 16569 - DNA, 1467 bp, Xylella fastidiosa Ann-1; identical to SEQ ID NO: 15852
  CDS (1)..(1467): transl_table=11

SEQ ID NO: 16570 - protein, 488 aa, Xylella fastidiosa Ann-1; identical to SEQ ID NO: 15853

SEQ ID NO: 16571 - DNA, 1446 bp, Oceanicola batsensis HTCC2597; identical to SEQ ID NO: 8639
  CDS (1)..(1446): transl_table=11

SEQ ID NO: 16572 - protein, 481 aa, Oceanicola batsensis HTCC2597; identical to SEQ ID NO: 8640

SEQ ID NO: 16573 - DNA, 1767 bp, Synechococcus sp. RS9917; identical to SEQ ID NO: 8643
  CDS (1)..(1767): transl_table=11

SEQ ID NO: 16574 - protein, 588 aa, Synechococcus sp. RS9917; identical to SEQ ID NO: 8644

SEQ ID NO: 16575 - DNA, 1437 bp, Pseudoalteromonas tunicata D2; identical to SEQ ID NO: 8645
  CDS (1)..(1437): transl_table=11

SEQ ID NO: 16576 - protein, 478 aa, Pseudoalteromonas tunicata D2; identical to SEQ ID NO: 8646

SEQ ID NO: 16577 - DNA, 1413 bp, Photobacterium sp. SKA34; identical to SEQ ID NO: 15858
  CDS (1)..(1413): transl_table=11

SEQ ID NO: 16578 - protein, 470 aa, Photobacterium sp. SKA34; identical to SEQ ID NO: 15859

SEQ ID NO: 16579 - DNA, 1437 bp, Oceanospirillum sp. MED92; identical to SEQ ID NO: 8649
  CDS (1)..(1437): transl_table=11

SEQ ID NO: 16580 - protein, 478 aa, Oceanospirillum sp. MED92; identical to SEQ ID NO: 8650

SEQ ID NO: 16581 - DNA, 1431 bp, Flavobacteria bacterium BBFL7; identical to SEQ ID NO: 8653
  CDS (1)..(1431): transl_table=11

SEQ ID NO: 16582 - protein, 476 aa, Flavobacteria bacterium BBFL7; identical to SEQ ID NO: 8654

SEQ ID NO: 16583 - DNA, 1482 bp, delta proteobacterium MLMS-1; identical to SEQ ID NO: 15864
  CDS (1)..(1482): transl_table=11

SEQ ID NO: 16584 - protein, 493 aa, delta proteobacterium MLMS-1; identical to SEQ ID NO: 15865

SEQ ID NO: 16585 - DNA, 1431 bp, Rickettsiella grylli; identical to SEQ ID NO: 8657
  CDS (1)..(1431): transl_table=11

SEQ ID NO: 16586 - protein, 476 aa, Rickettsiella grylli; identical to SEQ ID NO: 8658

SEQ ID NO: 16587 - DNA, 1470 bp, Synechococcus sp. RS9916; identical to SEQ ID NO: 8659
  CDS (1)..(1470): transl_table=11

SEQ ID NO: 16588 - protein, 489 aa, Synechococcus sp. RS9916; identical to SEQ ID NO: 8660

SEQ ID NO: 16589 - DNA, 1437 bp, Alteromonadales bacterium TW-7; identical to SEQ ID NO: 8661
  CDS (1)..(1437): transl_table=11

SEQ ID NO: 16590 - protein, 478 aa, Alteromonadales bacterium TW-7; identical to SEQ ID NO: 8662

SEQ ID NO: 16591 - DNA, 1437 bp, marine gamma proteobacterium HTCC2143; identical to SEQ ID NO: 8663
  CDS (1)..(1437): transl_table=11

SEQ ID NO: 16592 - protein, 478 aa, marine gamma proteobacterium HTCC2143; identical to SEQ ID NO: 8664

SEQ ID NO: 16593 - DNA, 1455 bp, marine gamma proteobacterium HTCC2080; identical to SEQ ID NO: 8665
  CDS (1)..(1455): transl_table=11

SEQ ID NO: 16594 - protein, 484 aa, marine gamma proteobacterium HTCC2080; identical to SEQ ID NO: 8666

SEQ ID NO: 16595 - DNA, 1416 bp, Pseudomonas putida GB-1; identical to SEQ ID NO: 8667
  CDS (1)..(1416): transl_table=11

SEQ ID NO: 16596 - protein, 471 aa, Pseudomonas putida GB-1; identical to SEQ ID NO: 8668

SEQ ID NO: 16597 - DNA, 1455 bp, Pseudomonas putida GB-1; identical to SEQ ID NO: 8669
  CDS (1)..(1455): transl_table=11

SEQ ID NO: 16598 - protein, 484 aa, Pseudomonas putida GB-1; identical to SEQ ID NO: 8670

SEQ ID NO: 16599 - DNA, 1761 bp, Bacillus sp. SG-1; identical to SEQ ID NO: 15880
  CDS (1)..(1761): transl_table=11

SEQ ID NO: 16600 - protein, 586 aa, Bacillus sp. SG-1; identical to SEQ ID NO: 15881

SEQ ID NO: 16601 - DNA, 1413 bp, Moritella sp. PE36; identical to SEQ ID NO: 15884
  CDS (1)..(1413): transl_table=11

SEQ ID NO: 16602 - protein, 470 aa, Moritella sp. PE36; identical to SEQ ID NO: 15885

SEQ ID NO: 16603 - DNA, 1446 bp, Magnetospirillum gryphiswaldense; identical to SEQ ID NO: 8679
  CDS (1)..(1446): transl_table=11

SEQ ID NO: 16604 - protein, 481 aa, Magnetospirillum gryphiswaldense; identical to SEQ ID NO: 8680

SEQ ID NO: 16605 - DNA, 1503 bp, Streptococcus bovis; identical to SEQ ID NO: 15890
  CDS (1)..(1503): transl_table=11

SEQ ID NO: 16606 - protein, 500 aa, Streptococcus bovis; identical to SEQ ID NO: 15891

SEQ ID NO: 16607 - DNA, 1503 bp, Vitis vinifera; identical to SEQ ID NO: 15892
  CDS (1)..(1503)

SEQ ID NO: 16608 - protein, 500 aa, Vitis vinifera; identical to SEQ ID NO: 15893

SEQ ID NO: 16609 - DNA, 1743 bp, Vitis vinifera; identical to SEQ ID NO: 15894
  CDS (1)..(1743)
  misc_feature (200)..(200): y is t or c
  misc_feature (1338)..(1338): y is t or c

SEQ ID NO: 16610 - protein, 580 aa, Vitis vinifera; identical to SEQ ID NO: 15895
  misc_feature (67)..(67): The Xaa at location 67 stands for Met, or Thr.

SEQ ID NO: 16611 - DNA, 1866 bp, Vitis vinifera; identical to SEQ ID NO: 15896
  CDS (1)..(1866)

SEQ ID NO: 16612 - protein, 621 aa, Vitis vinifera; identical to SEQ ID NO: 15897

SEQ ID NO: 16613 - DNA, 1326 bp, Nosema bombycis; identical to SEQ ID NO: 15900
  CDS (1)..(1326)

SEQ ID NO: 16614 - protein, 441 aa, Nosema bombycis; identical to SEQ ID NO: 15901

SEQ ID NO: 16615 - DNA, 1755 bp, Bacillus subtilis; identical to SEQ ID NO: 8681
  CDS (1)..(1755): transl_table=11

SEQ ID NO: 16616 - protein, 584 aa, Bacillus subtilis; identical to SEQ ID NO: 8682

SEQ ID NO: 16617 - DNA, 1428 bp, Zymomonas mobilis; identical to SEQ ID NO: 8683
  CDS (1)..(1428): transl_table=11

SEQ ID NO: 16618 - protein, 475 aa, Zymomonas mobilis; identical to SEQ ID NO: 8684

SEQ ID NO: 16619 - DNA, 2100 bp, Ostreococcus tauri; identical to SEQ ID NO: 8685
  CDS (1)..(2100)

SEQ ID NO: 16620 - protein, 699 aa, Ostreococcus tauri; identical to SEQ ID NO: 8686

SEQ ID NO: 16621 - DNA, 1692 bp, Crassostrea gigas; identical to SEQ ID NO: 15908
  CDS (1)..(1692)

SEQ ID NO: 16622 - protein, 563 aa, Crassostrea gigas; identical to SEQ ID NO: 15909

SEQ ID NO: 16623 - DNA, 1533 bp, Arabidopsis thaliana; identical to SEQ ID NO: 8689
  CDS (1)..(1533)

SEQ ID NO: 16624 - protein, 510 aa, Arabidopsis thaliana; identical to SEQ ID NO: 8690

SEQ ID NO: 16625 - DNA, 1437 bp, Spiroplasma citri; identical to SEQ ID NO: 15910
  CDS (1)..(1437): transl_table=4

SEQ ID NO: 16626 - protein, 478 aa, Spiroplasma citri; identical to SEQ ID NO: 15911

SEQ ID NO: 16627 - DNA, 1536 bp, Capsicum annuum; identical to SEQ ID NO: 8691
  CDS (1)..(1536)

SEQ ID NO: 16628 - protein, 511 aa, Capsicum annuum; identical to SEQ ID NO: 8692

SEQ ID NO: 16629 - DNA, 1422 bp, Lactobacillus reuteri
  CDS (1)..(1422): transl_table=11
atgaagaaaaccaagattgtaagtacacttggtcctgcaagtactgatgttgatacgatcgttaagttgatcaatgcgggagctaacattttccgtttcaacttctcacacggtgaccacccagaacacttgggtcggatcgaaaacgtacacaaggctgaagaaattactggcaagcacgttggtcttatgcttgatactaagggtgccgaaattcggactactgttcaaaaagaaggtaagatcaactttgaaattggcgacaaggttcgcatttcaatggatccttcaattgaaggtactcatgacaagattgctgttacctacccaggcttatacgatgatactcatgttggtggccatgttctttttgatgatggtttaattgacatggttattgatgaaaaagacgatgcaaacaaggaacttgtatgtcacgtcttaaaccatggtgttcttggttctcggaagggtgttaacgcccctggtgtatcaatcaacttaccaggtattactgaaaaggacagtagcgatattcgttttggtttggaaaacaagatcaactacattgctgcatccttcgttcgtaaggctcaagatgttcttgacattcgcgaattacttaaggaaaagaacatggaagatgttcaaattttccctaagattgaatctcaagaaggtatcgacaactttgaagaaatcattgctgtttctgacggtttaatggtacctcgtggtgacatgggtgttgaaattcctgcccaaaatgtgccaattgttcaaaagcacatgatcaagcgttgtaacgaattaggtaagccagttattactgctacccaaatgcttgactcaatgcaagaaaacccacgtccaacccgtgccgaagtatcagacgttgctaacgccgtatttgacggtactgatgctactatgctttctggtgaaagtgctaacggtgactacccagttgaatctgttgcaatgatgaacgacattgacattaaggctgaaaaccacctttgggaattcggtactgaaaagttcgattgggacaagtctgacgtaactgaaactatcggttctgctgttgctaacgcagctaaagacttagacattcacacaattgttgcttacactgcttcaggctacactgctaagatgatttctaagtaccgtcctaatgctgatatcgttgcattaactccaaacgaacgtgtagaacgtggacttatgatcaactggggtgttcaaccatacgttgttgatgaaatgaagaacactgatacaatgttcgacttagctgctaagaaggctgttgaacttggctttgctaagaagggcgacaggatcatcatcgttgctggtgttcctttgggtgtaccaggtgcaactaacatgatgcgtgttaagactatcgactaa

SEQ ID NO: 16630 - protein, 473 aa, Lactobacillus reuteri
MKKTKIVSTLGPASTDVDTIVKLINAGANIFRFNFSHGDHPEHLGRIENVHKAEEITGKHVGLMLDTKGAEIRTTVQKEGKINFEIGDKVRISMDPSIEGTHDKIAVTYPGLYDDTHVGGHVLFDDGLIDMVIDEKDDANKELVCHVLNHGVLGSRKGVNAPGVSINLPGITEKDSSDIRFGLENKINYIAASFVRKAQDVLDIRELLKEKNMEDVQIFPKIESQEGIDNFEEIIAVSDGLMVPRGDMGVEIPAQNVPIVQKHMIKRCNELGKPVITATQMLDSMQENPRPTRAEVSDVANAVFDGTDATMLSGESANGDYPVESVAMMNDIDIKAENHLWEFGTEKFDWDKSDVTETIGSAVANAAKDLDIHTIVAYTASGYTAKMISKYRPNADIVALTPNERVERGLMINWGVQPYVVDEMKNTDTMFDLAAKKAVELGFAKKGDRIIIVAGVPLGVPGATNMMRVKTID

SEQ ID NO: 16631 - DNA, 1731 bp, Medicago truncatula; identical to SEQ ID NO: 15914
  CDS (1)..(1731)

SEQ ID NO: 16632 - protein, 576 aa, Medicago truncatula; identical to SEQ ID NO: 15915

SEQ ID NO: 16633 - DNA, 1590 bp, Medicago truncatula; identical to SEQ ID NO: 15916
  CDS (1)..(1590)

SEQ ID NO: 16634 - protein, 529 aa, Medicago truncatula; identical to SEQ ID NO: 15917

SEQ ID NO: 16635 - DNA, 1437 bp, Nitrosovibrio sp
  CDS (1)..(1437): transl_table=11
atgatccgaagaacaaaaatagttgccaccctcggtcctgcatccagcgaccccaagacgctcgagcgcatgatccatgccggagtggatgttgtccgcatcaacttctcccacggcagccgggaagagcatatcgcgctggcggagctgacgcgctcgctggcacgttccgccggccccacggtgggcgtgttggcggacctgcaggggccgaaaatccgcatcggcaggtttgagcacggaaaaatcacgctcaaggccggcgacaagttcgtgctggatgccgaatgcgaactcggcaatcaggagcgggtgggactggattacaaggagctgcctaacgacgtggaaaccggctcgacgctgatgctggacgatggtcgcatcgtgctgggcgttgccaacgtcaaggggcggcaggtgtactgcgtggtggaacagggcggggtcctgtccaacaacaagggcatcaaccgcaaaggcggcgggctgagcgcgcccgcgctcaccaaaaaagacatggacgatatccggacagccgccgtgctcaaggcggattatctggccgtgtcctttccgcgctcgggcgatgacatacgctgggcgcgcgacttgatgcgcgaagccggcggcaaaagcctgctgatggcgaaaattgagcgttccgaggcaatccccgcgctgaaggacatactgcaggcttctgacgcgatcatggtggcgcgcggcgacctggcggtggaagtgggcgatgctgtcgtgccggcgctgcaaaagcagatgatacgcgccgctcgcgccgccaacaaactggtggtgaccgccacgcagatgatggaatcaatgatcaccagcccgattccgacccgggcggaagtgtccgacgtcgccaatgccgtgctggacggaaccgatgcggtcatgctgtcggcggaatccgctgccggccaatacccggtcgagtcggtcgaggcgatggccagggtgtgcctcgaggcggaaaaggaatatctggtgacgcaggagttgcggcgcatgccggacaccgtgccggaaacgatcgaggaagcgattgcccgggcgaccatgttcaccgccggtagcctgaagatccgcgtgattgccgcgctcactcatagcggcgtgaccgcactgctgatgtcgcgcaggagcaccaacgtgccgatcttcgcgttaagcccgcaggaggacacgcgccgcaagacgacgctgtttcgcggcgtctatccgatgaaattcggcggcggccagagtgatcccgagattatcctgaaccaggctgaagacgaactgctcaagcgcggcgcggtgcacaacggtgatctgatcgtgatgaccatcggcgaaccggtcggcaaggcaggcggcaccaataccatgaagatcgtcaaagtgggggaatacagaaaggcttga

SEQ ID NO: 16636 - protein, 478 aa, Nitrosovibrio sp
MIRRTKIVATLGPASSDPKTLERMIHAGVDVVRINFSHGSREEHIALAELTRSLARSAGPTVGVLADLQGPKIRIGRFEHGKITLKAGDKFVLDAECELGNQERVGLDYKELPNDVETGSTLMLDDGRIVLGVANVKGRQVYCVVEQGGVLSNNKGINRKGGGLSAPALTKKDMDDIRTAAVLKADYLAVSFPRSGDDIRWARDLMREAGGKSLLMAKIERSEAIPALKDILQASDAIMVARGDLAVEVGDAVVPALQKQMIRAARAANKLVVTATQMMESMITSPIPTRAEVSDVANAVLDGTDAVMLSAESAAGQYPVESVEAMARVCLEAEKEYLVTQELRRMPDTVPETIEEAIARATMFTAGSLKIRVIAALTHSGVTALLMSRRSTNVPIFALSPQEDTRRKTTLFRGVYPMKFGGGQSDPEIILNQAEDELLKRGAVHNGDLIVMTIGEPVGKAGGTNTMKIVKVGEYRKA

SEQ ID NO: 16637 - DNA, 1620 bp, Phaeodactylum tricornutum; identical to SEQ ID NO: 8699
  CDS (1)..(1620)

SEQ ID NO: 16638 - protein, 539 aa, Phaeodactylum tricornutum; identical to SEQ ID NO: 8700

SEQ ID NO: 16639 - DNA, 1632 bp, Phaeodactylum tricornutum; identical to SEQ ID NO: 8701
  CDS (1)..(1632)

SEQ ID NO: 16640 - protein, 543 aa, Phaeodactylum tricornutum; identical to SEQ ID NO: 8702

SEQ ID NO: 16641 - DNA, 1542 bp, Phaeodactylum tricornutum; identical to SEQ ID NO: 8703
  CDS (1)..(1542)

SEQ ID NO: 16642 - protein, 513 aa, Phaeodactylum tricornutum; identical to SEQ ID NO: 8704

SEQ ID NO: 16643 - DNA, 1998 bp, Phaeodactylum tricornutum; identical to SEQ ID NO: 8705
  CDS (1)..(1998)

SEQ ID NO: 16644 - protein, 665 aa, Phaeodactylum tricornutum; identical to SEQ ID NO: 8706

SEQ ID NO: 16645 - DNA, 1533 bp, Solanum tuberosum; identical to SEQ ID NO: 8707
  CDS (1)..(1533)

SEQ ID NO: 16646 - protein, 510 aa, Solanum tuberosum; identical to SEQ ID NO: 8708

SEQ ID NO: 16647 - DNA, 1533 bp, Citrus sinensis; identical to SEQ ID NO: 8709
  CDS (1)..(1533)

SEQ ID NO: 16648 - protein, 510 aa, Citrus sinensis; identical to SEQ ID NO: 8710

SEQ ID NO: 16649 - DNA, 1740 bp, Arabidopsis thaliana; identical to SEQ ID NO: 8711
  CDS (1)..(1740)

SEQ ID NO: 16650 - protein, 579 aa, Arabidopsis thaliana; identical to SEQ ID NO: 8712

SEQ ID NO: 16651 - DNA, 1509 bp, Glycine max; identical to SEQ ID NO: 8713
  CDS (1)..(1509)

SEQ ID NO: 16652 - protein, 502 aa, Glycine max; identical to SEQ ID NO: 8714

SEQ ID NO: 16653 - DNA, 1422 bp, Leuconostoc mesenteroides
  CDS (1)..(1422): transl_table=11
atgaaaaagacgaaaatcgtctcaacacttggtccgtcatcatctgatgtcgaaacaatcgtaaagttaatccaagcgggcgccaacgtattccgttttaacttttcacacggtgatcacgaagaacatttgggtcgtatgaatgctgttcacgaagccgaaaagattactggtaagacagttggtattttgttggacactaagggtgctgaaatccgtacaacaaagcaagctgacggcaagatcgaattccatacaggtgacacattgcgtattgcaatggatgaaaaccttgaaggaacgaaagaaaaaatcgccgttacatacgctggtttgttcgatgatgttaaagaaggtggacaagtcttgtttgatgatgggttgcttggtacaactgttatcgaaaaagattcagccactcgcgaattagttgttcgcgttgataatgatggtattttgggatcacgtaagggtgttaacgcacctggtgtttcaattaacttgccaggtattactgaaaaagatgctgatgacatccgttttggtttggatcacgaaatcaactatattgctgcttcattcgttcgtaagcctgaagatgtgcttgaaattcgtggactattgaaggaaaagaacatggaacatgttcaaattattcctaagattgaatcacaagaaggtattgacaaccttgatgcaattttggaagtttcagatgccttgacggtagcacgtggtgacatgggtgttgaaattcctgctgaaaacgtgcctttggttcaaaaagacatgattcgcaagatgaacaaggcaggtttacctgttattactgctacacaaatgcttgactcaatggaagaaaacccacgtcctacgcgtgccgaagcttccgatgttgccaacgctgtgtttgatggtactgatgcaacaatgttatcaggtgaatcagctaacggagactatccagttgaatctgttgccacaatggctgctatcgacgaaaaagctgaaacttcattgcgcgaaaacggtcgtcatgaggatattttcttcgatgagactgattcaacggaagctgttgcagcatctgttgctcgtatcgcacgcaatgtgaacgctaaggctgttgttgtatcaactaactctggttacactgcacgtatggtttcaaagcaccgtcctgatgttaacattttggccgttacttattcagaacgcgtacaacgtggtttgacattgaactatggtgttgttccagtagtttatgatgcaccaaagactattgacgaaatggttgacttagctaagaaggccgtaaaagaccaaggattggctaattcaggtgatactattgttattgcagcaggtgtaccaatgtcacaatcaggtacaacaaacatgttgactgttcaaacagtataa

SEQ ID NO: 16654 - protein, 473 aa, Leuconostoc mesenteroides
MKKTKIVSTLGPSSSDVETIVKLIQAGANVFRFNFSHGDHEEHLGRMNAVHEAEKITGKTVGILLDTKGAEIRTTKQADGKIEFHTGDTLRIAMDENLEGTKEKIAVTYAGLFDDVKEGGQVLFDDGLLGTTVIEKDSATRELVVRVDNDGILGSRKGVNAPGVSINLPGITEKDADDIRFGLDHEINYIAASFVRKPEDVLEIRGLLKEKNMEHVQIIPKIESQEGIDNLDAILEVSDALTVARGDMGVEIPAENVPLVQKDMIRKMNKAGLPVITATQMLDSMEENPRPTRAEASDVANAVFDGTDATMLSGESANGDYPVESVATMAAIDEKAETSLRENGRHEDIFFDETDSTEAVAASVARIARNVNAKAVVVSTNSGYTARMVSKHRPDVNILAVTYSERVQRGLTLNYGVVPVVYDAPKTIDEMVDLAKKAVKDQGLANSGDTIVIAAGVPMSQSGTTNMLTVQTV

SEQ ID NO: 16655 - DNA, 1530 bp, Zea mays; identical to SEQ ID NO: 8715
  CDS (1)..(1530)

SEQ ID NO: 16656 - protein, 509 aa, Zea mays; identical to SEQ ID NO: 8716

SEQ ID NO: 16657 - DNA, 1767 bp, Lactobacillus casei; identical to SEQ ID NO: 15934
  CDS (1)..(1767): transl_table=11

SEQ ID NO: 16658 - protein, 588 aa, Lactobacillus casei; identical to SEQ ID NO: 8718

SEQ ID NO: 16659 - DNA, 1425 bp, Microbispora rosea subsp
  CDS (1)..(1425): transl_table=11
gtgagtcgtcgagcaaagatcgtctgtaccctcgggcccgccacctcctccccggagcgcctacgcgagctcatcaaggcgggaatgaacgtcgcccgcttcaacctctcgcacggcagccacgagctgcacaaggaggtgttcgaccgggtcagggccgccgccgacgagctgggctgcgccgtcggcgtcctcgccgacctgcagggccccaagatccgtgtcggacgcttcgcctccggtcccgtacggctcggctacggcgacgtcttcacgatcactaccgaggacgtccccggtgaccgggacatcgtctccaccacgtacgagggcctgccgggcgatgtgaagcccggcgacacgatcctcgtggacgacggccggctgaacctcgaagtgaccgcagtggacgggccgcgcgtcgtcaccaaggtcgtcatcggaggcatgatctccgacaacaagggcctcaacctccccggcgtcgccgtcagcgccccggcgctcacggagaaggacgaggaggacctgcgctgggcgctgcgcaccggcttcgacatgatcgccctgtcgttcgtccggtgcccggacgcgctcgtccgcgcgatcatggaggaggagggcgtccggctcccgcttctcgcgaagatcgaaaagccgcaggccgtcgaacgcctcgaggagatcgtggacaccttcgacggcgtcatggtcgcccgcggcgacctcggcgtcgagctgccgctggagcaggtgccgatcgtccagcgccgcatcatcgacctgtgccgggagaaggcccaccccgtcatcgtggccacccagatgctcgactcgatgatgagctcaccccgccccacccgcgccgaggcctccgacgtcgcgtacgccgtcatggacggcgcggacgcggtcatgctgtccggcgagacctcggtcggcaactaccccgtcgaggcggtctccacgatggcccgcatcgcgtcgccgcggagagcaacacgctgcaggccacccacaccctggaccgcctgcccgagaccaccggcggcgcatcgcccgcgcggcgccgaggtcggcgcgatcgtcggggccaaggccctggtggcgtacacgatgtccggcgagaccgcccggcgcctggcccgctaccgctcgcccatcccgctgctggccttcacctccaacccgctggtgcgcggccagctcgcgctgacctggggcgtggagacgttcgaggtgccgttcgtgcaccacaccgacgacatggtccgccaggtcgaggcctcgctgctgtcgctcggcatctgcgagaagggcgacaaggtcgtcgtcgtcgccggctccccgcccggcaaccacggctccaccaactcgctgcgcgtccacaccatcggctcggcggtcgcccacccggcggtctga

SEQ ID NO: 16660 - protein, 474 aa, Microbispora rosea subsp
MSRRAKIVCTLGPATSSPERLRELIKAGMNVARFNLSHGSHELHKEVFDRVRAAADELGCAVGVLADLQGPKIRVGRFASGPVRLGYGDVFTITTEDVPGDRDIVSTTYEGLPGDVKPGDTILVDDGRLNLEVTAVDGPRVVTKVVIGGMISDNKGLNLPGVAVSAPALTEKDEEDLRWALRTGFDMIALSFVRCPDALVRAIMEEEGVRLPLLAKIEKPQAVERLEEIVDTFDGVMVARGDLGVELPLEQVPIVQRRIIDLCREKAHPVIVATQMLDSMMSSPRPTRAEASDVAYAVMDGADAVMLSGETSVGNYPVEAVSTMARIASPRRATRCRPPTPWTACPRPPAAHRPRGAEVGAIVGAKALVAYTMSGETARRLARYRSPIPLLAFTSNPLVRGQLALTWGVETFEVPFVHHTDDMVRQVEASLLSLGICEKGDKVVVVAGSPPGNHGSTNSLRVHTIGSAVAHPAV

SEQ ID NO: 16661 - DNA, 1521 bp, Saccharomyces bayanus; identical to SEQ ID NO: 8719
  CDS (1)..(1521)

SEQ ID NO: 16662 - protein, 506 aa, Saccharomyces bayanus; identical to SEQ ID NO: 8720

SEQ ID NO: 16663 - DNA, 1770 bp, Lactobacillus delbrueckii subsp
  CDS (1)..(1770): transl_table=11
atgaaaaaaacaaagattgttagtactttaggaccagcttcaaacgatattgaaactattaccaagttagccgaagcaggcgcaaacgtattccgtttcaacttctcacacggcgaccacgaagaacacttggcaagaatgaacatggttcgtgaagttgaaaagaagactggcaagcttttgggcatcgctttggacaccaagggtgctgaaatcagaaccactgaccaagaaggcggcaagttcactatcaacactggtgacgaaatccgcgtgtcaatggacgcaactaaggccggcaacaaggacatgatccacgttacctacccaggtctgttcgacgacactcacgtaggcggcactgtattgatcgacgacggtgctgttggtttgactatcaaggccaaggacgaagaaaagcgcgaattgatttgtgaagctcaaaacactggtgtcatcggctcaaagaagggtgttaacgctccaggtgttgaaatccgcctcccagggattactgaaaaggacactgacgacatccgctttggtttgaagcacggtattaacttcatctttgcttcttttgtacgtaaggctcaagacgttcttgacattcgcgcactttgcgaagaagctaacgcaccatacgttaagatcttcccaaagattgaatcacaagaaggtattgacaacatcgacgaaatcttgcaagtttcagatggtttgatggttgcccgtggtgacatgggtgttgaaatcccattcatcaacgtgccatttgttcaaaagactttgatcaagaagtgcaacgctttgggcaagccagttatcactgctactcaaatgctggactcaatgcaagaaaacccacgtccaacccgtgccgaagtaactgacgttgctaacgccgttcttgacggtactgacgcaactatgctgtcaggcgaatcagcaaacggtttgtacccagtagaatcagttcaagctatgcacgacatcaatgttcggactgaaaaggaaatggacacccggaacactctggctctgcaacgctttgaagaatacaagggctcaaacgttactgaagctatcggcgaatcagttgtccgcactgctcaagaactgggcgttaagactatcatcactgctactagctccggctacacagctcgtatgatctccaagtaccgtccagacgcaaccatcgttgccttgactttcgacgaaaagatccaacactcattgggtatcgtttggggcgttgaaccagttttggcaaagcaaccttcaaacactgacgaaatgttcgaagaagctgcccgcgtagctaaggaacacggtttcgttaaggatggcgacctggtaatcatcgttgccggcgtaccattcggccaatcaggtactactaacttgatgaagctgcaaatcatcggcaaccaacttgctcaaggtttgggcgtaggcactggctcagttatcggcaaggctgttgttgcgaacagcgctgaagaagccaacaataaggttcacgaaggcgacatcctggtagctaagactactgacaaggactacatgccagctatcaagaaggccagcggtatgatcgttgaagcttccggcttgaccagccacgcagctgttgtcggcgtatcactcggcattccagttgttgtcggtgctgctgacgcaacttcaaagatcgctgacggctcaactttgactgttgacgcacgtcgcggcgcaatttaccaaggtgaagtttcaaacctgtaa

SEQ ID NO: 16664 - protein, 589 aa, Lactobacillus delbrueckii subsp
MKKTKIVSTLGPASNDIETITKLAEAGANVFRFNFSHGDHEEHLARMNMVREVEKKTGKLLGIALDTKGAEIRTTDQEGGKFTINTGDEIRVSMDATKAGNKDMIHVTYPGLFDDTHVGGTVLIDDGAVGLTIKAKDEEKRELICEAQNTGVIGSKKGVNAPGVEIRLPGITEKDTDDIRFGLKHGINFIFASFVRKAQDVLDIRALCEEANAPYVKIFPKIESQEGIDNIDEILQVSDGLMVARGDMGVEIPFINVPFVQKTLIKKCNALGKPVITATQMLDSMQENPRPTRAEVTDVANAVLDGTDATMLSGESANGLYPVESVQAMHDINVRTEKEMDTRNTLALQRFEEYKGSNVTEAIGESVVRTAQELGVKTIITATSSGYTARMISKYRPDATIVALTFDEKIQHSLGIVWGVEPVLAKQPSNTDEMFEEAARVAKEHGFVKDGDLVIIVAGVPFGQSGTTNLMKLQIIGNQLAQGLGVGTGSVIGKAVVANSAEEANNKVHEGDILVAKTTDKDYMPAIKKASGMIVEASGLTSHAAVVGVSLGIPVVVGAADATSKIADGSTLTVDARRGAIYQGEVSNL

SEQ ID NO: 16665 - DNA, 1434 bp, Stigmatella aurantiaca; identical to SEQ ID NO: 15938
  CDS (1)..(1434): transl_table=11

SEQ ID NO: 16666 - protein, 477 aa, Stigmatella aurantiaca; identical to SEQ ID NO: 15939

SEQ ID NO: 16667 - DNA, 1584 bp, Arabidopsis thaliana; identical to SEQ ID NO: 8721
  CDS (1)..(1584)

SEQ ID NO: 16668 - protein, 527 aa, Arabidopsis thaliana; identical to SEQ ID NO: 8722

SEQ ID NO: 16669 - DNA, 1533 bp, Glycine max; identical to SEQ ID NO: 8723
  CDS (1)..(1533)

SEQ ID NO: 16670 - protein, 510 aa, Glycine max; identical to SEQ ID NO: 8724

SEQ ID NO: 16671 - DNA, 1536 bp, Glycine max; identical to SEQ ID NO: 8725
  CDS (1)..(1536)

SEQ ID NO: 16672 - protein, 511 aa, Glycine max; identical to SEQ ID NO: 8726

SEQ ID NO: 16673 - DNA, 1791 bp, Arabidopsis thaliana; identical to SEQ ID NO: 8727
  CDS (1)..(1791)

SEQ ID NO: 16674 - protein, 596 aa, Arabidopsis thaliana; identical to SEQ ID NO: 8728

SEQ ID NO: 16675 - DNA, 1584 bp, Arabidopsis thaliana; identical to SEQ ID NO: 8729
  CDS (1)..(1584)

SEQ ID NO: 16676 - protein, 527 aa, Arabidopsis thaliana; identical to SEQ ID NO: 8730

SEQ ID NO: 16677 - DNA, 1665 bp, Drosophila melanogaster; identical to SEQ ID NO: 15948
  CDS (1)..(1665)

SEQ ID NO: 16678 - protein, 554 aa, Drosophila melanogaster; identical to SEQ ID NO: 15949

SEQ ID NO: 16679 - DNA, 1740 bp, Arabidopsis thaliana; identical to SEQ ID NO: 8731
  CDS (1)..(1740)

SEQ ID NO: 16680 - protein, 579 aa, Arabidopsis thaliana; identical to SEQ ID NO: 8732

SEQ ID NO: 16681 - DNA, 1581 bp, Aspergillus oryzae; identical to SEQ ID NO: 8733
  CDS (1)..(1581)

SEQ ID NO: 16682 - protein, 526 aa, Aspergillus oryzae; identical to SEQ ID NO: 8734

SEQ ID NO: 16683 - DNA, 1422 bp, Pseudomonas hydrogenothermophila
  CDS (1)..(1422): transl_table=11
atgcgccacaccaaaatcgtcgcgacgctaggccccgcttcgagcgatcccgccacgctcgaacggctgctccttgccggcgtcgacgtcgttcgcctcaacttttcgcacggaaccgcggacgagcaccgcgcccgggcgtcgctcgtgcgtgcgctcgcacagcagacccaacgccccgttggcatcctgggcgacctccaaggaccgaaaatccgcatcggccggttcaccaccaacgctgttactctgagcaaagggcaacgctttcggctcgactgcgacctcgccccgggtgacgccacccgggttgggctcgactacccggaactgatcgacgacgtcgaggtcggcgacatcttgctcctcgacgacggcaaaattcgcttgcagatcgtcgaaaagtgcgcagacgcgctcatcacgcaggtgcttgttggcggcaccctctcgaaccacaaagggatcaacaaactgggtggcgggctttcggcgccagcgctcactgcgaaagaccgtgccgtgccgatatcgcgctcgctgccgaaatcggcgtcgattaccgtcgcggtctctttcgtcaagcacgccgaagagatgcacgaagcgcggcacttggcgcgcgctgccgggagccgcgcccgtttgatcgccaaaatcgaacgggtcgaagcgatcgctaacctcgacgcgattctggaggcgagcgacggcgtgatggtcgcgcgtggggatctcgcggtcgaggtgggcgatgctgctgtgccggcgttacaaaagcgcattttgcgccgcgcacgggaaatgaaccgcctgtcgatcaccgccacccaaatgatggaatcgatggtgcatagccccgtcccgacccgggccgaggtctccgacgtcgcgaacgcggtgctcgacggcaccgacgcggtgatgctctcggccgaaaccgcagcgggccagtacccggtcgaggcagtcgaagcgatggcgcgcgtctgcgccgaagccgacgcgtcgaacgacgcccacctcgaccaggagctcctggggcggcgttttcaccgcgtcgacgaagcgatcgcggtctccgccgtctggtcgggctaccacctaggggtgaaagcgatcgtcgcgctcacccaatcgggcgcgaccgcactctggatgagccgcatcgcaagcattctccccatctacgccctcacccccgacccggtgaccttcggccacctcaccctcttccgccaagtcacgccagttcgcttcgacctgaaccccgcgtccgacccggcaatgctcctcacacagatacgcacgctccttgtgtcgaacggctgggctgcaccaggggaaacgatcgcggtcactttcggcgaaccgatgggacaacccggcggcagcaacacgttgaagatcgttaccctctag

SEQ ID NO: 16684 - protein, 473 aa, Pseudomonas hydrogenothermophila; identical to SEQ ID NO: 8736

SEQ ID NO: 16685 - DNA, 1545 bp, Arabidopsis thaliana; identical to SEQ ID NO: 8739
  CDS (1)..(1545)

SEQ ID NO: 16686 - protein, 514 aa, Arabidopsis thaliana; identical to SEQ ID NO: 8740

SEQ ID NO: 16687 - DNA, 1704 bp, Arabidopsis thaliana; identical to SEQ ID NO: 8741
  CDS (1)..(1704)

SEQ ID NO: 16688 - protein, 567 aa, Arabidopsis thaliana; identical to SEQ ID NO: 8742

SEQ ID NO: 16689 - DNA, 1533 bp, Lilium longiflorum; identical to SEQ ID NO: 8743
  CDS (1)..(1533)

SEQ ID NO: 16690 - protein, 510 aa, Lilium longiflorum; identical to SEQ ID NO: 8744

SEQ ID NO: 16691 - DNA, 1413 bp, Vibrio marinus; identical to SEQ ID NO: 8745
  CDS (1)..(1413): transl_table=11

SEQ ID NO: 16692 - protein, 470 aa, Vibrio marinus; identical to SEQ ID NO: 8746

SEQ ID NO: 16693 - DNA, 1752 bp, Ricinus communis; identical to SEQ ID NO: 8747
  CDS (1)..(1752)

SEQ ID NO: 16694 - protein, 583 aa, Ricinus communis; identical to SEQ ID NO: 8748

SEQ ID NO: 16695 - DNA, 1782 bp, Nicotiana tabacum; identical to SEQ ID NO: 8749
  CDS (1)..(1782)

SEQ ID NO: 16696 - protein, 593 aa, Nicotiana tabacum; identical to SEQ ID NO: 8750

SEQ ID NO: 16697 - DNA, 1494 bp, Arabidopsis thaliana; identical to SEQ ID NO: 8751
  CDS (1)..(1494)

SEQ ID NO: 16698 - protein, 497 aa, Arabidopsis thaliana; identical to SEQ ID NO: 8752

SEQ ID NO: 16699 - DNA, 1533 bp, Solanum tuberosum; identical to SEQ ID NO: 8753
  CDS (1)..(1533)

SEQ ID NO: 16700 - protein, 510 aa, Solanum tuberosum; identical to SEQ ID NO: 8754

SEQ ID NO: 16701 - DNA, 1536 bp, Glycine max; identical to SEQ ID NO: 8755
  CDS (1)..(1536)

SEQ ID NO: 16702 - protein, 511 aa, Glycine max; identical to SEQ ID NO: 8756

SEQ ID NO: 16703 - DNA, 1527 bp, Nicotiana tabacum; identical to SEQ ID NO: 15976
  CDS (1)..(1527)

SEQ ID NO: 16704 - protein, 508 aa, Nicotiana tabacum; identical to SEQ ID NO: 8758

SEQ ID NO: 16705 - DNA, 1689 bp, Nicotiana tabacum; identical to SEQ ID NO: 8759
  CDS (1)..(1689)

SEQ ID NO: 16706 - protein, 562 aa, Nicotiana tabacum; identical to SEQ ID NO: 8760

SEQ ID NO: 16707 - DNA, 1506 bp, Candida glabrata; identical to SEQ ID NO: 8763
  CDS (1)..(1506)

SEQ ID NO: 16708 - protein, 501 aa, Candida glabrata; identical to SEQ ID NO: 8764

SEQ ID NO: 16709 - DNA, 1413 bp, Escherichia coli O157; identical to SEQ ID NO: 8765
  CDS (1)..(1413): transl_table=11

SEQ ID NO: 16710 - protein, 470 aa, Escherichia coli O157; identical to SEQ ID NO: 8766

SEQ ID NO: 16711 - DNA, 1413 bp, Salmonella typhi; identical to SEQ ID NO: 15984
  CDS (1)..(1413): transl_table=11

SEQ ID NO: 16712 - protein, 470 aa, Salmonella typhi; identical to SEQ ID NO: 15985

SEQ ID NO: 16713 - DNA, 1413 bp, Salmonella typhimurium; identical to SEQ ID NO: 8767
  CDS (1)..(1413): transl_table=11

SEQ ID NO: 16714 - protein, 470 aa, Salmonella typhimurium; identical to SEQ ID NO: 8768

SEQ ID NO: 16715 - DNA, 1503 bp, Saccharomyces cerevisiae; identical to SEQ ID NO: 8769
  CDS (1)..(1503)

SEQ ID NO: 16716 - protein, 500 aa, Saccharomyces cerevisiae; identical to SEQ ID NO: 8770

SEQ ID NO: 16717 - DNA, 1449 bp, Agrobacterium vitis; identical to SEQ ID NO: 15990
  CDS (1)..(1449): transl_table=11

SEQ ID NO: 16718 - protein, 482 aa, Agrobacterium vitis; identical to SEQ ID NO: 15991

SEQ ID NO: 16719 - DNA, 1527 bp, Candida glabrata; identical to SEQ ID NO: 8771
  CDS (1)..(1527)

SEQ ID NO: 16720 - protein, 508 aa, Candida glabrata; identical to SEQ ID NO: 8772

SEQ ID NO: 16721 - DNA, 1443 bp, Escherichia coli; identical to SEQ ID NO: 8363
  CDS (1)..(1443): transl_table=11

SEQ ID NO: 16722 - protein, 480 aa, Escherichia coli; identical to SEQ ID NO: 8364

SEQ ID NO: 16723 - DNA, 1443 bp, Salmonella typhimurium; identical to SEQ ID NO: 8773
  CDS (1)..(1443): transl_table=11

SEQ ID NO: 16724 - protein, 480 aa, Salmonella typhimurium; identical to SEQ ID NO: 8774

SEQ ID NO: 16725 - DNA, 1521 bp, Saccharomyces cerevisiae; identical to SEQ ID NO: 8775
  CDS (1)..(1521)

SEQ ID NO: 16726 - protein, 506 aa, Saccharomyces cerevisiae; identical to SEQ ID NO: 8776

SEQ ID NO: 16727 - DNA, 1599 bp, Agaricus bisporus; identical to SEQ ID NO: 16002
  CDS (1)..(1599)

SEQ ID NO: 16728 - protein, 532 aa, Agaricus bisporus; identical to SEQ ID NO: 16003

SEQ ID NO: 16729 - DNA, 1506 bp, Ashbya gossypii; identical to SEQ ID NO: 8777
  CDS (1)..(1506)

SEQ ID NO: 16730 - protein, 501 aa, Ashbya gossypii; identical to SEQ ID NO: 8778

SEQ ID NO: 16731 - DNA, 1581 bp, Aspergillus niger; identical to SEQ ID NO: 8779
  CDS (1)..(1581)

SEQ ID NO: 16732 - protein, 526 aa, Aspergillus niger; identical to SEQ ID NO: 8780

SEQ ID NO: 16733 - DNA, 1758 bp, Bacillus licheniformis; identical to SEQ ID NO: 8781
  CDS (1)..(1758): transl_table=11

SEQ ID NO: 16734 - protein, 585 aa, Bacillus licheniformis; identical to SEQ ID NO: 8782

SEQ ID NO: 16735 - DNA, 1761 bp, Bacillus psychrophilus; identical to SEQ ID NO: 16010
  CDS (1)..(1761): transl_table=11

SEQ ID NO: 16736 - protein, 586 aa, Bacillus psychrophilus; identical to SEQ ID NO: 8784

SEQ ID NO: 16737 - DNA, 1764 bp, Bacillus stearothermophilus; identical to SEQ ID NO: 8785
  CDS (1)..(1764): transl_table=11

SEQ ID NO: 16738 - protein, 587 aa, Bacillus stearothermophilus; identical to SEQ ID NO: 8786

SEQ ID NO: 16739 - DNA, 1758 bp, Bacillus subtilis; identical to SEQ ID NO: 8787
  CDS (1)..(1758): transl_table=11

SEQ ID NO: 16740 - protein, 585 aa, Bacillus subtilis; identical to SEQ ID NO: 8788

SEQ ID NO: 16741 - DNA, 1434 bp, Borrelia burgdorferi
  CDS (1)..(1434): transl_table=11
atgatttcaaagttaacaaaaattgtagcaacaatatctgatcttagatgcgaaccagaacatataaaagatttacacgatgcaggggtaaatgttataagactaaatactgctcatcaatcacacgaagatacaataaaagtaatagacaatgttagaaaaatttcaaataaaatagctttaatgattgatacaaaaggaccagaagttagaacagcaaatattgaaaatcctattattgtaaaaactggagacaaggtaatcatttcaacctcgcctattaatgagcctaataactttcaaaccaattatgatggatttgttaaagaagtaccccaaggatctaaagtgctaattgatgacggtgaacttgaaatgactgttgttgccaaattgcctgacagattaatttgtgaaattaaaaatgacggccaaattaaaaataaaaaatcaatcaatacccccggaatttctcttaagctacaatcagtaaccgaaaaagacaaaggatttattgagcttgcagcaaaatataatgttgattttattgcccattcgtttgtaagacattccaaagacgttcaagatgttcaagaaattttaactgcctctggaaatcctgatgtaaaaattatatccaaaatcgaaaatcaagagggaattgacaacattgaagaaattgcaaaagcttcttacggaataatggttgcaaggggagacatgggagttgaaattcctgcagaagatgtacccattgctcaacttaaaataacacaaacctgtataaagtatggaatacccgtgattacagcaactcaaatgcttcatacaatgattgaaaatccaagacctactagagcagaagtgtctgacatcgctaacgctattttaaacggcacagacgcaattatgttatccggagaaaccgcctacgggaaatatccaattgaagctgtaaaaatgatgacaagcattgctaaaaaagttgaaaaacacagaaaaatgaccttatataaggatgaacttttttacgataaaagtatcacaagaaactatattatcaaatgtgcaattgatgccacaaaacttatggacataaaagcaattattgtagattctctaaaaggcaaaaccgcaagaataatggcaacctacagagcaagtgttccattattcattacaacaaatagcgaaagactagcaagagaattagcattatcttacggggtttattctaatcttgtagacaataatttcaaaagaactaccgaatttgtagtaacttctcttaaaatgttaaaagaacaaggtgttgttaatgacaaagatactgtaataattatttctggaaatccaaatagaaatattgaaaaaggaacagaatttatggaaataaacacagtagaagatgcaatcaaaggacgaaatatataa

SEQ ID NO: 16742 - protein, 477 aa, Borrelia burgdorferi
MISKLTKIVATISDLRCEPEHIKDLHDAGVNVIRLNTAHQSHEDTIKVIDNVRKISNKIALMIDTKGPEVRTANIENPIIVKTGDKVIISTSPINEPNNFQTNYDGFVKEVPQGSKVLIDDGELEMTVVAKLPDRLICEIKNDGQIKNKKSINTPGISLKLQSVTEKDKGFIELAAKYNVDFIAHSFVRHSKDVQDVQEILTASGNPDVKIISKIENQEGIDNIEEIAKASYGIMVARGDMGVEIPAEDVPIAQLKITQTCIKYGIPVITATQMLHTMIENPRPTRAEVSDIANAILNGTDAIMLSGETAYGKYPIEAVKMMTSIAKKVEKHRKMTLYKDELFYDKSITRNYIIKCAIDATKLMDIKAIIVDSLKGKTARIMATYRASVPLFITTNSERLARELALSYGVYSNLVDNNFKRTTEFVVTSLKMLKEQGVVNDKDTVIIISGNPNRNIEKGTEFMEINTVEDAIKGRNI

SEQ ID NO: 16743 - DNA, 1443 bp, Buchnera aphidicola subsp; identical to SEQ ID NO: 16016
  CDS (1)..(1443): transl_table=11

SEQ ID NO: 16744 - protein, 480 aa, Buchnera aphidicola subsp; identical to SEQ ID NO: 16017

SEQ ID NO: 16745 - DNA, 1422 bp, Clostridium acetobutylicum; identical to SEQ ID NO: 8791
  CDS (1)..(1422): transl_table=11

SEQ ID NO: 16746 - protein, 473 aa, Clostridium acetobutylicum; identical to SEQ ID NO: 8792

SEQ ID NO: 16747 - DNA, 1515 bp, Debaryomyces hansenii; identical to SEQ ID NO: 8793
  CDS (1)..(1515)

SEQ ID NO: 16748 - protein, 504 aa, Debaryomyces hansenii; identical to SEQ ID NO: 8794

SEQ ID NO: 16749 - DNA, 1602 bp, Drosophila melanogaster; identical to SEQ ID NO: 16024
  CDS (1)..(1602)

SEQ ID NO: 16750 - protein, 533 aa, Drosophila melanogaster; identical to SEQ ID NO: 16025

SEQ ID NO: 16751 - DNA, 1581 bp, Emericella nidulans; identical to SEQ ID NO: 8795
  CDS (1)..(1581)

SEQ ID NO: 16752 - protein, 526 aa, Emericella nidulans; identical to SEQ ID NO: 8796

SEQ ID NO: 16753 - DNA, 1506 bp, Kluyveromyces lactis; identical to SEQ ID NO: 8797
  CDS (1)..(1506)

SEQ ID NO: 16754 - protein, 501 aa, Kluyveromyces lactis; identical to SEQ ID NO: 8798

SEQ ID NO: 16755 - DNA, 1506 bp, Saccharomyces castellii; identical to SEQ ID NO: 8801
  CDS (1)..(1506)

SEQ ID NO: 16756 - protein, 501 aa, Saccharomyces castellii; identical to SEQ ID NO: 8802

SEQ ID NO: 16757 - DNA, 1506 bp, Saccharomyces kluyveri; identical to SEQ ID NO: 8803
  CDS (1)..(1506)

SEQ ID NO: 16758 - protein, 501 aa, Saccharomyces kluyveri; identical to SEQ ID NO: 8804

SEQ ID NO: 16759 - DNA, 1530 bp, Schizosaccharomyces pombe; identical to SEQ ID NO: 8805
  CDS (1)..(1530)

SEQ ID NO: 16760 - protein, 509 aa, Schizosaccharomyces pombe; identical to SEQ ID NO: 8806

SEQ ID NO: 16761 - DNA, 1758 bp, Staphylococcus aureus; identical to SEQ ID NO: 8517
  CDS (1)..(1758): transl_table=11

SEQ ID NO: 16762 - protein, 585 aa, Staphylococcus aureus; identical to SEQ ID NO: 8518

SEQ ID NO: 16763 - DNA, 1758 bp, Staphylococcus epidermidis; identical to SEQ ID NO: 16042
  CDS (1)..(1758): transl_table=11

SEQ ID NO: 16764 - protein, 585 aa, Staphylococcus epidermidis; identical to SEQ ID NO: 16043

SEQ ID NO: 16765 - DNA, 1401 bp, Thermotoga maritima; identical to SEQ ID NO: 8407
  CDS (1)..(1401): transl_table=11

SEQ ID NO: 16766 - protein, 466 aa, Thermotoga maritima; identical to SEQ ID NO: 8408

SEQ ID NO: 16767 - DNA, 1617 bp, Trichoderma reesei; identical to SEQ ID NO: 8807
  CDS (1)..(1617)

SEQ ID NO: 16768 - protein, 538 aa, Trichoderma reesei; identical to SEQ ID NO: 8808

SEQ ID NO: 16769 - DNA, 1533 bp, Oryza sativa; identical to SEQ ID NO: 8809
  CDS (1)..(1533)

SEQ ID NO: 16770 - protein, 510 aa, Oryza sativa; identical to SEQ ID NO: 8810

SEQ ID NO: 16771 - DNA, 1752 bp, Oryza sativa; identical to SEQ ID NO: 8811
  CDS (1)..(1752)

SEQ ID NO: 16772 - protein, 583 aa, Oryza sativa; identical to SEQ ID NO: 8812

SEQ ID NO: 16773 - DNA, 1347 bp, Oryza sativa
  CDS (1)..(1347)
atggccgccgcggtcaggccgaccgtgaaagggagctgctcgtcggggggacacgcgggagcgggacgtggagcaggttgggctcctcggcgaagggatcgcaggcgaggaggccctaggagaggtcgatccaccagagcatcgtcccgacgtgggagacgacgccctcgatcggggtaccagtcccgggtgagcagggccgagcaggtgggaccagagatacgcacaggctttttgaaagatggcaaacccatacagctgaagcaggggaaagaaattaccatcaccatagattattccataaagggggatgagaacttgatttccatgagctaccataagttggctatagacttgaagcctgggagcactatactatgtgctgatggcaccatcacactcacggtgctttcttgtgattgtgagcaaggcctagttcggtgtcgatgtgagaattctgctatgctaggtgagagaaagaatgtcaatcttcctggggttattgtggatctcccaacactaacagaaaaggacaaggtggacatccttcaatggggtgtgccaaataagattgacatgattgcactctcctttgtgcgtaaaggatcagaccttatgctggttcgaagtgtgctcggtgaacatgctaagtcgattctactcatgtcaaaggttgaaaatcaagaaggtgttgctaatgttgatgagataattgcaaattcagatgctttcatggttgcaagaggagatttgggaatggagatcccaattgagaagatattctatgcacaaaaggtgatgattcataaatgcaatatacatggaaagcctgttgttactgcaacccagatgcttgaatcaatgattaaatccccttgtcctacacgggcagaggctactgatgtagctaatgctgtccttgatggaactgactgcgtgatgtttagtggtgagactgcagcaggggcatatccagagttagcagtgcagaccatggcgaatatttgttcaagagcagagttatacctggactaccctttcattttcaagaaacttagttcagaagctccagttcctcttagcccacttgagagtttggcatcatcagccgttcagacagccaatatatccaaagcttcactcatcttggttcttaccaggggtggtacaactgcaaggctcattgcgaagtacaggccagccatgccggtgctgtttgtggttgttccagaactaaaagctgatgatagttttaactggacttgcagtgatgaggcacctgcaagacagtctcattgtcaggggtttgatcccaatgctgagcaccgctacaccaaaggcatttga

SEQ ID NO: 16774 - protein, 448 aa, Oryza sativa
MAAAVRPTVKGSCSSGGHAGAGRGAGWAPRRRDRRRGGPRRGRSTRASSRRGRRRPRSGYQSRVSRAEQVGPEIRTGFLKDGKPIQLKQGKEITITIDYSIKGDENLISMSYHKLAIDLKPGSTILCADGTITLTVLSCDCEQGLVRCRCENSAMLGERKNVNLPGVIVDLPTLTEKDKVDILQWGVPNKIDMIALSFVRKGSDLMLVRSVLGEHAKSILLMSKVENQEGVANVDEIIANSDAFMVARGDLGMEIPIEKIFYAQKVMIHKCNIHGKPVVTATQMLESMIKSPCPTRAEATDVANAVLDGTDCVMFSGETAAGAYPELAVQTMANICSRAELYLDYPFIFKKLSSEAPVPLSPLESLASSAVQTANISKASLILVLTRGGTTARLIAKYRPAMPVLFVVVPELKADDSFNWTCSDEAPARQSHCQGFDPNAEHRYTKGI

SEQ ID NO: 16775 - DNA, 1647 bp, Oryza sativa; identical to SEQ ID NO: 8379
  CDS (1)..(1647)

SEQ ID NO: 16776 - protein, 548 aa, Oryza sativa; identical to SEQ ID NO: 8380

SEQ ID NO: 16777 - DNA, 1536 bp, Oryza sativa; identical to SEQ ID NO: 8381
  CDS (1)..(1536)

SEQ ID NO: 16778 - protein, 511 aa, Oryza sativa; identical to SEQ ID NO: 8382

SEQ ID NO: 16779 - DNA, 1737 bp, Oryza sativa; identical to SEQ ID NO: 16058
  CDS (1)..(1737)

SEQ ID NO: 16780 - protein, 578 aa, Oryza sativa; identical to SEQ ID NO: 16059

SEQ ID NO: 16781 - DNA, 1713 bp, Oryza sativa; identical to SEQ ID NO: 8383
  CDS (1)..(1713)

SEQ ID NO: 16782 - protein, 570 aa, Oryza sativa; identical to SEQ ID NO: 8384

SEQ ID NO: 16783 - DNA, 1584 bp, Oryza sativa; identical to SEQ ID NO: 8385
  CDS (1)..(1584)

SEQ ID NO: 16784 - protein, 527 aa, Oryza sativa; identical to SEQ ID NO: 8386

SEQ ID NO: 16785 - DNA, 1584 bp, Oryza sativa; identical to SEQ ID NO: 8813
  CDS (1)..(1584)

SEQ ID NO: 16786 - protein, 527 aa, Oryza sativa; identical to SEQ ID NO: 8814

SEQ ID NO: 16787 - DNA, 1584 bp, Oryza sativa; identical to SEQ ID NO: 8387
  CDS (1)..(1584)

SEQ ID NO: 16788 - protein, 527 aa, Oryza sativa; identical to SEQ ID NO: 8388

SEQ ID NO: 16789 - DNA, 1584 bp, Oryza sativa; identical to SEQ ID NO: 16068
  CDS (1)..(1584)

SEQ ID NO: 16790 - protein, 527 aa, Oryza sativa; identical to SEQ ID NO: 16069

SEQ ID NO: 16791 - DNA, 1716 bp, Brassica napus; identical to SEQ ID NO: 8817
  CDS (1)..(1716)

SEQ ID NO: 16792 - protein, 571 aa, Brassica napus; identical to SEQ ID NO: 8818

SEQ ID NO: 16793 - DNA, 1584 bp, Brassica napus; identical to SEQ ID NO: 8823
  CDS (1)..(1584)

SEQ ID NO: 16794 - protein, 527 aa, Brassica napus; identical to SEQ ID NO: 8824

SEQ ID NO: 16795 - DNA, 1581 bp, Glycine max
  CDS (1)..(1581)
atgcattccagccctttgcttcttgaggaacccattaggatggcatccattcttgagccatccaagcctactttctttccagctatgacaaaaattgttggcacacttggtctaaagtcacgatcagttgatacaatttcccgttgccttgatgcaggaatgtctgtggcaaggtttgacttctcatggggtgatccagaataccatcaagagacattggaaaatttgagagttgctatcaaaagtaccaagaaactctgtgcggttatgctagatactgtgggtcctgaattacagattgagaataagacagatcacccaatcacccttgaagcagacacattagttgtcttaactccagatcaaaccaaagaagctggttcaaatctcttaccagtaaattttaacggactatcaaaggctgtgaagaagggtgatactatttttatcggaaaatacctgtttactggaagtgaaacagcttccttatggctggaggtcagtgaggtgaaaggtgaggatgtcacctgtctggtaaaaaacactgctacactgtctggatcattgtttactgcacatgtctctcagatccacatcgatcttcctactcttgctgataaagataaggaggtaataagcacatggggtgttcgaaacaatattgacttcctttcattatatacccggcacgttgaagatattcgtcatgcgcgtgaatttctttctaaattgggtgaccttaagcagacacatatttatgcaaagattgaaaatatagagggactgaagcattttgatgaaatattgagagaagcagatggcatcatcctcgctcgtggaaatttagggatagaactcccacctgagaaggttttcttattccaaaaggctgctatttacaagtgcaacatggttggaaagccagttgttgttacacgtgttgtagactctatgactgataatctaagacctactcgtgctgaagcaacagatgttgccaatgcagtgctggatggaagtgatgcaattctccttggagcagagaccctgcggggacaataccctgtagagaccatttctatagttggaaaaatatgtgctgaggcagagaaagttcataatcaagatttgtattttaagaaggctgtcaaatatgtgggagagccaatgagccatttggaatcaattgcttcctctgcggttcgagcagctatcaaggttaaagcctctgttattatttgcttcacttcatctggaagagctgcaagattgattgctaagtacagaccaattatgcctgtcatatccgttgtcattcctcaactgaagacaaatcaactccgatggacattcaccggtgcttttgaggctaggcaatctcttattgtgaggggtctttttcctatgctggcagatccacgacacccggctgagtctaaaagtggaacaaatgaatcaattttgaaggttgctttagatcatggcaaggcttttggcatcataaagccacatgaccgagttgttgtctgccagaaagtagctgactcgtcagttgtgaagattcttgagctcgaagattga

SEQ ID NO: 16796 - protein, 526 aa, Glycine max; identical to SEQ ID NO: 15541

SEQ ID NO: 16797 - DNA, 1545 bp, Triticum aestivum; identical to SEQ ID NO: 8827
  CDS (1)..(1545)

SEQ ID NO: 16798 - protein, 514 aa, Triticum aestivum; identical to SEQ ID NO: 8828

SEQ ID NO: 16799 - DNA, 1584 bp, Triticum aestivum; identical to SEQ ID NO: 8829
  CDS (1)..(1584)

SEQ ID NO: 16800 - protein, 527 aa, Triticum aestivum; identical to SEQ ID NO: 8830

SEQ ID NO: 16801 - DNA, 1584 bp, Brassica napus; identical to SEQ ID NO: 8835
  CDS (1)..(1584)

SEQ ID NO: 16802 - protein, 527 aa, Brassica napus; identical to SEQ ID NO: 8836

SEQ ID NO: 16803 - DNA, 1743 bp, Brassica napus; identical to SEQ ID NO: 8837
  CDS (1)..(1743)

SEQ ID NO: 16804 - protein, 580 aa, Brassica napus; identical to SEQ ID NO: 8838

SEQ ID NO: 16805 - DNA, 1743 bp, Brassica napus; identical to SEQ ID NO: 8839
  CDS (1)..(1743)

SEQ ID NO: 16806 - protein, 580 aa, Brassica napus; identical to SEQ ID NO: 8840

SEQ ID NO: 16807 - DNA, 1764 bp, Brassica napus; identical to SEQ ID NO: 8841
  CDS (1)..(1764)

SEQ ID NO: 16808 - protein, 587 aa, Brassica napus; identical to SEQ ID NO: 8842

SEQ ID NO: 16809 - DNA, 1533 bp, Brassica napus; identical to SEQ ID NO: 8843
  CDS (1)..(1533)

SEQ ID NO: 16810 - protein, 510 aa, Brassica napus; identical to SEQ ID NO: 8844

SEQ ID NO: 16811 - DNA, 1497 bp, Brassica napus; identical to SEQ ID NO: 8845
  CDS (1)..(1497)

SEQ ID NO: 16812 - protein, 498 aa, Brassica napus; identical to SEQ ID NO: 8846

SEQ ID NO: 16813 - DNA, 1584 bp, Brassica napus; identical to SEQ ID NO: 8847
  CDS (1)..(1584)

SEQ ID NO: 16814 - protein, 527 aa, Brassica napus; identical to SEQ ID NO: 8848

SEQ ID NO: 16815 - DNA, 1533 bp, Brassica napus; identical to SEQ ID NO: 8849
  CDS (1)..(1533)

SEQ ID NO: 16816 - protein, 510 aa, Brassica napus; identical to SEQ ID NO: 8850

SEQ ID NO: 16817 - DNA, 1584 bp, Brassica napus; identical to SEQ ID NO: 8851
  CDS (1)..(1584)

SEQ ID NO: 16818 - protein, 527 aa, Brassica napus; identical to SEQ ID NO: 8852

SEQ ID NO: 16819 - DNA, 1497 bp, Brassica napus; identical to SEQ ID NO: 8855
  CDS (1)..(1497)

SEQ ID NO: 16820 - protein, 498 aa, Brassica napus; identical to SEQ ID NO: 8856

SEQ ID NO: 16821 - DNA, 1584 bp, Zea mays; identical to SEQ ID NO: 8857
  CDS (1)..(1584)

SEQ ID NO: 16822 - protein, 527 aa, Zea mays; identical to SEQ ID NO: 8858

SEQ ID NO: 16823 - DNA, 1728 bp, Glycine max; identical to SEQ ID NO: 8859
  CDS (1)..(1728)

SEQ ID NO: 16824 - protein, 575 aa, Glycine max; identical to SEQ ID NO: 8860

SEQ ID NO: 16825 - DNA, 1584 bp, Glycine max; identical to SEQ ID NO: 8861
  CDS (1)..(1584)

SEQ ID NO: 16826 - protein, 527 aa, Glycine max; identical to SEQ ID NO: 8862

SEQ ID NO: 16827 - DNA, 1584 bp, Glycine max; identical to SEQ ID NO: 8863
  CDS (1)..(1584)

SEQ ID NO: 16828 - protein, 527 aa, Glycine max; identical to SEQ ID NO: 8864

SEQ ID NO: 16829 - DNA, 1638 bp, Glycine max; identical to SEQ ID NO: 8865
  CDS (1)..(1638)

SEQ ID NO: 16830 - protein, 545 aa, Glycine max; identical to SEQ ID NO: 8866

SEQ ID NO: 16831 - DNA, 1638 bp, Glycine max; identical to SEQ ID NO: 8867
  CDS (1)..(1638)

SEQ ID NO: 16832 - protein, 545 aa, Glycine max; identical to SEQ ID NO: 8868

SEQ ID NO: 16833 - DNA, 1728 bp, Glycine max; identical to SEQ ID NO: 8869
  CDS (1)..(1728)

SEQ ID NO: 16834 - protein, 575 aa, Glycine max; identical to SEQ ID NO: 8870

SEQ ID NO: 16835 - DNA, 1749 bp, Glycine max; identical to SEQ ID NO: 8871
  CDS (1)..(1749)

SEQ ID NO: 16836 - protein, 582 aa, Glycine max; identical to SEQ ID NO: 8872

SEQ ID NO: 16837 - DNA, 1584 bp, Glycine max; identical to SEQ ID NO: 8873
  CDS (1)..(1584)

SEQ ID NO: 16838 - protein, 527 aa, Glycine max; identical to SEQ ID NO: 8874

SEQ ID NO: 16839 - DNA, 1749 bp, Glycine max; identical to SEQ ID NO: 8875
  CDS (1)..(1749)

SEQ ID NO: 16840 - protein, 582 aa, Glycine max; identical to SEQ ID NO: 8876

SEQ ID NO: 16841 - DNA, 1728 bp, Glycine max; identical to SEQ ID NO: 8877
  CDS (1)..(1728)

SEQ ID NO: 16842 - protein, 575 aa, Glycine max; identical to SEQ ID NO: 8878

SEQ ID NO: 16843 - DNA, 1749 bp, Glycine max; identical to SEQ ID NO: 8881
  CDS (1)..(1749)

SEQ ID NO: 16844 - protein, 582 aa, Glycine max; identical to SEQ ID NO: 8882

SEQ ID NO: 16845 - DNA, 1542 bp, Hordeum vulgare; identical to SEQ ID NO: 8883
  CDS (1)..(1542)

SEQ ID NO: 16846 - protein, 513 aa, Hordeum vulgare; identical to SEQ ID NO: 8884

SEQ ID NO: 16847 - DNA, 1584 bp, Oryza sativa; identical to SEQ ID NO: 8885
  CDS (1)..(1584)

SEQ ID NO: 16848 - protein, 527 aa, Oryza sativa; identical to SEQ ID NO: 8886

SEQ ID NO: 16849 - DNA, 1803 bp, Zea mays; identical to SEQ ID NO: 8887
  CDS (1)..(1803)

SEQ ID NO: 16850 - protein, 600 aa, Zea mays; identical to SEQ ID NO: 8888

SEQ ID NO: 16851 - DNA, 1698 bp, Triticum aestivum; identical to SEQ ID NO: 8889
  CDS (1)..(1698)

SEQ ID NO: 16852 - protein, 565 aa, Triticum aestivum; identical to SEQ ID NO: 8890

SEQ ID NO: 16853 - DNA, 1584 bp, Zea mays; identical to SEQ ID NO: 8891
  CDS (1)..(1584)

SEQ ID NO: 16854 - protein, 527 aa, Zea mays; identical to SEQ ID NO: 8892

SEQ ID NO: 16855 - DNA, 1728 bp, Zea mays; identical to SEQ ID NO: 8895
  CDS (1)..(1728)

SEQ ID NO: 16856 - protein, 575 aa, Zea mays; identical to SEQ ID NO: 8896

SEQ ID NO: 16857 - DNA, 1707 bp, Zea mays; identical to SEQ ID NO: 8897
  CDS (1)..(1707)

SEQ ID NO: 16858 - protein, 568 aa, Zea mays; identical to SEQ ID NO: 8898

SEQ ID NO: 16859 - DNA, 1629 bp, Zea mays; identical to SEQ ID NO: 8899
  CDS (1)..(1629)

SEQ ID NO: 16860 - protein, 542 aa, Zea mays; identical to SEQ ID NO: 8900

SEQ ID NO: 16861 - DNA, 1548 bp, Zea mays; identical to SEQ ID NO: 8901
  CDS (1)..(1548)

SEQ ID NO: 16862 - protein, 515 aa, Zea mays; identical to SEQ ID NO: 8902

SEQ ID NO: 16863 - DNA, 1542 bp, Zea mays; identical to SEQ ID NO: 8905
  CDS (1)..(1542)

SEQ ID NO: 16864 - protein, 513 aa, Zea mays; identical to SEQ ID NO: 8906

SEQ ID NO: 16865 - DNA, 1530 bp, Zea mays; identical to SEQ ID NO: 8903
  CDS (1)..(1530)

SEQ ID NO: 16866 - protein, 509 aa, Zea mays; identical to SEQ ID NO: 8904

SEQ ID NO: 16867 - DNA, 1707 bp, Zea mays; identical to SEQ ID NO: 8831
  CDS (1)..(1707)

SEQ ID NO: 16868 - protein, 568 aa, Zea mays; identical to SEQ ID NO: 8832

SEQ ID NO: 16869 - DNA, 1584 bp, Zea mays; identical to SEQ ID NO: 8907
  CDS (1)..(1584)

SEQ ID NO: 16870 - protein, 527 aa, Zea mays; identical to SEQ ID NO: 8908

SEQ ID NO: 16871 - DNA, 1554 bp, Zea mays; identical to SEQ ID NO: 8909
  CDS (1)..(1554)

SEQ ID NO: 16872 - protein, 517 aa, Zea mays; identical to SEQ ID NO: 8910

SEQ ID NO: 16873 - DNA, 1707 bp, Zea mays; identical to SEQ ID NO: 8911
  CDS (1)..(1707)

SEQ ID NO: 16874 - protein, 568 aa, Zea mays; identical to SEQ ID NO: 8912

SEQ ID NO: 16875 - DNA, 1728 bp, Zea mays; identical to SEQ ID NO: 8913
  CDS (1)..(1728)

SEQ ID NO: 16876 - protein, 575 aa, Zea mays; identical to SEQ ID NO: 8914

SEQ ID NO: 16877 - DNA, 21 bp, Artificial sequence
  primer
atggctacgacgaggattgag

SEQ ID NO: 16878 - DNA, 22 bp, Artificial sequence
  primer
tcatttcacagtcaagatcttg

SEQ ID NO: 16879 - protein, 508 aa, Artificial sequence
  consensus sequence
  Variant (4)..(5): Xaa in position 4 to 5 is any amino acid
  Variant (7)..(7): Xaa in position 7 is any amino acid
  Variant (10)..(17): Xaa in position 10 to 17 is any amino acid
  Variant (18)..(44): Xaa in position 18 to 44 is any or no amino acid
  Variant (46)..(49): Xaa in position 46 to 49 is any amino acid
  Variant (50)..(50): Xaa in position 50 is any or no amino acid
  Variant (52)..(52): Xaa in position 52 is any amino acid
  Variant (54)..(54): Xaa in position 54 is any amino acid
  Variant (58)..(61): Xaa in position 58 to 61 is any amino acid
  Variant (63)..(80): Xaa in position 63 to 80 is any amino acid
  Variant (81)..(90): Xaa in position 81 to 90 is any or no amino acid
  Variant (92)..(93): Xaa in position 92 to 93 is any amino acid
  Variant (94)..(97): Xaa in position 94 to 97 is any or no amino acid
  Variant (100)..(101): Xaa in position 100 to 101 is any amino acid
  Variant (103)..(114): Xaa in position 103 to 114 is any amino acid
  Variant (115)..(121): Xaa in position 115 to 121 is any or no amino acid
  Variant (123)..(148): Xaa in position 123 to 148 is any amino acid
  Variant (149)..(159): Xaa in position 149 to 159 is any or no amino acid
  Variant (161)..(167): Xaa in position 161 to 167 is any amino acid
  Variant (168)..(172): Xaa in position 168 to 172 is any or no amino acid
  Variant (174)..(199): Xaa in position 174 to 199 is any amino acid
  Variant (200)..(207): Xaa in position 200 to 207 is any or no amino acid
  Variant (209)..(211): Xaa in position 209 to 211 is any amino acid
  Variant (212)..(223): Xaa in position 212 to 223 is any or no amino acid
  Variant (225)..(228): Xaa in position 225 to 228 is any amino acid
  Variant (231)..(232): Xaa in position 231 to 232 is any amino acid
  Variant (233)..(234): Xaa in position 233 to 234 is any or no amino acid
  Variant (236)..(244): Xaa in position 236 to 244 is any amino acid
  Variant (245)..(245): Xaa in position 245 is any or no amino acid
  Variant (247)..(250): Xaa in position 247 to 250 is any amino acid
  Variant (253)..(256): Xaa in position 253 to 256 is any amino acid
  Variant (257)..(257): Xaa in position 257 is any or no amino acid
  Variant (259)..(273): Xaa in position 259 to 273 is any amino acid
  Variant (274)..(282): Xaa in position 274 to 282 is any or no amino acid
  Variant (284)..(284): Xaa in position 284 is any amino acid
  Variant (286)..(295): Xaa in position 286 to 295 is any amino acid
  Variant (296)..(298): Xaa in position 296 to 298 is any or no amino acid
  Variant (300)..(303): Xaa in position 300 to 303 is any amino acid
  Variant (305)..(306): Xaa in position 305 to 306 is any amino acid
  Variant (308)..(308): Xaa in position 308 is any amino acid
  Variant (315)..(315): Xaa in position 315 is any amino acid
  Variant (317)..(317): Xaa in position 317 is any amino acid
  Variant (319)..(325): Xaa in position 319 to 325 is any amino acid
  Variant (328)..(329): Xaa in position 328 to 329 is any amino acid
  Variant (331)..(337): Xaa in position 331 to 337 is any amino acid
  Variant (339)..(339): Xaa in position 339 is any amino acid
  Variant (341)..(341): Xaa in position 341 is any amino acid
  Variant (342)..(342): Xaa in position 342 is any or no amino acid
  Variant (345)..(345): Xaa in position 345 is any amino acid
  Variant (347)..(348): Xaa in position 347 to 348 is any amino acid
  Variant (351)..(353): Xaa in position 351 to 353 is any amino acid
  Variant (355)..(355): Xaa in position 355 is any amino acid
  Variant (361)..(362): Xaa in position 361 to 362 is any amino acid
  Variant (368)..(369): Xaa in position 368 to 369 is any amino acid
  Variant (372)..(372): Xaa in position 372 is any amino acid
  Variant (374)..(375): Xaa in position 374 to 375 is any amino acid
  Variant (379)..(379): Xaa in position 379 is any amino acid
  Variant (381)..(381): Xaa in position 381 is any amino acid
  Variant (383)..(383): Xaa in position 383 is any amino acid
  Variant (385)..(385): Xaa in position 385 is any amino acid
  Variant (388)..(390): Xaa in position 388 to 390 is any amino acid
  Variant (392)..(393): Xaa in position 392 to 393 is any amino acid
  Variant (395)..(401): Xaa in position 395 to 401 is any amino acid
  Variant (403)..(426): Xaa in position 403 to 426 is any amino acid
  Variant (427)..(451): Xaa in position 427 to 451 is any or no amino acid
  Variant (453)..(455): Xaa in position 453 to 455 is any amino acid
  Variant (457)..(458): Xaa in position 457 to 458 is any amino acid
  Variant (460)..(460): Xaa in position 460 is any amino acid
  Variant (461)..(461): Xaa in position 461 is any or no amino acid
  Variant (463)..(468): Xaa in position 463 to 468 is any amino acid
  Variant (471)..(491): Xaa in position 471 to 491 is any amino acid
  Variant (492)..(507): Xaa in position 492 to 507 is any or no amino acid
TKIXXTXGPXXXXXXXXXXXXXXXXXXXXXXXXXXXXXXXXXXXGXXXXXRXNXSHGXXXXHXXXXXXXXXXXXXXXXXXXXXXXXXXXXDXXXXXXGPXXRXXXXXXXXXXXXXXXXXXXGXXXXXXXXXXXXXXXXXXXXXXXXXXXXXXXXXXXXXGXXXXXXXXXXXXGXXXXXXXXXXXXXXXXXXXXXXXXXXXXXXXXXXNXXXXXXXXXXXXXXXPXXXXKDXXXXDXXXXXXXXXXDXXXXSFXXXXXDXXXXXXXXXXXXXXXXXXXXXXXXKXEXXXXXXXXXXXXXIXXXXDXXMXARGDLGXEXPXXXXXXXQKXXIXXXXXXXKXVXXATXMXXSMXXXPXPTRAEXXDVANAXXDGXDXXMLSXEXAXGXYPXXXVXXMXXXXXXXEXXXXXXXXXXXXXXXXXXXXXXXXXXXXXXXXXXXXXXXXXXXXXXXXXIXXXTXXGXXAXXXXXXRPXXXXXXXXXXXXXXXXXXXXXXXXXXXXXXXXXXXXXG

SEQ ID NO: 16880 - protein, 42 aa, Artificial sequence
  protein pattern
  Variant (3)..(7): Xaa in position 3 to 7 is any amino acid
  Variant (8)..(8): Xaa in position 8 is Ala or Pro
  Variant (13)..(14): Xaa in position 13 to 14 is any amino acid
  Variant (17)..(17): Xaa in position 17 is Ala, Gly or Ser
  Variant (18)..(18): Xaa in position 18 is any amino acid
  Variant (20)..(20): Xaa in position 20 is Ile or Val
  Variant (21)..(21): Xaa in position 21 is any amino acid
  Variant (22)..(22): Xaa in position 22 is Ala, Asp, Glu, Gln or Thr
  Variant (23)..(23): Xaa in position 23 is any amino acid
  Variant (24)..(24): Xaa in position 24 is Ala, Gly, Ser, Thr or Val
  Variant (26)..(27): Xaa in position 26 to 27 is any amino acid
  Variant (28)..(28): Xaa in position 28 is Leu or Met
  Variant (30)..(30): Xaa in position 30 is Ala, Gly, Ser or Thr
  Variant (31)..(31): Xaa in position 31 is Ala, Glu, Gly or Asn
  Variant (33)..(33): Xaa in position 33 is Ser or Thr
  Variant (34)..(35): Xaa in position 34 to 35 is any amino acid
  Variant (37)..(38): Xaa in position 37 to 38 is any amino acid
  Variant (40)..(41): Xaa in position 40 to 41 is any amino acid
  Variant (42)..(42): Xaa in position 42 is Ala, Cys, Ser, Thr or Val
SMXXXXXXTRAEXXDVXXAXXXXXDXXXLXXEXXXGXXPXXX

SEQ ID NO: 16881 - protein, 18 aa, Artificial sequence
  protein pattern
  Variant (2)..(4): Xaa in position 2 to 4 is any amino acid
  Variant (5)..(5): Xaa in position 5 is any or no amino acid
  Variant (7)..(7): Xaa in position 7 is Ala, Gly, Ser or Val
  Variant (8)..(8): Xaa in position 8 is any amino acid
  Variant (10)..(10): Xaa in position 10 is Ile or Val
  Variant (15)..(15): Xaa in position 15 is Leu or Met
  Variant (16)..(16): Xaa in position 16 is Ala or Gly
  Variant (17)..(17): Xaa in position 17 is any amino acid
  Variant (18)..(18): Xaa in position 18 is Glu or Gln
IXXXXDXXMXARGDXXXX

SEQ ID NO: 16882 - protein, 10 aa, Artificial sequence
  protein pattern
  Variant (2)..(2): Xaa in position 2 is Ile or Leu
  Variant (3)..(3): Xaa in position 3 is Ile or Val
  Variant (4)..(4): Xaa in position 4 is Ala, Cys, Gly, Asn, Ser or Thr
  Variant (6)..(6): Xaa in position 6 is Ile, Leu, Met or Val
  Variant (9)..(9): Xaa in position 9 is any amino acid
  Variant (10)..(10): Xaa in position 10 is Cys, Ser, Thr or Val
KXXXTXGPXX

SEQ ID NO: 16883 - DNA, 1557 bp, Glycine max
  CDS (1)..(1557)
atgggaactagtgaatggcatatcgagcgaagatctagcttcggcactgaatcccccttagcaagagaggcaggaaatgtgcctgaaactgggtcactctctattgttgtgcttggcgcttctggggatcttgctaagaagaagacatttcctgcacttttccatctataccggcagggattcttaccagcagatgaagttcacatttttggctatgcaaggacaaaaatatctgatgatgaattgagaaaccggttgcgtggctatcttgttccaaacaaaggtgcttctccccaactgttggaggatgtagagaagtttttacagctgatcaaatatgtaagtggctcttatgattctgaggatggatttcgcttgttggataaagagatttcagagcatgaatatttgaaaaagagtgttgagggtttatctcggaggcttttctatcttgctcttccaccttcagtatatccatctgtttgcaagatgatcaagacttgttgcatgaataaatctgatcttggtggatggacacgtgttgttgtcgagaagccttttggtaaggatctagaatctgcagaggaactcagtactgagattggaaagttgtttgaggaaccacagatttatcgtattgatcactacttgggaaaggaactagtgcagaacttgttggtacttcgctttgcaaatcggtttttcttgccactttggaaccgcgacaacattgacaatgtacagatagttttcagagaggattttggaactgatggccgtggtggatattttgaccaatatggaattattcgagatattattcaaaaccatttgctgcaggttctttgcttggttgctatggaaaaaccagtttctctcaggcctgagcacattcgggatgagaaagtgaaggttcttgaatcagtgctccctattagagatgatgaggttgttcttggacaatacgaaggctataaagatgacccaacagtacctgacaagtcaaacaccccaacatttgcaactgttattctgcgaatacacaatgaaagatgggaaggtgttccgttcatactaaaagcagggaaggcactaaattctagaaaggcagagatcagggttcaattcaaggatgtccctggtgatattttcaagtgtaaaaagcaggggagaaatgagtttgttatccgcctacaacctttagaagctatgtacatgaagcttacggtcaagcaacctggactggagatgtcaacagttcaaagtgagctagacttgtcatatggacaacggtatcaaggagtaaccattcctgaggcttatgaacgcctaattcttgacacaattaaaggtgatcagcagcattttgttcgcagagatgagttgaaggcatcctggcagatcttcaccccacttttgcacagaattgatgaaggggaattcaagccactcccctacaaaccaggaagcagaggtcctgcagaagcagatcagttacttgaaaaagcaggctatgttcaaacacacggctacatatggatccctcctaccttgtag

SEQ ID NO: 16884 - protein, 518 aa, Glycine max
MGTSEWHIERRSSFGTESPLAREAGNVPETGSLSIVVLGASGDLAKKKTFPALFHLYRQGFLPADEVHIFGYARTKISDDELRNRLRGYLVPNKGASPQLLEDVEKFLQLIKYVSGSYDSEDGFRLLDKEISEHEYLKKSVEGLSRRLFYLALPPSVYPSVCKMIKTCCMNKSDLGGWTRVVVEKPFGKDLESAEELSTEIGKLFEEPQIYRIDHYLGKELVQNLLVLRFANRFFLPLWNRDNIDNVQIVFREDFGTDGRGGYFDQYGIIRDIIQNHLLQVLCLVAMEKPVSLRPEHIRDEKVKVLESVLPIRDDEVVLGQYEGYKDDPTVPDKSNTPTFATVILRIHNERWEGVPFILKAGKALNSRKAEIRVQFKDVPGDIFKCKKQGRNEFVIRLQPLEAMYMKLTVKQPGLEMSTVQSELDLSYGQRYQGVTIPEAYERLILDTIKGDQQHFVRRDELKASWQIFTPLLHRIDEGEFKPLPYKPGSRGPAEADQLLEKAGYVQTHGYIWIPPTL

SEQ ID NO: 16885 - DNA, 2012 bp, Oryza sativa
  CDS (177)..(1730)
gtttggtggatggaaagcgggtgtgagtgaggaagatccccctataaatcgcacccggaaaagatcaccatccattgcccaattcgccgtcgtcgtcttcttcttccacctcgggaagtcaaatctcgtcgccactgctggttttgtctccaaaggaagagaccatacagttcatcatgtcaggaggatctggtgattcttccccttcatcagggcgggctagcttcagttctttgtcaggtttgaaggacctagaactgtcttcagagtctggttgcttgtccattgtggtcctaggtgcttctggagaccttgctaagaagaaaacattcccagcgctgtttcacctctttcagcagggatttctacaatctggagaagtccatatatttgggtatgcaagatcaaatatttcggatgatggattaagagaacgcattcgtggatacctcaaaggagcttcagatgaacatatttcacaatttttgcaattaattaaatatgttagtggttcctacaatagcggggaaggatttgcatcattaaataacgccatttcagagaatgaaacttcgaagaacaacaaaccaggaagctcacgtagactattttatttggcattgcctccatcagtctacccctcagtatgcaaaatgataagatcatactgcatgaatccatcttctcattctggctggacaagggttattgttgaaaagccctttgggaaggacttggagtctgcagaggaactcagtgcccagcttggagagctgcttaatgaacaacagctgtacagaattgaccactatttaggaaaagaattggtccaaaatctgcttgtgcttcgctttgcaaaccgtttgttcctacctctttggaatcgtgataacattgctaatgtacagattgtattcagagaggactttgggactgaaggacgtggagggtactttgatcaatatggcatcattcgtgatatcattcagaaccatttgttgcaggtcttctgtttggtggctatggaaaagcctgtctctcttaagcctgagcacataagagatgaaaaagtcaaggttcttcagtcagtgacacctataaagcatgatgaggtggtccttgggcaatatgatggctacaaggatgactctacggtaccagatgactccaacacacctacttttgcatctcttgtattgagggtaaacaatgaaagatgggaaggagttcctttcattctcaaggctggcaaagcactgaacaataggaaggcagaggtacgtgtgcagttcaaggatgctcctggtgacatttttaaatgcaagaagcaaggaaggaatgaattcgttatacggttgcagccatcggaagccatgtatatgaaattaactgtcaagaaacccggactagaaatggcaaccgaacaaagcgagctggatctgtcatatgggctacgctaccaagacgtgaagatcccagaagcgtatgaacgcctcatcctggatacgataagaggggatcagcagcactttgttcgccgagacgaactgaaggctgcgtgggagatcttcactccgctgctgcacgacatcgacgacggcaaggtgaaggccctgccgtacaagccgggaacccggggacccccagaggccgacgagctgagcaagaggatgggctacgtgcagacccatggctacgtttggatacctccaaccctttcaaaattctagccgctatgtaccaatgcaggctctgtctagatgccggtttatcaggagctttgtaatattttttttaaaagaactcctactacttcgcctgtctagaacactgtaatgttggtgatcttggaataaaaagaagactatatatgctgcaagtaagcaagttacacatgttatggttagagttggacctgttatgagtttgccacaagcaactatattataggggctactataccatggatcttgttcagacaggatgatatctataaagtatcagactctggt

SEQ ID NO: 16886 - protein, 517 aa, Oryza sativa
MSGGSGDSSPSSGRASFSSLSGLKDLELSSESGCLSIVVLGASGDLAKKKTFPALFHLFQQGFLQSGEVHIFGYARSNISDDGLRERIRGYLKGASDEHISQFLQLIKYVSGSYNSGEGFASLNNAISENETSKNNKPGSSRRLFYLALPPSVYPSVCKMIRSYCMNPSSHSGWTRVIVEKPFGKDLESAEELSAQLGELLNEQQLYRIDHYLGKELVQNLLVLRFANRLFLPLWNRDNIANVQIVFREDFGTEGRGGYFDQYGIIRDIIQNHLLQVFCLVAMEKPVSLKPEHIRDEKVKVLQSVTPIKHDEVVLGQYDGYKDDSTVPDDSNTPTFASLVLRVNNERWEGVPFILKAGKALNNRKAEVRVQFKDAPGDIFKCKKQGRNEFVIRLQPSEAMYMKLTVKKPGLEMATEQSELDLSYGLRYQDVKIPEAYERLILDTIRGDQQHFVRRDELKAAWEIFTPLLHDIDDGKVKALPYKPGTRGPPEADELSKRMGYVQTHGYVWIPPTLSKF

SEQ ID NO: 16887 - DNA, 1839 bp, Arabidopsis thaliana
  CDS (64)..(1593)
ctacgtcagggtttggttagagtgttaaaaaactattggaagatgggttctggtcaatggcatatggagaagaggtctactttaaagaatgattcgtttgtaaaagaatacaatccaatcacggaaactgggagtctctctatcattgttcttggtgcttctggtgatcttgctaagaagaagacttttcctgcacttttcaatctatttcatcagggatttcttaatccagatgaagttcatatatttggatatgcaaggagtaagattactgatgaggagcttagagataaaatccgcggatatcttgttgatgagaagaatgcatctaagaaaacagaagctttgtccaagtttctaaagctgattaagtatgtgagtggaccttatgattctgaggaagggtttaagagattagacaaggcgattttggagcacgagatatctaaaaagactgctgaaggatcttcgaggagattgttttatcttgcacttcctccgtctgtataccctcctgtaagcaagatgatcaaggcatggtgcactaacaaatctgatcttggtggatggactaggattgttgttgagaaaccatttggaaaggatttggaatctgcagagcagctgagttctcagattggagccttgtttgaagaaccacagatttatcgtattgatcactatctgggaaaagagttagttcaaaacatgttggttcttcggtttgccaatcgcttgtttttgccactatggaaccgcgacaatattgcaaacgtacagatcgttttcagagaagattttggaactgaaggtcgcggtggatattttgatgaatacggaatcattcgtgatattattcaaaaccacttgctccaggttctttgccttgtcgccatggagaaaccaatctctcttaaacccgagcacatccgggatgagaaagtgaaggttcttcaatctgtgattcccataaaagatgaagaggtggttcttggacaatatgaaggatatagagatgatccaactgttccaaatgactcaaacactccaacgtttgccacaacaattcttcgcattaacaatgaaagatgggaaggtgttccttttatactgaaggccggaaaggcaatgagttcaaagaaggcagatattcgcattcagtttaaagatgttcctggcgacatattcaaatgtcaaaaccaagggaggaacgagtttgttatacgcttgcagccttcagaggccatgtacatgaagctaactgtgaagcaaccgggtctggagatgcaaaccgtgcagagtgaactagacctatcgtacaagcagcgttaccaagatgtctcaattccagaggcttacgaacgccttattcttgacacaatcagaggcgaccaacaacactttgttcgcagagacgaattaaaggcagcttgggaaatcttcactccactgcttcacaggatcgacaagggagaagtgaaatcggtcccatacaaacaaggtagccgtggcccagcggaagcagatcagctacttaagaaagctggttatatgcagactcatggctacatttggatccctcctacattgtaaatggtataatcatagagatgatgatgatgagtacacacaaaataagagggttttttttcttttttttccttgcttgctgaataaaaactcttcaccagtttggagtttgtttaagtgaatcttatgtatactagtgatcttcactaggacattgtttgtttatgccttgtagtttttgttgtactagtcccttgttttctttttttacataatgcaaaacagctttgtggaaaagctaattaaatt

SEQ ID NO: 16888 - protein, 509 aa, Arabidopsis thaliana
MEKRSTLKNDSFVKEYNPITETGSLSIIVLGASGDLAKKKTFPALFNLFHQGFLNPDEVHIFGYARSKITDEELRDKIRGYLVDEKNASKKTEALSKFLKLIKYVSGPYDSEEGFKRLDKAILEHEISKKTAEGSSRRLFYLALPPSVYPPVSKMIKAWCTNKSDLGGWTRIVVEKPFGKDLESAEQLSSQIGALFEEPQIYRIDHYLGKELVQNMLVLRFANRLFLPLWNRDNIANVQIVFREDFGTEGRGGYFDEYGIIRDIIQNHLLQVLCLVAMEKPISLKPEHIRDEKVKVLQSVIPIKDEEVVLGQYEGYRDDPTVPNDSNTPTFATTILRINNERWEGVPFILKAGKAMSSKKADIRIQFKDVPGDIFKCQNQGRNEFVIRLQPSEAMYMKLTVKQPGLEMQTVQSELDLSYKQRYQDVSIPEAYERLILDTIRGDQQHFVRRDELKAAWEIFTPLLHRIDKGEVKSVPYKQGSRGPAEADQLLKKAGYMQTHGYIWIPPTL

SEQ ID NO: 16889 - DNA, 1915 bp, Arabidopsis thaliana
  CDS (101)..(1648)
ataaaaattcgaactatcaaactccaccccataacaaaattctccaaactagtgaaaattttgtcgccaccgtcgcagagtgttaaaaaactattggaagatgggttctggtcaatggcatatggagaagaggtctactttaaagaatgattcgtttgtacaagaatacaatccagtcactgaaactgggagtctctctatcattgttcttggtgcttctggtgatcttgctaagaagaagacttttcctgcacttttcaatctatttcatcagggatttcttaatccagatgaagttcatatatttggatatgcaaggagtaagattactgatgaggagcttagagataaaatccgcggatatcttgttgatgagaagaatgcatctaagaaaacagaagctttgtccaagtttctaaagctgattaagtatgtgagtggaccttatgattctgaggaagggtttaagagattagacaaggcgatttcggagcacgagatatctaaaaagactgctgaaggatcttctaggagattgttttatcttgcacttcctccgtctgtataccctcctgtaagcaagatgatcaaggcatggtgcactaacaaatctgatcttggtggatggactaggattgttgttgagaaaccatttggaaaggatttggaatctgcagagcagctgagttctcagattggagccttgtttgaagaaccacagatttatcgtattgatcactatctgggaaaagagttagttcaaaacatgttggttcttcggtttgccaatcgcttgtttttgccactatggaaccgcgacaatattgcaaacgtacagatcgttttcagagaagattttggaactgaaggtcgcggtggatattttgatgaatacggaatcattcgtgatattattcaaaaccacttgctccaggttctttgccttgtcgccatggagaaaccaatctctcttaaacccgagcacatccgggatgagaaagtgaaggttcttcaatctgtgattcccataaaagatgaagaggtggttcttggacaatatgaaggatatagagatgatccaactgttccaaatgactcaaacactccaacgtttgccacaacaattcttcgcattaacaatgaaagatgggaaggtgttccttttatactgaaggccggaaaggcaatgagttcaaagaaggcagatattcgcattcagtttaaagatgttcctggcgacatattcaaatgtcaaaaccaagggaggaacgagtttgttatacgcttgcagccttcagaggccatgtacatgaagctaactgtgaagcaaccgggtctggagatgcaaaccgtgcagagtgaactagacctatcgtacaagcagcgttaccaagatgtctcgattccagaggcttacgaacgccttattcttgacacaatcagaggcgaccaacaacactttgttcgcagagacgaattaaaggcagcttgggaaatcttcactccactgcttcacaggatcgacggagaagtgaaatcggtcccatacaaacaaggtagccgtggcccagcggaagcagatcagctacttaagaaagctggttatatgcagactcatggctacatttggatccctcctacattgtaaatggtataatcatagagatgatgatgatgagtacacacaaaataagagggttttttttttcttttttttccttgcttgctgaataaaaactcttcaccagtttggagtttgtttaagtgaatcttatgtatactagtgatcttcactaggacattgtttgtttatgccttgtagtttttgttgtactagtcccttgttttctttttttacataatgcaaaacagctttgtggaaaagctaattaaattaagagatcttattctgctc

SEQ ID NO: 16890 - protein, 515 aa, Arabidopsis thaliana
MGSGQWHMEKRSTLKNDSFVQEYNPVTETGSLSIIVLGASGDLAKKKTFPALFNLFHQGFLNPDEVHIFGYARSKITDEELRDKIRGYLVDEKNASKKTEALSKFLKLIKYVSGPYDSEEGFKRLDKAISEHEISKKTAEGSSRRLFYLALPPSVYPPVSKMIKAWCTNKSDLGGWTRIVVEKPFGKDLESAEQLSSQIGALFEEPQIYRIDHYLGKELVQNMLVLRFANRLFLPLWNRDNIANVQIVFREDFGTEGRGGYFDEYGIIRDIIQNHLLQVLCLVAMEKPISLKPEHIRDEKVKVLQSVIPIKDEEVVLGQYEGYRDDPTVPNDSNTPTFATTILRINNERWEGVPFILKAGKAMSSKKADIRIQFKDVPGDIFKCQNQGRNEFVIRLQPSEAMYMKLTVKQPGLEMQTVQSELDLSYKQRYQDVSIPEAYERLILDTIRGDQQHFVRRDELKAAWEIFTPLLHRIDGEVKSVPYKQGSRGPAEADQLLKKAGYMQTHGYIWIPPTL

SEQ ID NO: 16891 - DNA, 1867 bp, Glycine max
  CDS (106)..(1662)
aactgttttgagtttccaaccttaaaagactctcttttctctctctgaactctgaagcaaaacaacattaccagagtggttcttgtaattcagtgctgctagaagatggaaactagtgaatggcatatcgagcgaagatctagcttcggctctgaatcccccttagcaagagaggcaggaaatgtgcctgaaactgggtcactctctattgtggtgcttggtgcttctggtgatcttgctaagaagaagacatttcctgcacttttccacctatacctgcagggattcttaccaccagatgaagttcatatttttggctatgcaaggacaaaaatctctgatgatgaattgagaaaccggttgcgcggctatcttgttccaaagaaaggtgcttccccccaacagttggaggatgtagagaagtttttacagctgatcaaatatgtaagcggctcttatgattctgaggatggcttccgcctgttggataaagagatttcagagcatgaatatttgaaaaacagtgttgagggtttatctcggaggcttttctatcttgctcttccaccttcagtatatccatcagtttgcaagatgatcaagacttgttgcatgaataaatctgatcttggtggatggacacgtgttgttgttgagaaaccttttggtaaggatctagaatctgcagaggaactcagtactgagattggaaagttgtttgaggaaccacagatttatcgtattgatcactacttgggaaaggaactagtgcagaacttgttggtacttcgctttgcaaatcggtttttcttgccactttggaaccgcgacaacattgacaacgtacagatagttttcagagaggattttggaactgatggccgtggtggatattttgaccagtatggaattattcgagatattattcaaaaccatctgctgcaggttctttgcttggttgctatggaaaaaccagtttctctcaggcctgagcacattcgggatgagaaagtgaaggttcttgaatcagtgctccctattaatgatgatgaggttgttcttggacaatatgaaggctataaagatgacccaaccgtacctgatgagtctaacaccccaacatttgcaactgttgttctgcgaatacacaatgaaagatgggaaggtgttcctttcatactaaaagcagggaaggcactaaattctagaaaggcagagataagggttcaattcaaggatgtccctggtgatattttcaagtgtaaaaagcaggggagaaatgagtgtgttatccgcctacagccttcagaagctatttacatgaagcttacggtcaagcaacctggactggagatgtctacggttcaaagtgagcttgacttgtcatatggacaacggtatcaaggagtaaccattcctgaggcttatgaacgcctaattcttgacacaattagaggtgatcagcaacattttgttcgcagagatgagttgaaggcatcctggcagatcttcaccccacttctgcacagaattgatgaaggggaattcaagccactcccctacaaaccaggaagcagaggtcctgcagaagcagatcagttacttgaaaaagctggctatgttcaaacacacggctacatatggatccctcctaccttgtagagtgatctaatgtaataagatgaggaatttttagctgctaatgaatacacaataagcttgtgaggcttcttccctttgaagcactcccacggatgtgtatcaagcatttggaacaatataagagactaagagtgtttggcacggtttgtgtaactgatttgcctttaaatgcaaaataaatggaaaatgaagtccatttactagc

SEQ ID NO: 16892 - protein, 518 aa, Glycine max
METSEWHIERRSSFGSESPLAREAGNVPETGSLSIVVLGASGDLAKKKTFPALFHLYLQGFLPPDEVHIFGYARTKISDDELRNRLRGYLVPKKGASPQQLEDVEKFLQLIKYVSGSYDSEDGFRLLDKEISEHEYLKNSVEGLSRRLFYLALPPSVYPSVCKMIKTCCMNKSDLGGWTRVVVEKPFGKDLESAEELSTEIGKLFEEPQIYRIDHYLGKELVQNLLVLRFANRFFLPLWNRDNIDNVQIVFREDFGTDGRGGYFDQYGIIRDIIQNHLLQVLCLVAMEKPVSLRPEHIRDEKVKVLESVLPINDDEVVLGQYEGYKDDPTVPDESNTPTFATVVLRIHNERWEGVPFILKAGKALNSRKAEIRVQFKDVPGDIFKCKKQGRNECVIRLQPSEAIYMKLTVKQPGLEMSTVQSELDLSYGQRYQGVTIPEAYERLILDTIRGDQQHFVRRDELKASWQIFTPLLHRIDEGEFKPLPYKPGSRGPAEADQLLEKAGYVQTHGYIWIPPTL

SEQ ID NO: 16893 - DNA, 2251 bp, Triticum aestivum
  CDS (319)..(1911)
tttttttctccccttcgatatccccgataaaacctccatctccatccccatccccgcccctcctatcgccacttcgccagccagctcgcccgcccgcccgcctagtcttctccgaaggaaggaacgaaggaaggaagcggccgcacgctcatggccctctcctgcatgaggtgcccggcggcggcggccggcggcggccccctcgcgcgccgcccgcaaccgccgccctcctcgtccctcgccttctccttcgccagatgcggagccgccaaggggtggcgcatccacgccgtcgccgggaaaggagtgaaagctcccatggatgctgtggagaacgctgtcgcccccgccgccccgtcaacggtggcaaatggcacttcttcagcaatcaccgtcgaggaatttgaagatttagcctctctagtgaaggatgatgaggcgtcggttagcatcaccgtagttggagcgtctggtgaccttgcgaagaagaagatatttcctgcccttttcgctctttactatgaaggttgtcttcccaagcatttctccatctttggctatgcgcggagtaaaatgacagatgctgaactgagagacatggtcagcaaaacactgacttgcaggattgataaaagggagaactgtagtgagaaaatggaagagtttctgaaacgatgcttctaccactcaggtcaatatgactcagaggaagatttcagggagctaggcaagaagatcaaacaacatgagggtcccagagtatctaaccatcttttctacttgtcgatacctccaaatatattcctggatgttgtaaaatgtgcaagcaaatcagcatcatctgtgagtggctggacaagggtaattgttgaaaaaccctttggccgggactcagagtcttctgctgccctaacgaaaggtctgaagcagtacctgacagaggaccaaatcttcaggattgaccattacttgggaaaggaactggtggagaacttgtctgtccttcgcttctcgaatcttgtttttgagcctctgtggtcaaggcaatatattaggaatgtgcaactgatattctcggaagactttggcactgaagggcgaggagggtactttgatagctatggtattatccgagacataatgcagaatcatcttcttcagatactagctctatttgcaatggaaactcctattagcttggaagcagaggacatacgaaatgagaaggttaaagttttgcgctccatgaagccattgcgactagaagatgtggtaataggacagtataaaagtcatacaaagggtggtattacataccctggatacactgaagataagacggtgcccaagggtagtctgactccaacatttgctgcagctgcgctttttataaataacgctagatgggatggagttccctttctcatgaaggctggaaaagctttgcatactaaacaggctgagattagagtacagtttcgacatgttcctggaaatctctacaaggggtcttttggaaccgatcttgacagggctactaatgaacttgtgatacgcgtgcaaccagatgaaggaatttacctaaagattaacaacaagattcctggtcttggtatgagactagataggagtaatctgaatcttcactatgcagcaaggtaccccaaggagataccagatgcgtacgagaggctcctgctcgacgcgatagaaggagagcgaaggctcttcatccggtcggacgagctggacgcagcgtgggagctcttcacgcccctcctgaaggagctggagcagaagcggatggcccccgagctatacccctacgggagccgcgggcccatgggcgcccactacctggcagccaagtacaaggtgagatggggcgacctgggtggctcggaacactaggaagagagcgtggtttcacacgggaggtgatgatttctgtttttggcgtcgcaatttctgcaaaaggccttgcagcgcacgcccagctagtgggggtgtgcgaggaacagatctgaataagggtgagcggttggcgatgcttgtgttcatcgatcgatcgaccgtgagtgagtatatttgttggtaccactggcttacatattctatgattcttaagaggaagcccagagcagaaagctcattcatcctggctgttcgtcggctcatttggttgtctggctgggccgggctgttgtattgggactgctgattgtgtaactgcaaaagctgttacttcttt

SEQ ID NO: 16894 - protein, 530 aa, Triticum aestivum
MDAVENAVAPAAPSTVANGTSSAITVEEFEDLASLVKDDEASVSITVVGASGDLAKKKIFPALFALYYEGCLPKHFSIFGYARSKMTDAELRDMVSKTLTCRIDKRENCSEKMEEFLKRCFYHSGQYDSEEDFRELGKKIKQHEGPRVSNHLFYLSIPPNIFLDVVKCASKSASSVSGWTRVIVEKPFGRDSESSAALTKGLKQYLTEDQIFRIDHYLGKELVENLSVLRFSNLVFEPLWSRQYIRNVQLIFSEDFGTEGRGGYFDSYGIIRDIMQNHLLQILALFAMETPISLEAEDIRNEKVKVLRSMKPLRLEDVVIGQYKSHTKGGITYPGYTEDKTVPKGSLTPTFAAAALFINNARWDGVPFLMKAGKALHTKQAEIRVQFRHVPGNLYKGSFGTDLDRATNELVIRVQPDEGIYLKINNKIPGLGMRLDRSNLNLHYAARYPKEIPDAYERLLLDAIEGERRLFIRSDELDAAWELFTPLLKELEQKRMAPELYPYGSRGPMGAHYLAAKYKVRWGDLGGSEH

SEQ ID NO: 16895 - DNA, 1755 bp, Zea mays subsp. mays
  CDS (97)..(1620)
aaaccgaagcagcgacagagctcttccctcccacacgctcggcgctctgtccgccagaaatctcgtcgctggtagaagagaatcgtgccatttgtcatgtcaggaggatcttcaccatcatcaaggcgaaacagctttaattctttgtctaaggacctagaccttccttcagagcaaggttgtctctccattgttgtacttggggcttctggtgaccttgctaagaagaaaacattcccagccctctaccacctctttgagcagggattcatacaatctggagaagtccatatatttggttatgctagatcaaatctttctgatgatgggttaagagaacgcattcgtgggtatctcaaaggagccccagaagatctttcagaatttttgcaactaataaaatatgtcagtggttcctatgatactggagaaggatttgagaaactgaacagggcaatatcagagtatgaggtgtcaaagagttcaggaagctatcgcaggctcttttatttggcattgcctccatctgtctacccttcagtgtgcaaaatgatcagaacatattgcatgaatccatcttctcaccctggatggaccagagtcattgttgagaagccctttggaaaggacttggattccgctgaagaattaagtgcccaacttggggagctattcgaggaacaccaactatacaggatagaccattacctgggaaaagagttggtccaaaacttgcttgttcttcgttttgccaaccgattattcttgcctctttggaaccgcgacaatattgataatatacagattgtattcagggaagactttggtactgaagggcgtggaggatattttgaccaatatggaatcattcgtgatatcattcagaatcatttactgcaggttttctgtttggttgcaatggaaaagcctgtctcccttaagcctgagcacatcagagatgagaaagtcaaggttctgcaatctgtgaaccctattaagcctgaagaggtagtccttgggcaatacgatggctacaaggatgaccctacagtgccagatgactcgaataccccaacttttgcatctgttgttcttcgggtacacaatgaaagatgggaaggtgttcctttcattcttaaagctggtaaagcattgagttcaaagaaagcagaagttcgggtgcaattcaaggatgtccctggtgacatttttagaagcaagaagcaaggaagaaatgagtttgttatacgcctccaaccatcagaagccatgtacatgaaactaactgttaagaagcctgggttagaaatggctactgaacaaagtgaacttgatctgtcatatgggatgcggtaccaaaatgtcaaaattcctgaggcatatgaacgccttatcttggatacaataagaggtgatcagcagcactttgttcgcagagatgagctacaggctgcttggaagatcttcactcctttgctgcatgacattgacgacggcaagctgaaggccctcccgtatgaacctggcagccggggacccaaggaagccgacgaattgagcgcgagagttggatacgtgcagacccacggttacatatgggtaccgccgacccttgcatagaagagaatacgaattgtttgtacctaggaagatccgagtgtcctacaataaagctgtgcgtatatgctcattttcgctatatcgcctgccgttgtaataatgttgtgctggatatgaaataaaattgcgtgttcc

SEQ ID NO: 16896 - protein, 507 aa, Zea mays subsp. mays
MSGGSSPSSRRNSFNSLSKDLDLPSEQGCLSIVVLGASGDLAKKKTFPALYHLFEQGFIQSGEVHIFGYARSNLSDDGLRERIRGYLKGAPEDLSEFLQLIKYVSGSYDTGEGFEKLNRAISEYEVSKSSGSYRRLFYLALPPSVYPSVCKMIRTYCMNPSSHPGWTRVIVEKPFGKDLDSAEELSAQLGELFEEHQLYRIDHYLGKELVQNLLVLRFANRLFLPLWNRDNIDNIQIVFREDFGTEGRGGYFDQYGIIRDIIQNHLLQVFCLVAMEKPVSLKPEHIRDEKVKVLQSVNPIKPEEVVLGQYDGYKDDPTVPDDSNTPTFASVVLRVHNERWEGVPFILKAGKALSSKKAEVRVQFKDVPGDIFRSKKQGRNEFVIRLQPSEAMYMKLTVKKPGLEMATEQSELDLSYGMRYQNVKIPEAYERLILDTIRGDQQHFVRRDELQAAWKIFTPLLHDIDDGKLKALPYEPGSRGPKEADELSARVGYVQTHGYIWVPPTLA

SEQ ID NO: 16897 - DNA, 1874 bp, Oryza sativa
  CDS (9)..(1742)
ggctccaaatggccggcaccggcttacgattccggcagggcgccatcttcttctcaggagctcatgctgctgctcatccaagaacaaggactcctcaccaccattgctcacctcagaggacgcacgatgcgagaggaaggtgccgcctcacggctaagtccgcaaatggacgcccacagatcagtgcctccttcagagatgtggcgatagatggggcacagtctgaagatggggcgccagagcagggaggatccaccgtcagcatcaccgtcgtcggcgcctccggcgatctcgccaagaagaagatctttcccgcgcttttcgccctgtactacgaggactgcctcccggagcattttacagtttttggttatgctcgtagcaagatgagcgatgaagagctcaggaacatgattagcttgactctgacatgccggattgatcagagggagaactgcagtgacaagatggaacagtttctgaagagatgcttttatcaatctgggcagtacaattcagaggaagggttttctgaactggacagaaagctaaaagaaaaggaggctggcaaggtaccaaacaggctcttttacctgtcgattccaccgaacatatttgtcgatgtggtgagatctgctagtcgcacagcatcatctcaagacggatggacaaggttcatagtggagaagccattcggccgcgattccgagtcgtcaggggagctcactcgaaacttgaagaagtacttggccgaggagcagatattcaggattgaccattatttggggaaggagctggttgagaacctctcggtgctccgtttctccaatctcgtcttcgagccactgtggtcgaggaactacatcaggaatgtgcagctcatattttctgaagatttcggcacggagggtcgaggcggccacttcgacaactacgggatcatcagggacataatgcagaaccacctgctgcagatcctggccctgttcgccatggagactccggtcagcctcgacgccgaggacatccgcaacgagaaggtgaaagtgctgaggtcgatgaggcagctgaggctggaggacgtggtggtgggtcagtacaaggggcacagcaagggcgggaagacgtacccggcgtacgtggacgacccgacggtgccgagcggcagcatcacgccgacgttcgccgccgccgccctcttcatcgacaacgcccgctgggacggcgtccccttcctcatgaaggccggcaaggccctgcacacgcgacgggcggagatcagggtgcagttccggcgggtgccggggaacctgtacgggcggcggagccggagcgtgggcggcggcgggacgacagcgacgagggagctggagaaggcgacgaacgagctggtgctgcgggtgcagcccgacgaggcgatctacctcaagatcaacagcaaggtgcccgggctggggatgaggctggacagcagcgacctcaacctgctctactccgagcgctaccccgccgagatccccgacgcctacgagcgcctgctgctcgacgccatcgagggcgagcgccgcctcttcatccgcagcgacgagctcgacgccgcctgggccatcttcacccccgtcctcgccgacctcgaggccaacaaggtggcacccgagctctacccgtacggcagccggggacccgtcggagcgcactacctcgccgccaaccacaacgtccgctggggtgacattagctagctcagaaaatgaaaagatcgatcggagtcgctgttaccgtgcttgctataatcttcatttaccatttgcattgatgaattctttattggactgctcagggacgaaattaataaaacaaagctctagtcattc

SEQ ID NO: 16898 - protein, 577 aa, Oryza sativa
MAGTGLRFRQGAIFFSGAHAAAHPRTRTPHHHCSPQRTHDARGRCRLTAKSANGRPQISASFRDVAIDGAQSEDGAPEQGGSTVSITVVGASGDLAKKKIFPALFALYYEDCLPEHFTVFGYARSKMSDEELRNMISLTLTCRIDQRENCSDKMEQFLKRCFYQSGQYNSEEGFSELDRKLKEKEAGKVPNRLFYLSIPPNIFVDVVRSASRTASSQDGWTRFIVEKPFGRDSESSGELTRNLKKYLAEEQIFRIDHYLGKELVENLSVLRFSNLVFEPLWSRNYIRNVQLIFSEDFGTEGRGGHFDNYGIIRDIMQNHLLQILALFAMETPVSLDAEDIRNEKVKVLRSMRQLRLEDVVVGQYKGHSKGGKTYPAYVDDPTVPSGSITPTFAAAALFIDNARWDGVPFLMKAGKALHTRRAEIRVQFRRVPGNLYGRRSRSVGGGGTTATRELEKATNELVLRVQPDEAIYLKINSKVPGLGMRLDSSDLNLLYSERYPAEIPDAYERLLLDAIEGERRLFIRSDELDAAWAIFTPVLADLEANKVAPELYPYGSRGPVGAHYLAANHNVRWGDIS

SEQ ID NO: 16899 - DNA, 1476 bp, Klebsiella pneumoniae subsp. pneumoniae MGH 78578
  CDS (1)..(1476): transl_table=11
atggcggtaacgcaaacggcccaggcatgcgacctggtcattttcggcgcgaagggcgacctggcgcggcgtaaattgttgccttccctgtatcagcttgaaaaggcgggccagatccacgctgacaccagaatcattggcgtcggccgtgccgactgggataaagcggcttataccaaagtcgtgcgcgaagcgctggaaaccttcatgaaggaaaaaattgatgaaggtttgtgggataccctgagcggacgcctggagttctgtaatcttgacgtcaatgacaccagcggcttcacccgcctgggtgagatgctggatcaaaagaaccgtgtcaccatcaactatttcgctatgccgccgagcacctttggcgcgatctgtaaagggctgggcgaagcgaagcttaatgccaagcctgcgcgcgtggtcatggaaaaaccgctcggcacctcgctggaaacctcccgtgaaatcaacgaccaggtcggcgagttttttgaagagtgtcaggtctaccgtatcgaccactatctcggtaaagagacggtcctcaacctgctggcgctgcgcttcgccaactccctgttcgtcaataactgggactgccgcaccatcgatcacgtcgaaatcaccgtcgcggaagaggtgggtattgaagggcgctggggttacttcgaccaggccgggcagatgcgcgacatgatccagaaccacctgctgcagatcctgtgcatgattgccatgtcaccgccgtccgatctcagcgccgacagcatccgtgatgaaaaggtcaaggtgctgaaatccctgcgccgtattgaccgctccaacgtgcgcgagaaaaccgttcgcggccagtataccgccggctttgcccagggcaaaaaagtgcctggctatctcgaagaggagggggccaacaagaccagcaacaccgaaaccttcgtggcgatccgcgtcgatatcgataactggcgctgggctggcgtaccgttctatctgcgcaccggcaaacgtctgccgaccaaatgctcagaggtagtggtttacttcaaaaccccggaactgaatctgtttaaagagacctggcaggagctgccgcagaacaagctgaccattcgcctgcagccggacgaaggggtagatatccaggtactgaacaaagtgccgggcctcgatcataaacataacctgcagatcactaaactggatctgagctactccgaaaccttcaaccagacgcatctggccgatgcctatgaacgtctgctgctggagaccatgcgtggcatccaggcgctgttcgttcgccgcgacgaagtagaagaggcgtggaaatgggttgactccattaccgaagcctgggcagccgaccgcgatgcgccgaaaccgtatcaggccgggacctggggaccggttgcgtcggtggccatgatcactcgcgacggtcgttcatggaacgagttcgagtaa

SEQ ID NO: 16900 - protein, 491 aa, Klebsiella pneumoniae subsp. pneumoniae MGH 78578
MAVTQTAQACDLVIFGAKGDLARRKLLPSLYQLEKAGQIHADTRIIGVGRADWDKAAYTKVVREALETFMKEKIDEGLWDTLSGRLEFCNLDVNDTSGFTRLGEMLDQKNRVTINYFAMPPSTFGAICKGLGEAKLNAKPARVVMEKPLGTSLETSREINDQVGEFFEECQVYRIDHYLGKETVLNLLALRFANSLFVNNWDCRTIDHVEITVAEEVGIEGRWGYFDQAGQMRDMIQNHLLQILCMIAMSPPSDLSADSIRDEKVKVLKSLRRIDRSNVREKTVRGQYTAGFAQGKKVPGYLEEEGANKTSNTETFVAIRVDIDNWRWAGVPFYLRTGKRLPTKCSEVVVYFKTPELNLFKETWQELPQNKLTIRLQPDEGVDIQVLNKVPGLDHKHNLQITKLDLSYSETFNQTHLADAYERLLLETMRGIQALFVRRDEVEEAWKWVDSITEAWAADRDAPKPYQAGTWGPVASVAMITRDGRSWNEFE

SEQ ID NO: 16901 - DNA, 1476 bp, Xanthobacter autotrophicus Py2
  CDS (1)..(1476): transl_table=11
atgtcgagtcgcgtcattccggtgcaacccttcgtcctcacggtgttcggcgccaccggggaccttgcccgccgcaagctgctgcctgcgctgtaccagcgcgaccgggccggacaattgccggagcgcgccgccatcgtcggcgcctcgcgccagcagatgacgccggaggctttcgtcgccttcgcccgcgccgccatcaccgaatatgtgccggccggcgacctcgaggatgcggacgtggcccgcttcctcgcccgcctcacctatgtgccggtggaggcggaaggcgagggcggctggccgcagcttgcggccctcatcgccacccacacggacatgatccgggtgttctatctcgccaccgggccggccctgttcggccccatctgctcccggctcggcgcccacggcatcgccgtggatggtgcgcgggtggtggtggagaagccgctgggcaagagcctggagagcgctgtggcgctcaacaaggccatcggcgaagtcttcgaggagcgcaacgtctaccgtatcgaccattatctcggtaaggagacggtgcagaacctgatggcgctcaggtttgccaataacctgttcgagccggtgtggaacaacgcccacatcgaccatgtgcagatcacggtcgcagaagacatcggcaccgccggccgtgccggttactatgacaccgccggcgccctgcgcgacatggtgcagaaccacattctccaattgctctgcctggtggccatggagccccccgtgtcgctggatgcggatgcggtgcgcgacgagaagctgaaggttctcaaggcgcttttgcccatcaccgaggccaatgccggccagctcaccgtgcgcggccagtatcgcgccggggcctcggcgggcggggccgtgccgggctatctggaggagctgggctcttctacgtccgagaccgagaccttcgtggccctgaaggcggagatcggcaactggcgctggtccggcgtgccgttctacctgcgcaccggcaagaggctggcctcgcgggtgtcggagatcgtcatcaccttccggccggtgccccattcggtgttcgatgcgtccgccggcacgctgcgggccaacgtgctggtgctgcggctccaaccggaggagggcgtgaagctgtggctgatgatcaaggatcccggccccggcggcatgcggcttgagcatgtgcccctcgacatgagctttgccagcgtcttcggcgtgcgcaatcccgatgcctatgagcgcctgctcatggacgtggtgcgcggcaaccagaccctgttcatgcgccgcgacgaggtggaggcggcgtggcgctgggtggacccgatcctcgaggcgtggcgcgcctcccgcgagccgcccaagccctataccgccggcacctggggccccgctgccgccatcgccctcatcgagcgcgacggccggacctggtccggcgacgactga

SEQ ID NO: 16902 - protein, 491 aa, Xanthobacter autotrophicus Py2
MSSRVIPVQPFVLTVFGATGDLARRKLLPALYQRDRAGQLPERAAIVGASRQQMTPEAFVAFARAAITEYVPAGDLEDADVARFLARLTYVPVEAEGEGGWPQLAALIATHTDMIRVFYLATGPALFGPICSRLGAHGIAVDGARVVVEKPLGKSLESAVALNKAIGEVFEERNVYRIDHYLGKETVQNLMALRFANNLFEPVWNNAHIDHVQITVAEDIGTAGRAGYYDTAGALRDMVQNHILQLLCLVAMEPPVSLDADAVRDEKLKVLKALLPITEANAGQLTVRGQYRAGASAGGAVPGYLEELGSSTSETETFVALKAEIGNWRWSGVPFYLRTGKRLASRVSEIVITFRPVPHSVFDASAGTLRANVLVLRLQPEEGVKLWLMIKDPGPGGMRLEHVPLDMSFASVFGVRNPDAYERLLMDVVRGNQTLFMRRDEVEAAWRWVDPILEAWRASREPPKPYTAGTWGPAAAIALIERDGRTWSGDD

SEQ ID NO: 16903 - DNA, 1476 bp, Xanthobacter autotrophicus Py2
  CDS (1)..(1476): transl_table=11
atggttgcgcgtgtggtcgcggtcgaacccttcgacatcatcgtgttcggcgccaccggcgatctcgcgcggcgcaagctgctgccggccctgttcgagcgtgatctcgccggccagatgcccgacgaggcccgcatcatcggcgtctcccggcgccccatggagcgggcggcattccaggatttcgcccgggacgcggtggagatgtccgacggcatcgaggatgcccgccccgcccgcctcgcccatttcctcgaccggctcgactatgtggcggttgacgcccagtccgacgccggctgggctgaccttgcccgcctgctggacgagggacgcgaccatgtccgggtgctctatctcgccgtggggccggacctgttcgatcccatctgcgcccgcatcggggaacacggcatcgtcaccgacaagacccgcgtggtggtggaaaagccggtgggtaaggacctcgcctcggcgctgaaggtcaatgccgccgtcggcaaggtcttccgcgaggaagcggtgttccgcatcgatcattatctcggcaaggaaacagtgcagaacctgatggcgctcaggttcgccaacgccctgttcgagccggtgtggaacaacgcccacatcgaccatgtgcagatcacggtggccgagagcatcggcaccgcgggccgcgccggttactacgacaccgccggcgccctgcgcgacatggtgcagaaccatattctccagctgctctgcctggtggccatggagccgcccgtatcgctggacgcggatgcggtgcgcgacgagaagctgaaggttctcaaagccctcacccccatcaccgaggccaatgccgcccagctcaccgtgcgcggccagtatcgcgccggcgcttcatcgggcggggccgtgccgggctatctggaggagctgggctcctccacctcggagaccgagaccttcgtggccctgaaggcggaaatcggcaactggcgctggtccggcgtgcctttctacctgcgcaccggcaagaggctggcatcgcgggtgtcggagatcgtggtcgcgttccggcccattccccattcggtgttcgacgcgcaggcgggtcccatcgtggccaaccgcctcgtcatgcggctccagcccgacgagggcgtgaagctctggctcatgatcaaggaccccggccccggcggcatgcggctccagcacgtgcccctcgacatgagcttcgccagcgtgttcggcgtgcgcaacgccgacgcctacgagcgcctcatcatggatgtggtgcgcggcaaccagaccctgttcatgcgccgcgacgaggtggaggcggcctggaactggatcgatcccatcctcgacgcctggcgaacctcccgcgagctgcccaagccctacaccgccggcacctgggggccctccgccgccatcgccctcatcgagcgggacggacggacctggaccgacgatgcctga

SEQ ID NO: 16904 - protein, 491 aa, Xanthobacter autotrophicus Py2
MVARVVAVEPFDIIVFGATGDLARRKLLPALFERDLAGQMPDEARIIGVSRRPMERAAFQDFARDAVEMSDGIEDARPARLAHFLDRLDYVAVDAQSDAGWADLARLLDEGRDHVRVLYLAVGPDLFDPICARIGEHGIVTDKTRVVVEKPVGKDLASALKVNAAVGKVFREEAVFRIDHYLGKETVQNLMALRFANALFEPVWNNAHIDHVQITVAESIGTAGRAGYYDTAGALRDMVQNHILQLLCLVAMEPPVSLDADAVRDEKLKVLKALTPITEANAAQLTVRGQYRAGASSGGAVPGYLEELGSSTSETETFVALKAEIGNWRWSGVPFYLRTGKRLASRVSEIVVAFRPIPHSVFDAQAGPIVANRLVMRLQPDEGVKLWLMIKDPGPGGMRLQHVPLDMSFASVFGVRNADAYERLIMDVVRGNQTLFMRRDEVEAAWNWIDPILDAWRTSRELPKPYTAGTWGPSAAIALIERDGRTWTDDA

SEQ ID NO: 16905 - DNA, 1518 bp, Oryza sativa (japonica cultivar-group)
  CDS (1)..(1518)
atgtcaggaggatcttcaccaaggtcaagacgaagcagctttaattctttatcaagagatctcgaactcccttcagagcaaggttgtctctctgttattgtcctcggggcttctggagacctagccaagaagaaaactttcccggcactcttccatctttttgcacagggatttatacaatcaggtgaagtgcatatatttgggtatgcgagatcaaacctttctgatgatgggttaagggaacgcattcgtggatacctcaaaggagcctcagaagaacatctctcagactttttgcaacatataaaatatgtcagtggttcctatgacagcggagaaggatttgagaaattgaacaaggaaatttcagagtatgagaagtcaaacaaatcagaaagccctcgcaggctcttctatttggcattgcctccatctgtctacccttcagtctgcaaaatgatcagaacatattgcatgaatccatctggatggactagagtcattgttgagaagccatttggaaaggacttggactctgcagaagaattaagtgcccaacttggggagctatttgacgaaaaccaactctacagaattgatcactacttgggaaaagagttggtccaaaacctgcttgtgcttcgttttgccaaccgcttgttcttgcctctttggaaccgtgacaatattgataatatacagattgtattcagggaggactttgggactgacgggcgtggtggatattttgatcaatatggaatcattcgtgacatcatccagaaccatttgttacaggttttctgtttggttgcaatggaaaagcctgtctctcttaagcctgagcacattagagatgagaaagtcaaggttctgcagtccgtgaaccctataaagcatgatgaggttgtccttggacaatacgaggggtacaaggatgaccctacagtgccagatgactcaaacaccccaacttttgcatctgtcgtgcttcgggtacacaatgaaagatgggagggtgttcctttcattcttaaagctggtaaagcactaagctcaaggaaagcagaagtccgtgtgcagttcaaagatgttcctggtgacatctttaaatgtaaaaggcaaggaagaaatgagtttgtcatacgccttcagccatcagaagccatgtacatgaaacttactgtcaaaaaacctggattggagatggccaccgagcagagtgaacttgatctgtcatacgggatgcggtaccaaaacgtcaaaattccagaggcatacgagcgtctcatattggatacgatacgaggagaccaacagcacttcgttcgccgagatgagctgaaggctgcttggcagatcttcactcccctgctgcacgacatcgacgaaggcaaggtgaagtctattccataccagcctggcagccgaggccccaaggaagccgatgaactgagcgagagggttgggtatatgcagacccacggttacatatggataccacccacccttgcatag

SEQ ID NO: 16906 - protein, 505 aa, Oryza sativa (japonica cultivar-group)
MSGGSSPRSRRSSFNSLSRDLELPSEQGCLSVIVLGASGDLAKKKTFPALFHLFAQGFIQSGEVHIFGYARSNLSDDGLRERIRGYLKGASEEHLSDFLQHIKYVSGSYDSGEGFEKLNKEISEYEKSNKSESPRRLFYLALPPSVYPSVCKMIRTYCMNPSGWTRVIVEKPFGKDLDSAEELSAQLGELFDENQLYRIDHYLGKELVQNLLVLRFANRLFLPLWNRDNIDNIQIVFREDFGTDGRGGYFDQYGIIRDIIQNHLLQVFCLVAMEKPVSLKPEHIRDEKVKVLQSVNPIKHDEVVLGQYEGYKDDPTVPDDSNTPTFASVVLRVHNERWEGVPFILKAGKALSSRKAEVRVQFKDVPGDIFKCKRQGRNEFVIRLQPSEAMYMKLTVKKPGLEMATEQSELDLSYGMRYQNVKIPEAYERLILDTIRGDQQHFVRRDELKAAWQIFTPLLHDIDEGKVKSIPYQPGSRGPKEADELSERVGYMQTHGYIWIPPTLA

SEQ ID NO: 16907 - DNA, 1506 bp, Vibrio cholerae O1 biovar eltor str. N16961
  CDS (1)..(1506): transl_table=11
atgatggtaatacctgaaaacagcagcatcgtaattttcggtgcttcgggagatttgacgtaccgtaagcttattcctgcgttgtatcacctctatgccagtcagcaactgcctaaatcgtttgcgattttaggtgtgagccgtaccgagtacagtgacgagtcttaccgcgagaagctaaagcgctcactgcaagagctggaaaaaacagaacctgccgctctcgaagccttcatgcagcatgtgcattatcaagcgctgaacacctcagaagtagctgattatcagcacttagcgacccgccttgatacactggctaacgattatcagtttgagcagcgtaatacgctgttttatctcgcaactccaccaagcttgtatggcgtgatcccagcttgccttgcggcacatggcctcaacgatgagagccaaggctggaagcgtctgatcatcgaaaaaccttttggttacgatctgcaatctgcacaagatctggatgtggaaatccaccaccacttcaaagagcatcagatctaccgtatcgaccactaccttggtaaagaaaccgtgcaaaacctgctggtgttccgctttgccaacggcatgtttgagccactgtggaaccgtaactttattgattacgtggaaatcacaggcgcagaattcctaggtgtggaagagcgcggcggttattacgatggttctggcgcggtgcgcgatatgttccaaaaccacctgctgcaagtgctggctatggtgggcatggagccgcctgcggcgatcaacgcggattccattcgtaacgaagtgaacaaggtactgcaaagcctacaaccgctttctgaatctgatctgcgcaacaatctggtgctcggtcaatacaccgaatcggaagtgcgtgggcaatttttacccagctaccgtaatgagccgggcgtggcggcggattcacgcaccgaaacttacgtcgcgctaaaaatgttcatcaataactggcgttggaatggtgtgccattctatgtgcgcagcggtaaacgtttaccaacgcgtgtcaccgaagtggtcattcacttcaaacgtacaccgcatcctgtctttgggcaaaatgcgccagagaacaagctgatcatccgtattcagcctgatgaaggcattctgatgagcttcggcttgaaagagcccggcgcaggtttcaaagccaaagaagtgtcgatgaatttccactacgcctcacttgagcagatcaaaatgctgaccgcttatgagcgtttgctgctggatgcactcaatggtgacgcgacactgtttgcccgtactgatgctgtagaagcttgttggaagtttgtgcagccgatcctcgatttcaaacaagatccgcaatcgctgtatggctacgcctgtggcacttggggcccgaaagagtcggatgacttgctgcgccgtgacggccgtgagtggcgcttcccttgtaaaaacctcactaacacggattactgcgaattatga

SEQ ID NO: 16908 - protein, 501 aa, Vibrio cholerae O1 biovar eltor str. N16961
MMVIPENSSIVIFGASGDLTYRKLIPALYHLYASQQLPKSFAILGVSRTEYSDESYREKLKRSLQELEKTEPAALEAFMQHVHYQALNTSEVADYQHLATRLDTLANDYQFEQRNTLFYLATPPSLYGVIPACLAAHGLNDESQGWKRLIIEKPFGYDLQSAQDLDVEIHHHFKEHQIYRIDHYLGKETVQNLLVFRFANGMFEPLWNRNFIDYVEITGAEFLGVEERGGYYDGSGAVRDMFQNHLLQVLAMVGMEPPAAINADSIRNEVNKVLQSLQPLSESDLRNNLVLGQYTESEVRGQFLPSYRNEPGVAADSRTETYVALKMFINNWRWNGVPFYVRSGKRLPTRVTEVVIHFKRTPHPVFGQNAPENKLIIRIQPDEGILMSFGLKEPGAGFKAKEVSMNFHYASLEQIKMLTAYERLLLDALNGDATLFARTDAVEACWKFVQPILDFKQDPQSLYGYACGTWGPKESDDLLRRDGREWRFPCKNLTNTDYCEL

SEQ ID NO: 16909 - DNA, 1491 bp, Pasteurella multocida subsp. multocida str. Pm70
  CDS (1)..(1491): transl_table=11
atgaaaattgaagcagacaacaattgtattgtaatttttggtgcatcaggtgatttaacttatcgtaaattgattcctgcactgtataacttatataaaatcggtcgtttgactgagcatttctccgtgttaggtgtggcaagaacggaattaagtgatgagggtttccgtgaaaaaatgcgccaagcgttgatcaaaagtgaaaaagcgaatggcgaaacactcgatcaattttgtagccacctttattatcaggcattaaataccgcggatgctgccgattatggcaagttaattcctcgtcttgatgatttacatgataaatatcaaacctgtggtaacacactttactatttatccacgccgccaagtctttatggtgtgattccagaatgtcttgcggcacatgggttaaatactgaagagtttggctggaagcggttaattgtggaaaaaccgtttggttatgatatccgcacggcaaaagaactcgatattcaaattcaccgtttctttgatgaacaccaaatttatcgtattgaccactatcttggtaaagaaacggttcaaaatctgctcgtgctgcgtttttctaatggatggtttgaaccactctggaaccgtaattttattgattatattgaaatcacgggcgcagaatctatcggtgtagaagagcgtggtggttattacgatgattctggcgcaatgcgtgatatgttccaaaaccatttgttgcaagtgttagccatggttgcgatggagccaccggcaattattaatgctgactcaatgcgtgatgaagtggcaaaagtcttgtattgtttacatccattaagtgaggatgacttagaaaatcatttagtcttagggcaatatacggcaggcacagttgaaggtgaagcagttaagggctacttacaggaaaaaggtgtaccggcagagtctaatacggaaacttacatggcattacgctgtgaaattgacaactggcgttgggcgggtgtgccattttatgtgcgtactgggaaacggttaccaagtcgagtgaccgaaattgtgattcatttcaaaaccacaccacatccggtatttagccaaaaagcaccagaaaacaaattaattatccgtattcaacccgatgaagcgatttcgatgcgttttggtttgaaaaaaccgggagcaggttttgaagcaaaagaagtgtcgatggatttccgttatgcggatcttgcctcaccaagcttactgaccgcttatgagcgtttattattggattctatgaaaggcgatgccactttgtttgcgcgtactgatgcggtacatgcctgttggcagtttgtggagccgattttacaatataaagcacaaaatgggcgtgtttatgagtatgaagccggtacttggggaccgacagaagccgacaaactgatcgcgaaaacgggtcgtgtttggcgtaaaccaagtggattaatgaaaaagaaagtgtaa

SEQ ID NO: 16910 - protein, 496 aa, Pasteurella multocida subsp. multocida str. Pm70
MKIEADNNCIVIFGASGDLTYRKLIPALYNLYKIGRLTEHFSVLGVARTELSDEGFREKMRQALIKSEKANGETLDQFCSHLYYQALNTADAADYGKLIPRLDDLHDKYQTCGNTLYYLSTPPSLYGVIPECLAAHGLNTEEFGWKRLIVEKPFGYDIRTAKELDIQIHRFFDEHQIYRIDHYLGKETVQNLLVLRFSNGWFEPLWNRNFIDYIEITGAESIGVEERGGYYDDSGAMRDMFQNHLLQVLAMVAMEPPAIINADSMRDEVAKVLYCLHPLSEDDLENHLVLGQYTAGTVEGEAVKGYLQEKGVPAESNTETYMALRCEIDNWRWAGVPFYVRTGKRLPSRVTEIVIHFKTTPHPVFSQKAPENKLIIRIQPDEAISMRFGLKKPGAGFEAKEVSMDFRYADLASPSLLTAYERLLLDSMKGDATLFARTDAVHACWQFVEPILQYKAQNGRVYEYEAGTWGPTEADKLIAKTGRVWRKPSGLMKKKV

SEQ ID NO: 16911 - DNA, 1512 bp, Lactococcus lactis subsp. lactis Il1403
  CDS (1)..(1512): transl_table=11
atgaccgaacaaaaacaagcacttttcaccatcttcggagcaactggtgacctcgctaaaagaaagctctacccttcactctttcgcctcttcaaaaaaggtgaactagctgacaattttgcagtcatcggtaccgctcgccgtccatggacaaacgagtattatcgtgaagttgttttagagtctatcaaagatttaatgaactcaaaaacggaagccgaaaatttcgccagccatttttattatcaaagtcacgatgttagcgacagctcacattacgttaacttaaaagatttgggtgaaaaattgcgtaaacagtataaaactgctggcaatcaagtcttctttttagcaatggctcctcaattttttggcactatctctgaacaccttaaatcagaaaatattttgacaggtgagggttttgagagaatcgtcattgaaaaaccatttggaacaagctacgatacggcaaaatcacttaatgacagcctcgcaaaagtatttagtgaagaacaaattttccgaatcgaccactaccttggaaaagaaatgatccaggccgtttctgccgttcgttttgccaatccaatctttgaatcgctttggaataatcaacacattgataacgttcagattacttttgccgaatttatcggtgttgaagaccgtggcggttactacgaaacttctggtgctttaaaagatatgattcaaaaccatgtcttacaagtactcagcctcattgccatggaaaaacctgaaaaatttgatgaatcttatattgtaaaagaaaaagttaaagcccttaatgcaatccgtcaatattcttctgaggaagctttagaaaacttcgttcgtggtcaatatatcgcaggacgttttgacggtgaagattacctaggctatcgcgaagaagattctgttgcaacagacagtcgaactgaaactttcgccgctggaaaatttgtcattgataatgagcgttggtcaggcgtccctttctatgttcgctcaggaaaacgtatgactgaaaaaggaactcgtattaatatcgttttcaaaaaagataaagacaatctctttgcagaaaattgcgatgaccaatccgttcaaaatgttttgaccatttatattcaaccaactgaagggttttcactttcagtaaatggaaaagcggctggtcaaggcttccatttagagcctttgcggttaaatttccgacacgatagtgaatttcttggaaattctcctgaagcatatgaaaaacttttcctagatgtccttaatggagacggaacaaatttctcacattgggaagaagcggctcgcgcctgggaacttattgatgttattcgagaagcttgggataaagaaacttctgagcttccaacttatgcggctcgcacaatgggacctaaggctgcatttgacttactagaaaaaaatggtcacgaatgggcttggcaacctgatttatggtatcaagaacgtggttactacaataaataa

SEQ ID NO: 16912 - protein, 503 aa, Lactococcus lactis subsp. lactis Il1403
MTEQKQALFTIFGATGDLAKRKLYPSLFRLFKKGELADNFAVIGTARRPWTNEYYREVVLESIKDLMNSKTEAENFASHFYYQSHDVSDSSHYVNLKDLGEKLRKQYKTAGNQVFFLAMAPQFFGTISEHLKSENILTGEGFERIVIEKPFGTSYDTAKSLNDSLAKVFSEEQIFRIDHYLGKEMIQAVSAVRFANPIFESLWNNQHIDNVQITFAEFIGVEDRGGYYETSGALKDMIQNHVLQVLSLIAMEKPEKFDESYIVKEKVKALNAIRQYSSEEALENFVRGQYIAGRFDGEDYLGYREEDSVATDSRTETFAAGKFVIDNERWSGVPFYVRSGKRMTEKGTRINIVFKKDKDNLFAENCDDQSVQNVLTIYIQPTEGFSLSVNGKAAGQGFHLEPLRLNFRHDSEFLGNSPEAYEKLFLDVLNGDGTNFSHWEEAARAWELIDVIREAWDKETSELPTYAARTMGPKAAFDLLEKNGHEWAWQPDLWYQERGYYNK

SEQ ID NO: 16913 - DNA, 1446 bp, Neisseria meningitidis MC58
  CDS (1)..(1446): transl_table=11
atgagtacacaaacaaattttgatttggtgttgttcggtgcgaccggcgatttggcgatgcgcaagctgttgccctgtctgtaccaggcgcatgttgccggtctgcttcatcccgaagggcgtattttgggggtcagccgcagcgagttggataccgaaggttttctggcgaaggtggaaaccagttccaaaatccatgtgaaagaaaatttttccgatgaggcttgggcatcgtttgtcgaacgtttcgcatatctcaaagtcgatgttacgcagccggacgattttgccgctttgggcgatttggtcaaagcgcgcaaagaaaccgacaacgtcgtcatctatctgtccaccgcgcccaaattcttcgcgcaagcctgtgaaaaccttgctgcgatcggtttgaatgccgacaatgtgcgcgtagttttggaaaaaccgttgggtacggatttggcttcttcccagcaaatcaataccgatgttgcgcgttatttcaaagaagggcaaatttaccgcatcgaccactaccttggcaaagaaagcctgcaaaacctgcttgcgctgcgttttgccaatgtaatgttcgagccgctgtggaacaataaatatatcgaaagcgtgcagttgaccatcgccgaacagctcggtgtggaagagcgcggtgagttttacgacattaccggcgcgttgcgcgatatggtgcaaaaccatttgatgcagatgttgtgcatgactgcgatggaagcccccgccagcttggatgccgacgcggtgcgcgatgaaaaagtcaaagtcatcaagtcattgaagccgctgaccgtcgagtctgtcaatgaaaacgtcgtgcgcggacaatataccgccgccagaggcatgaacggctatcttgaagaaatcaacgttccgcaagacagctttaccgaaacctacgtcgccattaaagccgaaatcgaaaacgaacgctggaagggcgttcccttctacctgcgtaccggcaaacgcatggcgggcaaagtggcggaaatcgttttgaacttcaaagatttgaacagccatatttttgaaggcagccgcaccgcgcccaaccggctcgttatcgagttgcaaccatatgaatccgtgcgcctctatacgcagatgaaaaccccgggggcaggaaataaggtcgaaaccgtgccgctggcaaccgatttgggcaaagcattggaaggccgccgcgcggaagcttacgagcgcctgctgctggatgtgattaacggcaaactcgctttgtttaaccgccgcgacgaacttgaagccgcgtgggaatatgtgatgccgattttggaaaactggacaaataacaccacgccgccgcacggctacggcgcacactcgtgggggcctgaagccgcgcgcgaactattggcgcgcgacggacacaagtggcacgaagagcagtaa

SEQ ID NO: 16914 - protein, 481 aa, Neisseria meningitidis MC58
MSTQTNFDLVLFGATGDLAMRKLLPCLYQAHVAGLLHPEGRILGVSRSELDTEGFLAKVETSSKIHVKENFSDEAWASFVERFAYLKVDVTQPDDFAALGDLVKARKETDNVVIYLSTAPKFFAQACENLAAIGLNADNVRVVLEKPLGTDLASSQQINTDVARYFKEGQIYRIDHYLGKESLQNLLALRFANVMFEPLWNNKYIESVQLTIAEQLGVEERGEFYDITGALRDMVQNHLMQMLCMTAMEAPASLDADAVRDEKVKVIKSLKPLTVESVNENVVRGQYTAARGMNGYLEEINVPQDSFTETYVAIKAEIENERWKGVPFYLRTGKRMAGKVAEIVLNFKDLNSHIFEGSRTAPNRLVIELQPYESVRLYTQMKTPGAGNKVETVPLATDLGKALEGRRAEAYERLLLDVINGKLALFNRRDELEAAWEYVMPILENWTNNTTPPHGYGAHSWGPEAARELLARDGHKWHEEQ

SEQ ID NO: 16915 - DNA, 1773 bp, Deinococcus radiodurans R1
  CDS (1)..(1773): transl_table=11
atgaccgaccggccccgtcccaaaaagagcagtccgaaaaagagtggccccgagaaggccctcgccaaggaaagtgccgcgcagggcgaggcggccaaggcgacccggcaggccactcagcagaccgaggcggccaagaaggtcggtgtggcccagcccggcgctccggcgcagtcccgcaaagcggcccgcaagtcacgccagcgggtgcccaagcacgccggggacaatgcccccaaaagcgacgcgcccggcgccgacggccagaatccctttcgcaccgccatgcgccgcagccgcgcgcccgaacctgccacgctggtgattttcggcgcgaccggcgaccttgcccggcgcaagttgctgcccgccgtgttcggcctgtggcaagacggcctgctcggcagcgcgttcaacatcgtcggcgtgggccggcaggaaatggacgacgagcagttcaaggactacgccatagacgccctgaagacctccaaggaaaccgacgaaatcaaggaaggcagcctggaaaagttccgcgagctgctctactacgaatacggcgaattcggcgaggacgaggtgtacgacaaggtccgcagtgaactcgaccgcgccgagaccgcccgtggcggcggcaagaacgcgctgttttacctctccaccccgccgagcctcttcgagccgatttcgagcggcctggggcggcagggcctgcaagacgagacggaaggctggcggcgcatcgtcatcgaaaaacccttcgggcgcgacctgcaatcggcccgcgaactcaacgacgccattcaccgcgtctgggacgagtcgcaggtgtaccgcatcgaccattatctcggtaaggagacggtgcagaacctgatggcgatccgtttcgggaacgccattttcgagccgctgtggaaccgggggtttgtcgaccacgtgcagatcacggcgtccgaggacctggggctggagggccgcgccgggtactacgaggaagcgggcatcgtgcgcgacatgctgcaaaaccacctgatgcagctttttaccctgaccgccatggaagcgccctcggcgttcgaggccgacgccatccgcgacgagaaggtcaaggtgctgcgggccgtcaagcgcattccggcggaccgggtgcccgaagtcgccgtgcgcgggcagtacggccccggcgccctcgacggccagaccgtgcccggctacaagcaggagccggacgtaaagcgcggcagccgcacgcccacctacgtcgccgtcaagctcgaggtggacaactggcgctggcagggcgtgccgtttttcctgcgcaccggcaagcgcttgcccaagaaagtcaccgaaatcgccgtggtgttcaagcgcccgccgctgggcctctttcccggcggactggagcgcaacgtgctggccttccgcattcagcccgacgaaggcgtgagcctgaagttctcctccaaatcgccggggcaagagatggtgctgcgcgaggtcgtgatggatttccgttacgacgccttcggggcacagctcgaaagcccctactcgcgcttgctgctcgacgcgatgctcggcgacgccaccctctttccccgcgaggacgaggtggaccacgcctggcaaatcgtctcgggcatcttgcaggcctgggaaggcgcggacgcggcggcccccaaattccccaactacgcggcgggcacctggggccccgacgccgccgatgagctgctcggccccggacggcgctggaggcggctgtga

SEQ ID NO: 16916 - protein, 590 aa, Deinococcus radiodurans R1
MTDRPRPKKSSPKKSGPEKALAKESAAQGEAAKATRQATQQTEAAKKVGVAQPGAPAQSRKAARKSRQRVPKHAGDNAPKSDAPGADGQNPFRTAMRRSRAPEPATLVIFGATGDLARRKLLPAVFGLWQDGLLGSAFNIVGVGRQEMDDEQFKDYAIDALKTSKETDEIKEGSLEKFRELLYYEYGEFGEDEVYDKVRSELDRAETARGGGKNALFYLSTPPSLFEPISSGLGRQGLQDETEGWRRIVIEKPFGRDLQSARELNDAIHRVWDESQVYRIDHYLGKETVQNLMAIRFGNAIFEPLWNRGFVDHVQITASEDLGLEGRAGYYEEAGIVRDMLQNHLMQLFTLTAMEAPSAFEADAIRDEKVKVLRAVKRIPADRVPEVAVRGQYGPGALDGQTVPGYKQEPDVKRGSRTPTYVAVKLEVDNWRWQGVPFFLRTGKRLPKKVTEIAVVFKRPPLGLFPGGLERNVLAFRIQPDEGVSLKFSSKSPGQEMVLREVVMDFRYDAFGAQLESPYSRLLLDAMLGDATLFPREDEVDHAWQIVSGILQAWEGADAAAPKFPNYAAGTWGPDAADELLGPGRRWRRL

SEQ ID NO: 16917 - DNA, 1512 bp, Agrobacterium tumefaciens str. C58
  CDS (1)..(1512): transl_table=11
ttgatgccccaacctttgaagatcgagagaatcgatatgagcagtcagatcattcctgttgaaccttttgattgtgtcgttttcggcggcacgggcgatcttgccgagcgcaagcttctgccggccctttatcaccggcaggtcgaaggccagttcacggagccgacccgcatcatcggcgcgtcgcgttcggtcatgacccatgaggaatatcgcaaattcgcgcaggacgccctgaaggaacacctgaaggccggcgaatatgacgatgcgcaggtgaccctgttcctcaaccggcttttctacgtgcccgtcgatgccaagtccggcaatggctgggacgtgctgaagaaactgctcgatgagggcaaggaacgcatccgcgcgttttatctggccgtcgcacccggcattttcggcgacatcgccgacaagatccgtgagcacaagctgatcacccgctcgacccgcatcgtcgttgaaaagccgatcggccgggatctcgcatccgcgcaggaactgaacgacaccatcggtcacgtcttcaaggaagagcagatcttccgcatcgaccactatctcggcaaggagacggtgcagaacctgatggcgctgcgtttcgccaatgcgctttacgagccgctgtggaattccgcccatatcgaccacgttcagatcaccgttgccgaagcggtgggtcttgaaggtcgcgccggttattacgacaaggccggtgcgctgcgcgacatggtgcagaaccacattctccagctgctttgcctcgttgccatggagccgcccgcttccatgaaatcggaggcagtgcgcgacgaaaagctcaaggtactgcgctcgctgaagccaatcgataccagcaatgtcgaaaagctgacggtacgcggccagtaccgcgccggcgcttccgcaggcggccccgtcaagggttatctggaagagctggaaggcggcgtttccaacaccgaaaccttcgtcgccatcaaggctgaaatcgccaactggcgctgggccggcgttcccttctacatccgcaccggcaaacgcctcgcgacccgtgtttcggaaatcgtcgtcaccttcaagcagatcccgcactcgatcttcgacgatgcggctggcaagatcgaagccaacaagctggtcattcgcctgcagccggatgaaggcgtcaagcagtcgctcctcatcaaggatcccggtccaggcggcatgcgcctgcgtcaggtctcgctggacatgagctttgccgaagccttcaacgtgcgcagccccgatgcctatgagcggctgttgatggacaccattcgttccaaccagacattgttcatgcgccgcgacgaggtcgaggccgcgtgggactggatcgaccccatcttgaagagctgggaagagctgggacagagcgtacagggttacactgccggcacctggggcccgagcggttcgatcgcactgatcgagcgcgacggccgcacctggcacgatgccgactga

SEQ ID NO: 16918 - protein, 503 aa, Agrobacterium tumefaciens str. C58
MMPQPLKIERIDMSSQIIPVEPFDCVVFGGTGDLAERKLLPALYHRQVEGQFTEPTRIIGASRSVMTHEEYRKFAQDALKEHLKAGEYDDAQVTLFLNRLFYVPVDAKSGNGWDVLKKLLDEGKERIRAFYLAVAPGIFGDIADKIREHKLITRSTRIVVEKPIGRDLASAQELNDTIGHVFKEEQIFRIDHYLGKETVQNLMALRFANALYEPLWNSAHIDHVQITVAEAVGLEGRAGYYDKAGALRDMVQNHILQLLCLVAMEPPASMKSEAVRDEKLKVLRSLKPIDTSNVEKLTVRGQYRAGASAGGPVKGYLEELEGGVSNTETFVAIKAEIANWRWAGVPFYIRTGKRLATRVSEIVVTFKQIPHSIFDDAAGKIEANKLVIRLQPDEGVKQSLLIKDPGPGGMRLRQVSLDMSFAEAFNVRSPDAYERLLMDTIRSNQTLFMRRDEVEAAWDWIDPILKSWEELGQSVQGYTAGTWGPSGSIALIERDGRTWHDAD

SEQ ID NO: 16919 - DNA, 1386 bp, Agrobacterium tumefaciens str. C58
  CDS (1)..(1386): transl_table=11
atgaaagcatcagccacggacagacagcgatcggacgtgctggtggtgttcggcgccacgggtgatcttgcctataagatgatctttccctctctctacgccatggtgaaacgcggcgcgctgcaaacgcccatcatcggagtcgctttcgacgattggccgcgtgagcagctgatagcgcgggcgcgcgatgcggtcgccaaccatttggacaagatcgatgaagccgtcttcgaaaaattcgccgcacagctgacctatgtctccggcgattatcgcaacgaagcgacattcgaaaagctgcgcacggcgcttggcgggcaccagcatccgctttattatctcgccattccgccttccctgttcgaaaccgtggtaaccggcctcaacagggcgggcatcgccgcttcggcccggctgatggtggagaaaccctttggccgtgaccttgcctccgccgaagccttaaatgaagcgttgcacgcggttttcgcagaggatgctattttccgcatcgaccatttcctgggcaaggaagccatccagaaccttctttattttcgttttgccaatgcctttctagagcccgtgtggaatcgcgaccacgttgagagcgtgcagatcaccatggccgaagatttcggcatcagggggcgcggcaagttttatgacgaagtcggatgtatccgcgatgtgatccagaaccatctgatcaatgtgctgttgctgctggccatggagccgccagccaccagcgcctcggatgatctcgtcgatgaaaaagtgcagatactgaaagccatgccgccgctcacccgcgatgatgtggtgcgcggacagttcagaggttatctggacgagccgggtgtcgcctcggcgtccaaccgggaaaccttcgccgccgcccgctttcgcgtcgccacctggcgctggaatggcgtgcctttcttcatccggtccggcaagaacctgccggcgcatgcaaccgaagtcgtggtccgcttcaagcggccgccaattgcgctctttggcgatgtcgagacaacgcccgccaattatgtgcgcttccgtctgggcccggatatcgcgatcggaatcggtgcgcgtcgcaaggcagctggcgatggcatgcgcggcgaggccgtagaactcggcgcggtcgatgacggtatcggtgacatggcgccttatgagcggctgatcggcgatgcgatggccggcgagcgtcagctctttacccgccaggatgcggcggaactggcctggaagatcgtggagcctatcctcgatgatcccgccgtgccgcctgtctatgaggtgggaagctggggcccggcggaaatggcagggtttggcccgccaggcggatgggttgatcccgaataa

SEQ ID NO: 16920 - protein, 461 aa, Agrobacterium tumefaciens str. C58
MKASATDRQRSDVLVVFGATGDLAYKMIFPSLYAMVKRGALQTPIIGVAFDDWPREQLIARARDAVANHLDKIDEAVFEKFAAQLTYVSGDYRNEATFEKLRTALGGHQHPLYYLAIPPSLFETVVTGLNRAGIAASARLMVEKPFGRDLASAEALNEALHAVFAEDAIFRIDHFLGKEAIQNLLYFRFANAFLEPVWNRDHVESVQITMAEDFGIRGRGKFYDEVGCIRDVIQNHLINVLLLLAMEPPATSASDDLVDEKVQILKAMPPLTRDDVVRGQFRGYLDEPGVASASNRETFAAARFRVATWRWNGVPFFIRSGKNLPAHATEVVVRFKRPPIALFGDVETTPANYVRFRLGPDIAIGIGARRKAAGDGMRGEAVELGAVDDGIGDMAPYERLIGDAMAGERQLFTRQDAAELAWKIVEPILDDPAVPPVYEVGSWGPAEMAGFGPPGGWVDPE

SEQ ID NO: 16921 - DNA, 1488 bp, Streptococcus pneumoniae R6
  CDS (1)..(1488): transl_table=11
atgtcatctaaggttattgttacaattttcggtgcgagtggagacctggctaaacgcaagctctacccttccctttttagactatataaatccggcaatctttccaagcactttgccgttattggaactgcccgtagaccttggagtaaggaatattttgaatctgtagttgtcgagtccatccttgatttggcagatagtaccgagcaagcccaagaatttgctagccacttctactatcaaagccatgatgtcaatgattcggaacattatattgctttgcgtcaattacaagctgagcttaatgaaaaataccaagctgaacacaataagctcttcttcttgtctatggcacctcagttctttggaaccattgccaaacacctcaaatctgaaaacattgtcgatggcaaaggttttgagcgcttgatcgttgaaaaaccatttggtacagattacgcaactgcaaacaagttgaatgacgaactcctagcaacatttgacgaagaacaaattttccgtatcgaccattatcttggtaaggaaatgatccaaagcatctttgcagttcgctttgcaaacttgatttttgaaaacgtttggaacaaggattttatcgacaatgttcaaattacctttgcggagcgcttgggtgtagaagaacgtggtggctactatgaccaatccggtgccctccgtgacatggtccaaaaccacactctacaacttctttcgctcctcgccatggacaaaccagcaagcttcacaaaagacgagattcgtgctgaaaagattaaggtctttaaaaacctctatcatccaactgatgaagaactcaaagaacactttatccgtgggcaataccgctctggtaagattgatggcatgaaatacatctcttatcgtagcgagccaaatgtgaatccagaatcaacaactgaaacctttacatctggtgccttctttgtagacagcgatcgattccgtggtgttcctttctttttccgtacaggtaaacgactgactgaaaaaggaactcatgtcaacatcgtctttaaacaaatggattctatctttggagaaccacttgctccaaatattttgaccatctatattcaaccaacagaaggcttctctcttagcctaaatgggaagcaagtaggagaagaatttaacttggctcctaactcacttgattaccgtacagatgcgactgcaactggtgcttctccagaaccatacgaaaaattgatttatgatgtcctaaataacaactcaactaactttagccactgggatgaagtttgtgcgtcatggaagttgattgaccgtattgaaaagctctgggctgaaaatggtgccccacttcatgactataaagctggaagcatgggacctcaagccagctttgacctacttgaaaaattcggtgccaaatggacttggcaaccagatatcacctatcgtcaagatggtcgcttagaataa

SEQ ID NO: 16922 - protein, 495 aa, Streptococcus pneumoniae R6
MSSKVIVTIFGASGDLAKRKLYPSLFRLYKSGNLSKHFAVIGTARRPWSKEYFESVVVESILDLADSTEQAQEFASHFYYQSHDVNDSEHYIALRQLQAELNEKYQAEHNKLFFLSMAPQFFGTIAKHLKSENIVDGKGFERLIVEKPFGTDYATANKLNDELLATFDEEQIFRIDHYLGKEMIQSIFAVRFANLIFENVWNKDFIDNVQITFAERLGVEERGGYYDQSGALRDMVQNHTLQLLSLLAMDKPASFTKDEIRAEKIKVFKNLYHPTDEELKEHFIRGQYRSGKIDGMKYISYRSEPNVNPESTTETFTSGAFFVDSDRFRGVPFFFRTGKRLTEKGTHVNIVFKQMDSIFGEPLAPNILTIYIQPTEGFSLSLNGKQVGEEFNLAPNSLDYRTDATATGASPEPYEKLIYDVLNNNSTNFSHWDEVCASWKLIDRIEKLWAENGAPLHDYKAGSMGPQASFDLLEKFGAKWTWQPDITYRQDGRLE

SEQ ID NO: 16923 - DNA, 1476 bp, Salmonella typhimurium LT2
  CDS (1)..(1476): transl_table=11
atggcggtaacgcaaacagcccaggcatgtgacctggtcattttcggcgcgaaaggcgacctggcgcgccggaaattgctgccttccctgtatcagcttgagaaagccggccagatccatccggatacccgtatcattggggtggggcgcgcggactgggataaagaagcctatacccacgttgtgcgtgaagcgctggaaaccttcatgaaggaaaaaattgatgaaggcttgtgggatacgctgagcggccgtctggatttttgtaatcttgacgttaacgatacgcctgcgtttagtcgcctgggcgatatgctggatcaaaaaaaccgcaccaccattaactattttgcgatgccgcccagcacctttggcgctatttgcaaagggttaggagaggctaaactcaacgccaaaccggcgcgcgtcgtgatggaaaaaccgttgggtacttcgctggcgacctcgcgtgagattaacgatcgggtcggcgaatactttgaagagtgccaggtatatcgtatcgaccactatctgggtaaagaaacggttctcaacctgctggcgctgcgttttgccaactcgttattcgttaataactgggataaccgcactatcgatcacgttgagattaccgtagcggaagaggtggggattgaagggcgctggggatactttgaccaggccggtcagatgcgcgatatgatccagaaccacttgctgcaaattctctgcatgattgccatgtcaccgccgtctgacctgagcgccgacagtattcgcgatgaaaaagtcaaagtgttgaaatcgctgcgccggattgatcgctccaacgtgcgtgaaaaaacggttcgtggtcaatacaccgcgggctttgcgcaggggcaaaaggtgccgggctatctggaagaagagggcgcgaataaaagcagcaacaccgaaacattcgtcgcgatccgcgtcgacatcgataactggcgttgggcgggcgtgccattctatctgcgcaccggcaagcgtctgccaaccaagtgctctgaagtcgtggtttatttcaagacgcctgaactgaacctctttaaagagtcctggcaagacctgccgcagaacaaattgacgattcgcctgcagccggatgaaggcgtagatattcaggtgcttaacaaagtaccggggctggatcataagcataatctgcagatcacgaagcttgatctgagctactccgagacctttaatcagacgcacctggcggatgcctatgaacgcctgctgctggaaacgatgcgtggcattcaggcgctgtttgtccgccgtgacgaagtggaagaagcctggaagtgggtggactccattaccgaagcatgggcgatggacaacgacgcgccgaagccgtatcaggcgggcacctggggaccggtagcgtccgtggcgatgattacccgtgacggtcgttcgtggaatgagtttgagtaa

SEQ ID NO: 16924 - protein, 491 aa, Salmonella typhimurium LT2
MAVTQTAQACDLVIFGAKGDLARRKLLPSLYQLEKAGQIHPDTRIIGVGRADWDKEAYTHVVREALETFMKEKIDEGLWDTLSGRLDFCNLDVNDTPAFSRLGDMLDQKNRTTINYFAMPPSTFGAICKGLGEAKLNAKPARVVMEKPLGTSLATSREINDRVGEYFEECQVYRIDHYLGKETVLNLLALRFANSLFVNNWDNRTIDHVEITVAEEVGIEGRWGYFDQAGQMRDMIQNHLLQILCMIAMSPPSDLSADSIRDEKVKVLKSLRRIDRSNVREKTVRGQYTAGFAQGQKVPGYLEEEGANKSSNTETFVAIRVDIDNWRWAGVPFYLRTGKRLPTKCSEVVVYFKTPELNLFKESWQDLPQNKLTIRLQPDEGVDIQVLNKVPGLDHKHNLQITKLDLSYSETFNQTHLADAYERLLLETMRGIQALFVRRDEVEEAWKWVDSITEAWAMDNDAPKPYQAGTWGPVASVAMITRDGRSWNEFE

SEQ ID NO: 16925 - DNA, 1476 bp, Listeria monocytogenes EGD-e
  CDS (1)..(1476): transl_table=11
atgacagatgagttagaacaaaaagcactgattactatttttggcggtacgggagatttggcaaatcgcaaactttacccttcgctatatcatttgtacagtaagggatctcttggcgacaattttgctgttattggaacggctcgtcgtgaatggagtaacgatttcttccgtgataaagtaaaagagtctatcaaagacattgacggttctgaaaaagacgcagatgcatttgcttctcacttctactatcaatctcatgatgtgacaaataaagaatcttatctaactttaaaagatttgtctgatgaattagatgcaaaatacgaattagatggcaatcgccttttctatcttgcaatggcgccaaatttctttggaactatcgcaagtcgcattaaatctgaaggctttgttgatacagacggtttccatcgtttaattatcgaaaaaccattcggccatgatttagctagtgcggaagaattaaacaattcacttcgtcaagctttcaaggaagatgaaatttatcgtattgaccattatttaggaaaagaaatgatccaaaatatttcggttattcgttttgcaaattctattattgaatcgctttggaataatcgttacatcgataatattcaagttactttaacagaggtacttggagtcgaagatcgtggacgctattacgatgaaagtggcgcacttcgagacatggttcaaaatcatatcttacaaatcgtttctttacttgcaatggagccaccgattaacttatctactcgcgagattcgtcatgaaaaagttcgcgcgcttcgttctttacgcgtttttgaaggaaaagaagtgcatcaaagctttatccgtggtcaatatggtcccggtgaagtggatggtaaagagttaaaaggttatcgtcaagaagataatgtggatccccattccaatacggaaacatttgttgcagccaaacttgaaatcgataatttccgctgggctggcgtaccattttacattcgcactggtaaacgtcttgcgaagaaaacaacgcaaattgcgattcagtttaaagatgtcccactaaacttattcgggcaacaacaatcacttggtggtaatgtgcttgttattcatatccaaccggacgaaggtattacacttcatttgaacgtaaaagaacctggtcaaggtatggttacgatgccagtcaacttgaattatattcattcctctccagacggcatgaacacacctgaggcttacgaaaaattgattctagactgtcttcgcggtgacgcgacttacttctctcactgggatgaagtatcgctatcatggaactttatcgaccatatagcagatgtttggacaaatacgaaagatcatttcccgaactacaaatccggttcaatggggccaaaagaagcagacgacctcattcaacgtgacggattccagtggttcccgatcgattaa

SEQ ID NO: 16926 - protein, 491 aa, Listeria monocytogenes EGD-e
MTDELEQKALITIFGGTGDLANRKLYPSLYHLYSKGSLGDNFAVIGTARREWSNDFFRDKVKESIKDIDGSEKDADAFASHFYYQSHDVTNKESYLTLKDLSDELDAKYELDGNRLFYLAMAPNFFGTIASRIKSEGFVDTDGFHRLIIEKPFGHDLASAEELNNSLRQAFKEDEIYRIDHYLGKEMIQNISVIRFANSIIESLWNNRYIDNIQVTLTEVLGVEDRGRYYDESGALRDMVQNHILQIVSLLAMEPPINLSTREIRHEKVRALRSLRVFEGKEVHQSFIRGQYGPGEVDGKELKGYRQEDNVDPHSNTETFVAAKLEIDNFRWAGVPFYIRTGKRLAKKTTQIAIQFKDVPLNLFGQQQSLGGNVLVIHIQPDEGITLHLNVKEPGQGMVTMPVNLNYIHSSPDGMNTPEAYEKLILDCLRGDATYFSHWDEVSLSWNFIDHIADVWTNTKDHFPNYKSGSMGPKEADDLIQRDGFQWFPID

SEQ ID NO: 16927 - DNA, 1575 bp, Drosophila melanogaster
  CDS (1)..(1575)
atggcaacgcaaaaggaagatcacaccgccctggatctcataatcaagtcactcaagtcgcctacaatggtctgcgagggaacccactttgacggcaagattccgcacacgttcgtcatctttggggcgtcgggcgatctggccaagaagaagatctaccccacgctctggtggctctaccgcgatgacctgctgcccaagccgaccaagttctgcggctatgcccgttccatgctgaccgtcgatagcatcaaggagcagtgtctgccgtacatgaaggtccagccgcacgagcagaagaagtacgaggagttctgggccctcaatgagtacgtgtccggcagatatgacggacgcactggcttcgagctgcttaaccagcagctggagattatggagaacaagaacaaggccaaccgcatcttctatctggccctgccgcccagcgtcttcgaggaggtgactgtcaacatcaagcagatctgcatgtcggtctgcggttggaaccgcgtgattatcgagaagcctttcggccgggatgacgcctcctcgcaggcgctgagcgaccatctggccggtctgttccaggaggatcagctgtaccgcatcgatcactacctgggcaaggagatggtgcagaacctgatgaccatacgcttcggcaacaagatcctcagctcgacgtggaaccgcgagaacatcgcctccgtgctgatcacgttcaaggagcccttcggcacgcagggtcgtggcggctacttcgacgagttcggcatcatacgcgacgtgatgcagaaccatctgctgcagatcctctcgctggtggccatggagaagccggtgagctgccacccggacgacattcgtgacgagaaggtcaaggtgctgaagagcatcgaggccctgacgctggatgacatggtgctgggccagtacctgggcaatccgcagggtacaaacgatgatgcgcgcacgggctacgtggaggaccccaccgttagcaacgattcgaacacgcccacctacgccctcggcgtgctcaagatcaacaacgagcgctggcagggagtgcccttcatcctgcgctgcggcaaggcgctgaacgagcgcaaggcggaggtgcgtatccagtaccaggacgtgcccggcgacatcttcgagggcaatacgaagcgcaacgagctggtcatccgcgtccagccgggcgaggccctgtactttaagatgatgaccaagagccccggcatcacgttcgacatcgaggagacggagctggacctcacctacgagcaccgctacaaggactcctacctgccggacgcgtacgagcgtctcatcctcgacgtcttctgcggctcccagatgcacttcgtccgctcggacgagctgcgcgaggcgtggcgcatatttacgcccattctgcaccagatcgagaaggagcacattcggccaatcacctaccagtacggatcgcgcggtcccaaggaggcggaccgcaagtgcgaggagaacaatttcaagtactccggctcctacaagtggcacggcggcaaggcggccacgtccaatcactga

SEQ ID NO: 16928 - protein, 524 aa, Drosophila melanogaster
MATQKEDHTALDLIIKSLKSPTMVCEGTHFDGKIPHTFVIFGASGDLAKKKIYPTLWWLYRDDLLPKPTKFCGYARSMLTVDSIKEQCLPYMKVQPHEQKKYEEFWALNEYVSGRYDGRTGFELLNQQLEIMENKNKANRIFYLALPPSVFEEVTVNIKQICMSVCGWNRVIIEKPFGRDDASSQALSDHLAGLFQEDQLYRIDHYLGKEMVQNLMTIRFGNKILSSTWNRENIASVLITFKEPFGTQGRGGYFDEFGIIRDVMQNHLLQILSLVAMEKPVSCHPDDIRDEKVKVLKSIEALTLDDMVLGQYLGNPQGTNDDARTGYVEDPTVSNDSNTPTYALGVLKINNERWQGVPFILRCGKALNERKAEVRIQYQDVPGDIFEGNTKRNELVIRVQPGEALYFKMMTKSPGITFDIEETELDLTYEHRYKDSYLPDAYERLILDVFCGSQMHFVRSDELREAWRIFTPILHQIEKEHIRPITYQYGSRGPKEADRKCEENNFKYSGSYKWHGGKAATSNH

SEQ ID NO: 16929 - DNA, 1476 bp, Agrobacterium tumefaciens str. C58
  CDS (1)..(1476): transl_table=11
atgagcagtcagatcattcctgttgaaccttttgattgtgtcgttttcggcggcacgggcgatcttgccgagcgcaagcttctgccggccctttatcaccggcaggtcgaaggccagttcacggagccgacccgcatcatcggcgcgtcgcgttcggtcatgacccatgaggaatatcgcaaattcgcgcaggacgccctgaaggaacacctgaaggccggcgaatatgacgatgcgcaggtgaccctgttcctcaaccggcttttctacgtgcccgtcgatgccaagtccggcaatggctgggacgtgctgaagaaactgctcgatgagggcaaggaacgcatccgcgcgttttatctggccgtcgcacccggcattttcggcgacatcgccgacaagatccgtgagcacaagctgatcacccgctcgacccgcatcgtcgttgaaaagccgatcggccgggatctcgcatccgcgcaggaactgaacgacaccatcggtcacgtcttcaaggaagagcagatcttccgcatcgaccactatctcggcaaggagacggtgcagaacctgatggcgctgcgtttcgccaatgcgctttacgagccgctgtggaattccgcccatatcgaccacgttcagatcaccgttgccgaagcggtgggtcttgaaggtcgcgccggttattacgacaaggccggtgcgctgcgcgacatggtgcagaaccacattctccagctgctttgcctcgttgccatggagccgcccgcttccatgaaatcggaggcagtgcgcgacgaaaagctcaaggtactgcgctcgctgaagccaatcgataccagcaatgtcgaaaagctgacggtacgcggccagtaccgcgccggcgcttccgcaggcggccccgtcaagggttatctggaagagctggaaggcggcgtttccaacaccgaaaccttcgtcgccatcaaggctgaaatcgccaactggcgctgggccggcgttcccttctacatccgcaccggcaaacgcctcgcgacccgtgtttcggaaatcgtcgtcaccttcaagcagatcccgcactcgatcttcgacgatgcggctggcaagatcgaagccaacaagctggtcattcgcctgcagccggatgaaggcgtcaagcagtcgctcctcatcaaggatcccggtccaggcggcatgcgcctgcgtcaggtctcgctggacatgagctttgccgaagccttcaacgtgcgcagccccgatgcctatgagcggctgttgatggacaccattcgttccaaccagacattgttcatgcgccgcgacgaggtcgaggccgcgtgggactggatcgaccccatcttgaagagctgggaagagctgggacagagcgtacagggttacactgccggcacctggggcccgagcggttcgatcgcactgatcgagcgcgacggccgcacctggcacgatgccgactga

SEQ ID NO: 16930 - protein, 491 aa, Agrobacterium tumefaciens str. C58
MSSQIIPVEPFDCVVFGGTGDLAERKLLPALYHRQVEGQFTEPTRIIGASRSVMTHEEYRKFAQDALKEHLKAGEYDDAQVTLFLNRLFYVPVDAKSGNGWDVLKKLLDEGKERIRAFYLAVAPGIFGDIADKIREHKLITRSTRIVVEKPIGRDLASAQELNDTIGHVFKEEQIFRIDHYLGKETVQNLMALRFANALYEPLWNSAHIDHVQITVAEAVGLEGRAGYYDKAGALRDMVQNHILQLLCLVAMEPPASMKSEAVRDEKLKVLRSLKPIDTSNVEKLTVRGQYRAGASAGGPVKGYLEELEGGVSNTETFVAIKAEIANWRWAGVPFYIRTGKRLATRVSEIVVTFKQIPHSIFDDAAGKIEANKLVIRLQPDEGVKQSLLIKDPGPGGMRLRQVSLDMSFAEAFNVRSPDAYERLLMDTIRSNQTLFMRRDEVEAAWDWIDPILKSWEELGQSVQGYTAGTWGPSGSIALIERDGRTWHDAD

SEQ ID NO: 16931 - DNA, 1476 bp, Brucella melitensis 16M
  CDS (1)..(1476): transl_table=11
atgaccagtcagacaattccggtagatcccttcgactgcatcgtttttggtggcaccggcgatcttgccgagcgcaagcttattccggcgctttatcagcgccagcgcgcaggccagctttccgaccccacacgcatcatcggcgcctcgcgcagccagatgaccgacgacgaatatcgcaccttcgccggcaatgcgatcaaggaacatgtgaaaccggaagaggtggatcaggccgaagttgaaatcttcctcaagcggctgcactatgtggcggtggacgccaagtccgacgagggctgggatgcgctgaagaccctgatcggcaagaagccggaaaagatccgagccttttatctggccgtcagcccgaccctgttcggcgatatcgccacgcggctcaaggcgcatggcctcatcacgcgcgatacgcgcatcgtcgtggaaaagccgattggccgcgatctcgattccgccaaggcgctcaacgacacgctgggcagtgtgttccgcgaagaccagattttccgcatagaccactatctcggcaaggaaacggtgcagaacctgatggcgctgcgctttgccaatgcgctctacgagccgctgtggaactccgcccatatcgaccatgtgcagatcacggtggcggaagccgtgggccttgaaggccgcgcaggctattacgacaaggcgggcgcgctgcgcgacatggtgcagaaccacattctccagcttctctgccttgttgccatggaaccgccatcctcgattgaggccgacgccgtacacgacgagaaggtaaaggttctgcgctccctgcagccgatctccacgcataatgtcgaggaactgacggtccgcggacaatatcgcgcgggcgcttccgcaggcgggccggtcaagggctatctggaagaccttgaaagcgacaccagcaatacggaaacattcgtggcgctgaaggcggaaatcgccaactggcgctgggcgggtgtgccgttctatctgcgcaccggcaagcgccttgccacgcgtgtttcggaaatcgtcatcacgttcaagcccattccgcattccatctttggcgaaagcgcgggcaaggtgattgccaatcagcttgtcatccgcctgcaaccggacgaaggcgtgaagcaatggctgatgatcaaggatcccggtccgggtggaatgcgcctgcgccacatgccgctcgacatgagctttgcggaatccttcgaggatcgcaacccggatgcctatgagcgcctcatcatggatgtggtgcgcggcaaccagaccctgttcatgcgccgcgacgaagtggaagcggcctggcgctggatcgacccgatccttcaggcatgggagttcaacagccagcccgtgcagggctatacggctggcacatgggggccttcgtcctccatcgcgctcattgagcgcgatggccgcacctggcacgaaagcctctaa

SEQ ID NO: 16932 - protein, 491 aa, Brucella melitensis 16M
MTSQTIPVDPFDCIVFGGTGDLAERKLIPALYQRQRAGQLSDPTRIIGASRSQMTDDEYRTFAGNAIKEHVKPEEVDQAEVEIFLKRLHYVAVDAKSDEGWDALKTLIGKKPEKIRAFYLAVSPTLFGDIATRLKAHGLITRDTRIVVEKPIGRDLDSAKALNDTLGSVFREDQIFRIDHYLGKETVQNLMALRFANALYEPLWNSAHIDHVQITVAEAVGLEGRAGYYDKAGALRDMVQNHILQLLCLVAMEPPSSIEADAVHDEKVKVLRSLQPISTHNVEELTVRGQYRAGASAGGPVKGYLEDLESDTSNTETFVALKAEIANWRWAGVPFYLRTGKRLATRVSEIVITFKPIPHSIFGESAGKVIANQLVIRLQPDEGVKQWLMIKDPGPGGMRLRHMPLDMSFAESFEDRNPDAYERLIMDVVRGNQTLFMRRDEVEAAWRWIDPILQAWEFNSQPVQGYTAGTWGPSSSIALIERDGRTWHESL

SEQ ID NO: 16933 - DNA, 1428 bp, Schizosaccharomyces pombe 972h-
  CDS (1)..(1428)
atgctatccatcattgttttcggtgcatccggcgatctcgctaccaaaatgactttcccggccttgtttgccctttacgtccgcaaaattattcccgaggactttcaaatcatcggctatgcccgttccaaattgtcccaagaggccgctaacaaaatcgtcaccgcccatattcccattgacgatactgtcggtgcttctcaaaaggccttaaacacctttgtcgagcattacaagtatgtccccggtacttatgataagcccgagtcttttgagatgctaaacagcattattgctgaaaaggagactgctcccgcctccgaatgcacacgtatcttttacttggttctgcctcctcatctctttgctcccgtttccgagctaatcaagagtaaggctcatcccaatggtatggtcactcgtcttattgttgagaagcccatcggcttcgactacaagtctgccgatgccattctcagcgatctcagcaagcactggtctgccaaggatactttcaaagtcgaccatttccttggcgaggatatgattgatggattcactgcaattcgctttgcaaactccatgttcgagcccatctggaatcgtgaacacattgaaagtgttcgtgtcgactttcgtgaagactttggttgtgagggacgtggaggttattttgagggcgctggtatccttcgcgatgtcgttcaaaatcatcttttgcaactacttaccttactttgcatcgaagagccaaagtctcaagatgccgaagatatcatcaaatgcaaggttgacttcttgaaatcccttcatcccgtttccaaggaggacatcgtctatggacagtacactaaaagtgcaaatggaaaggtccccggttatcgtgaactggatggtgttgctgatgacagtgaagtttctacattctgtgctcttcaacttcgctctgaagcacctcgttggaagggtattcccatcatcatttctgccggtaaaggtttggaccgcgattactttgaagctcgtatcacttttaagcgtagggaaggaggtatgttccctaccgttgatagcagcaatgttctagtccttcgtgtttatcccaaggaattcattgccctcaagggacacattaaacaacctggtttctctcgtcaaattgttcctgtgactttggacgttaagtatcccgaagctttccctgatacatggatccataaggcctatgaagtggttattgccgatgccattaatggaaagcatacacactttattagtgatgatgaggttcgtacctcttggaaaatctttgatgatgtccttgacactacaggcgatttgtcacctcttccttatgcttttggttcccaccatggtccagatgccacactcgaatttttcaagaagcgtaatttagagtgggattaa

SEQ ID NO: 16934 - protein, 475 aa, Schizosaccharomyces pombe 972h-
MLSIIVFGASGDLATKMTFPALFALYVRKIIPEDFQIIGYARSKLSQEAANKIVTAHIPIDDTVGASQKALNTFVEHYKYVPGTYDKPESFEMLNSIIAEKETAPASECTRIFYLVLPPHLFAPVSELIKSKAHPNGMVTRLIVEKPIGFDYKSADAILSDLSKHWSAKDTFKVDHFLGEDMIDGFTAIRFANSMFEPIWNREHIESVRVDFREDFGCEGRGGYFEGAGILRDVVQNHLLQLLTLLCIEEPKSQDAEDIIKCKVDFLKSLHPVSKEDIVYGQYTKSANGKVPGYRELDGVADDSEVSTFCALQLRSEAPRWKGIPIIISAGKGLDRDYFEARITFKRREGGMFPTVDSSNVLVLRVYPKEFIALKGHIKQPGFSRQIVPVTLDVKYPEAFPDTWIHKAYEVVIADAINGKHTHFISDDEVRTSWKIFDDVLDTTGDLSPLPYAFGSHHGPDATLEFFKKRNLEWD

SEQ ID NO: 16935 - DNA, 1422 bp, Schizosaccharomyces pombe 972h-
  CDS (1)..(1422)
atggttacttttatggtatttggtgcatcaggcaacctcgccaacaaaaagacattccctgccctgttccatctcttcaaacgaaacctggtagatcgttcttccttttacgtacttggatatgctagaagtaagatacctatcggtgaattcagggaaagtattcgtgaatctgtgaagccagatactgaaagcaaacaggtgtttcaggacttcattgaccgagtatcttacttcagtggtcagtatgatcagagcagttcttatgtggaatttcgaaaacacctagaatcagttgaaaaaaaagcagactcttcgaaagcacttcgtatcttttatatcgccttaccaccatctgtttacgtgacagtcagttctcatatatatgagaatttatatttaccaggaaaatcgcggttagttattgaaaaaccgtttggtaaaaactatcaatcggctgttaaactcaaagaagaagttcataagcattggaaagaggaagaaatttatcggattgatcattatacagccaaagatatggttaacaattttttcacccttcgttttgcaaactcttcgtccattgacgcagttttaaatcgccattctattcaatccgtcgaaatacacatgtatgaaacgggaggctgtgaaggccgtattggttactatgatgcgaatggagtcgttcgcgacgtcgtacagaatcatttaactcaaattttttgtattgctgctatgaatgaaccgaagtctgcttctgcgagtgatgttcgtgctgaaaaggtcaatttgttgaaagctaccagaccagcatctttgaaagaaagtatgcttggtcagtatacaactagcgaagacggtaaaataccgggctacttagacttggagggagtccctaaagatagtaaagccaccacatttgctgcatccactcttcatgttgataatgatcgatggaagggcgtacccttcgtatttgtctctggtaagcggatgaaaaaaggtgaagtatatatcaagtactatttccgtctaaaagactccggaattttctccgacgtaaaacgacgtcggtacttgattcttcatgttcagccggaggagtttgtcaatttgacatgtactattaataaacccatgactactgaccttcaaccgattgacgcctatgcttcgctcaattataatgagcaatttaaagatctgatgaaggaaaaacgagatggctatgaaattttattcgaagatgcaattcgcggtgatcccactaagttcattcgttatgatgaggttgagtatgcttggaagatatgggacgaaatcctcgattctcccaaaaaacctattccctatccagctggttcagatggtcctgagggtttggaagcttatatgaaaaggcatctaggccatgaatag

SEQ ID NO: 16936 - protein, 473 aa, Schizosaccharomyces pombe 972h-
MVTFMVFGASGNLANKKTFPALFHLFKRNLVDRSSFYVLGYARSKIPIGEFRESIRESVKPDTESKQVFQDFIDRVSYFSGQYDQSSSYVEFRKHLESVEKKADSSKALRIFYIALPPSVYVTVSSHIYENLYLPGKSRLVIEKPFGKNYQSAVKLKEEVHKHWKEEEIYRIDHYTAKDMVNNFFTLRFANSSSIDAVLNRHSIQSVEIHMYETGGCEGRIGYYDANGVVRDVVQNHLTQIFCIAAMNEPKSASASDVRAEKVNLLKATRPASLKESMLGQYTTSEDGKIPGYLDLEGVPKDSKATTFAASTLHVDNDRWKGVPFVFVSGKRMKKGEVYIKYYFRLKDSGIFSDVKRRRYLILHVQPEEFVNLTCTINKPMTTDLQPIDAYASLNYNEQFKDLMKEKRDGYEILFEDAIRGDPTKFIRYDEVEYAWKIWDEILDSPKKPIPYPAGSDGPEGLEAYMKRHLGHE

SEQ ID NO: 16937 - DNA, 1305 bp, Encephalitozoon cuniculi GB-M1
  CDS (1)..(1305)
atgaaggtcgttatcttcgggtccagtggcgatcttgcaaaaagaaagctttttcctgcactctctcggattgacttggagggtgtcggggtggttggctatgcaaggaccaagtacaacatcgagttttcggaagttcttcaggaggtcgggaactactcgccggaatttctttcgaaggtcacctacattccagggccctacgatgacctttcgaagcttaaagaggtctcagactcggagactgtgctgtacttttcagttccatcctctgtgtacacttgtttattcagagagatatcgaagcttgactacaaggtgattggagtcgagaagccatatggagatagcattgagtcgtttatggagataaaggggtttgatctggggaagaccaggtttattgaccactatcttctgaagccgcttgtggtggctatgcctgggattataagggagacgggggcgattcgagaggtgatgagcaacagatatgtgaagagtgttgagatagtctcgaaggaagttcttgggggagagggaagacactacttcgataagaacggaattataagggacatggtcctgagccacatgggcgagcttcttggggttgttgcgtctgacgtaacaaagccatcgaggattatggaagcattggcgagaatggaggttttcaaggcatgcaccgtcgacaccgagagatgcatttatgggcagtatgacgactatattaaggagattcacaaggactcgagtacggagacgttctgcatggttcccataagcatagggactccccgctggtctaaggttcccttcatcattgttgcagggaaggggatgaacgaaaagagaacagagataatacttgagtttcgaagagatgtatttgcgaagtgcattgagctgttttctatgccgaggcaatcttcgtgcaggattgttcacaccaacgaaatagaaacggttcgactggtctttaatatatatcctgaatgcgaagtatttctggaagttctcgtgggaggggagcctgtccggtatgttctgcatgacaagaaagagattgatggcctgatgcatgacagttatggaggataccatgactatgagatcatctttgacagtcttgtaagaggcaaggactttagcagcgtgagctctcaggaggcagagcttctgtggaaggtgtttaaccccatactatctattagcaaagaggacatgctgttctactattctaagggaattgacatgcctaaggaagctgaagaaatgatcagggaaattaaagaccattag

SEQ ID NO: 16938 - protein, 434 aa, Encephalitozoon cuniculi GB-M1
MKVVIFGSSGDLAKRKLFPALSRIDLEGVGVVGYARTKYNIEFSEVLQEVGNYSPEFLSKVTYIPGPYDDLSKLKEVSDSETVLYFSVPSSVYTCLFREISKLDYKVIGVEKPYGDSIESFMEIKGFDLGKTRFIDHYLLKPLVVAMPGIIRETGAIREVMSNRYVKSVEIVSKEVLGGEGRHYFDKNGIIRDMVLSHMGELLGVVASDVTKPSRIMEALARMEVFKACTVDTERCIYGQYDDYIKEIHKDSSTETFCMVPISIGTPRWSKVPFIIVAGKGMNEKRTEIILEFRRDVFAKCIELFSMPRQSSCRIVHTNEIETVRLVFNIYPECEVFLEVLVGGEPVRYVLHDKKEIDGLMHDSYGGYHDYEIIFDSLVRGKDFSSVSSQEAELLWKVFNPILSISKEDMLFYYSKGIDMPKEAEEMIREIKDH

SEQ ID NO: 16939 - DNA, 1545 bp, Corynebacterium glutamicum ATCC 13032
  CDS (1)..(1545): transl_table=11
gtgagcacaaacacgaccccctccagctggacaaacccactgcgcgacccgcaggataaacgactcccccgcatcgctggcccttccggcatggtgatcttcggtgtcactggcgacttggctcgaaagaagctgctccccgccatttatgatctagcaaaccgcggattgctgcccccaggattctcgttggtaggttacggccgccgcgaatggtccaaagaagactttgaaaaatacgtacgcgatgccgcaagtgctggtgctcgtacggaattccgtgaaaatgtttgggagcgcctcgccgagggtatggaatttgttcgcggcaactttgatgatgatgcagctttcgacaacctcgctgcaacactcaagcgcatcgacaaaacccgcggcaccgccggcaactgggcttactacctgtccattccaccagattccttcacagcggtctgccaccagctggagcgttccggcatggctgaatccaccgaagaagcatggcgccgcgtgatcatcgagaagcctttcggccacaacctcgaatccgcacacgagctcaaccagctggtcaacgcagtcttcccagaatcttctgtgttccgcatcgaccactatttgggcaaggaaacagttcaaaacatcctggctctgcgttttgctaaccagctgtttgagccactgtggaactccaactacgttgaccacgtccagatcaccatggctgaagatattggcttgggtggacgtgctggttactacgacggcatcggcgcagcccgcgacgtcatccagaaccacctgatccagctcttggctctggttgccatggaagaaccaatttctttcgtgccagcgcagctgcaggcagaaaagatcaaggtgctctctgcgacaaagccgtgctacccattggataaaacctccgctcgtggtcagtacgctgccggttggcagggctctgagttagtcaagggacttcgcgaagaagatggcttcaaccctgagtccaccactgagacttttgcggcttgtaccttagagatcacgtctcgtcgctgggctggtgtgccgttctacctgcgcaccggtaagcgtcttggtcgccgtgttactgagattgccgtggtgtttaaagacgcaccacaccagcctttcgacggcgacatgactgtatcccttggccaaaacgccatcgtgattcgcgtgcagcctgatgaaggtgtgctcatccgcttcggttccaaggttccaggttctgccatggaagtccgtgacgtcaacatggacttctcctactcagaatccttcactgaagaatcacctgaagcatacgagcgcctcattttggatgcgctgttagatgaatccagcctcttccctaccaacgaggaagtggaactgagctggaagattctggatccaattcttgaagcatgggatgccgatggagaaccagaggattacccagcgggtacgtggggtccaaagagcgctgatgaaatgctttcccgcaacggtcacacctggcgcaggccataa

SEQ ID NO: 16940 - protein, 514 aa, Corynebacterium glutamicum ATCC 13032
MSTNTTPSSWTNPLRDPQDKRLPRIAGPSGMVIFGVTGDLARKKLLPAIYDLANRGLLPPGFSLVGYGRREWSKEDFEKYVRDAASAGARTEFRENVWERLAEGMEFVRGNFDDDAAFDNLAATLKRIDKTRGTAGNWAYYLSIPPDSFTAVCHQLERSGMAESTEEAWRRVIIEKPFGHNLESAHELNQLVNAVFPESSVFRIDHYLGKETVQNILALRFANQLFEPLWNSNYVDHVQITMAEDIGLGGRAGYYDGIGAARDVIQNHLIQLLALVAMEEPISFVPAQLQAEKIKVLSATKPCYPLDKTSARGQYAAGWQGSELVKGLREEDGFNPESTTETFAACTLEITSRRWAGVPFYLRTGKRLGRRVTEIAVVFKDAPHQPFDGDMTVSLGQNAIVIRVQPDEGVLIRFGSKVPGSAMEVRDVNMDFSYSESFTEESPEAYERLILDALLDESSLFPTNEEVELSWKILDPILEAWDADGEPEDYPAGTWGPKSADEMLSRNGHTWRRP

SEQ ID NO: 16941 - DNA, 1458 bp, Thermoanaerobacter tengcongensis MB4
  CDS (1)..(1458): transl_table=11
atgaaagataaagacctttcaaacgtgatggtcatattcggtggaacaggagatttaacccataaaaaattgatgccggccctttacaacttaagatatcaaaatatcctgcctgaaaattttgctgtagttgctatagggagaagagacaagactgaagaggaatatagaaatgagatgctggagtctgttaaaacttattctagatttgacattgacgaaaaaatctggcaagatttaagtagcaggatattctacaaaagatttgattttaactatgacaacggatatatggaacttagttactttttagatgaactggataggaaatacaatacacagggcaacagggtatattatcttgcagttgcaccggaatattttggcatcattgtggaaaagttatacagacacggaatggtaagtaatgaaacttcatggcagagagtagttatagaaaagccttttggagaaaatttagaatctgcccggaaactaaataaaatgataacagatgtctttacagaaagaaatacttatagaattgatcactatttaggaaaagagatgctacagaatataatggtcatcagatttgccaatgtgttttttgagccagtttggaacagaagatatatagacaatgtgcaaatttcttctaatgagacggtagggatagaaaatagaggaggatactacgagaaagcaggagctttgagggacatggttcaaaaccacatgatgcagcttctgaccttgacggcgatggaaccacctgtaaatttggatacagaatctataagggatgagaaggtgaaggttttaaaatccttagagattatgactcctgagcttgtagagaaaaatgtggtgagagggcagtatgtgggatataggcaggaggaaaaagtatctccaacttccaatacagagacttttgtggcattaaaagtgcacatagaaaatttcagatgggcaggagttcctttttacatcaggactggaaaaaggatgccggaaaaatccacacagattgtcatccaatttaagcctctgccaggtattttgtatttcaaagagtataaaaatttgcttcccaatttgcttgtaataaaaattcagccggaggaaggagtaaaacttcagtttaatgccaaagtgccgggagcaggagatataactatagagcctgtaaatatggatttttgtcagaactgccagatatccaataattctccagaggcatatgaaagacttctttttgatgtgatgagaggagattctactttatttactcgctgggatgaggtagaatattcttggaggtttgtagatgctattgctaaagcatgggcagaaaaaacacccgattttcctaattactatccagggacctggggtcctagtgaggcagaagagcttttgagaagagatggaagaatgtggtggaatgtatag

SEQ ID NO: 16942 - protein, 485 aa, Thermoanaerobacter tengcongensis MB4
MKDKDLSNVMVIFGGTGDLTHKKLMPALYNLRYQNILPENFAVVAIGRRDKTEEEYRNEMLESVKTYSRFDIDEKIWQDLSSRIFYKRFDFNYDNGYMELSYFLDELDRKYNTQGNRVYYLAVAPEYFGIIVEKLYRHGMVSNETSWQRVVIEKPFGENLESARKLNKMITDVFTERNTYRIDHYLGKEMLQNIMVIRFANVFFEPVWNRRYIDNVQISSNETVGIENRGGYYEKAGALRDMVQNHMMQLLTLTAMEPPVNLDTESIRDEKVKVLKSLEIMTPELVEKNVVRGQYVGYRQEEKVSPTSNTETFVALKVHIENFRWAGVPFYIRTGKRMPEKSTQIVIQFKPLPGILYFKEYKNLLPNLLVIKIQPEEGVKLQFNAKVPGAGDITIEPVNMDFCQNCQISNNSPEAYERLLFDVMRGDSTLFTRWDEVEYSWRFVDAIAKAWAEKTPDFPNYYPGTWGPSEAEELLRRDGRMWWNV

SEQ ID NO: 16943 - DNA, 1524 bp, Streptomyces coelicolor A3(2)
  CDS (1)..(1524): transl_table=11
ttgtcaagcagcaatccgctgcgtgaccccgcagaccgacggctcccgcgcatcgcggggccgtcgggtctggtcatcttcggcgtcaccggcgatctgtcccgcaagaagctcatgcccgccgtgtacgacctcgccaaccggggtctgctgccgccgggcttctcgctcgtcgggttcgcccgccgggactgggagcacgaggacttcgcccaggtcgtgcacgacgccgtcaaggagcactcccgcacgccgttccgcgaggaggtctggcagcagctcatccaggggatgcgcttcgtgcagggcaccttcgacgacgacgacgccttcgagcggctgcgcggcaccatcgaggagctggacaaggcacagggcacgggcggcaacttcgccttctacctgtcggtgccgccgaagtccttcccggtggtcatccagcagctcaagaagcacggactggccgaccagacgaacggctcctggcggcgggcggtgatcgagaagcccttcggccacgacctgaagtcggccgaggagctgaacgccatcgtccacgaggtcttcggctccgaccaggtcttccgcatcgaccactacctgggcaaggagaccgtccagaacatcctggcgctgcgcttcgccaacacgatgttcgagccgatctggaaccggtcctacgtcgaccacatccagatcaccatggccgaggacatcggcatcggcggccgggccggctactacgacgggatcggcgcggcgcgtgacgtcatccagaaccacctgctccagctgctcgcgctgaccgcgatggaggagcccgcctccttcgacgcggacgcgctggcggcggagaagaccaaggtgctcggcgcggtccgcctccccaaggacctgggccgggacaccgtgcgcggccagtacgcggcggggtggcagggcggcgccaaggccgtcggttacctcgaagaggacggcatcgaccccaagtcgaagaccgacacctacgccgcgatcaaggtgggcatcgacaaccgccgctgggcgggtgtccccttctacctgcgcaccggcaagcggctgggccgccgggtcacggagatcgcggtcgtcttccagcgggccccgcactcccccttcgacacgacggccaccgaggaactcggctcgaacgcgatcgtcatccgcgtccagcccgacgagggcgtcaccgtccgcttcggttccaaggtgccgggcacgtcgatggagatccgggacgtgtcgatggacttcgcctacggcgagtccttcaccgagtccagcccggaggcgtacgagcgcctgatcctggacgtcctgctcggcgacgccaacctcttcccgcgcaccgaggaggtcgagctgtcctggaagatcctcgacccgatcgaggagtactgggacgagcacggcaccccggcccagtacccggccggcacctgggggcccgtcgaggcggacgacatgctggaacgagacggacggagctggcgccggccatga

SEQ ID NO: 16944 - protein, 507 aa, Streptomyces coelicolor A3(2)
MSSSNPLRDPADRRLPRIAGPSGLVIFGVTGDLSRKKLMPAVYDLANRGLLPPGFSLVGFARRDWEHEDFAQVVHDAVKEHSRTPFREEVWQQLIQGMRFVQGTFDDDDAFERLRGTIEELDKAQGTGGNFAFYLSVPPKSFPVVIQQLKKHGLADQTNGSWRRAVIEKPFGHDLKSAEELNAIVHEVFGSDQVFRIDHYLGKETVQNILALRFANTMFEPIWNRSYVDHIQITMAEDIGIGGRAGYYDGIGAARDVIQNHLLQLLALTAMEEPASFDADALAAEKTKVLGAVRLPKDLGRDTVRGQYAAGWQGGAKAVGYLEEDGIDPKSKTDTYAAIKVGIDNRRWAGVPFYLRTGKRLGRRVTEIAVVFQRAPHSPFDTTATEELGSNAIVIRVQPDEGVTVRFGSKVPGTSMEIRDVSMDFAYGESFTESSPEAYERLILDVLLGDANLFPRTEEVELSWKILDPIEEYWDEHGTPAQYPAGTWGPVEADDMLERDGRSWRRP

SEQ ID NO: 16945 - DNA, 1779 bp, Streptomyces coelicolor A3(2)
  CDS (1)..(1779): transl_table=11
atgagcgaggagcttcccgctggggcgccccaggagaccaaggcgacgaaggaagccaaggagacccggacggcccaggaggcggcggggccgctgcacgcggaggaggccgaggaggcccgcgccgccgaggcggcgaaggcgtccggccgggcgaaggctccccgcggcgcgaagaagtccgcgacgaaccgcgccgccaaggaggcgaagggcaagggcgcggccggggagggcgtcgagccggtggcaccgctcgactggagcaacccgctgcgcgatccccaggaccgccgtctcccccgcatcgcgggcccgtccgggctggtcatcttcggcgtcaccggcgacctgtcccgcaagaagctgatgcccgccgtgtacgacctggccaaccgcggcctgctgccgcccggcttctcgctggtcggcttcgcccgccgggactgggaggaccaggacttcgccgaggtcgtgcacgacgccgtcagggagcacgcgcgcacgccgttccgcgaggaggtctggcagcagctctccgagggcatgcgcttcatccccggcgacttcgacgacgacaacgcgttcgaacagctgcgcaaggccgtcgaggagctggacgcgtcccgcggcaccagcggcaactacgccttctacctctccgtgccgccgaagttcttcccgaaggtcgtccagcagctcaagaagcacgggctgaccgacgcgcccgcgggctcctggcgccgtgcggtgatcgagaagccgttcggccacgacctggacagcgcccgcgacctgaacgcgctggtgcacgaggtgttcgacccggagcaggtcttccgcatcgaccactacctgggcaaggagacggtccagaacatcctggcgctgcgcttcgccaaccagatgtacgagccgatctggaaccggtcctacgtggaccacgtgcagatcacgatggccgaggacatcggcatcggcggccgggccggctactacgacggcatcggcgccgcccgcgacgtcatccagaaccacctgctccagctgatggcgctgaccgccatggaggagccggccgccttcgacgcgcggtcgctgctcaccgagaagctgaaggtgctgcgggcggtgcggctgcccgacgacctgggcgagcacaccgtgcgcgggcagtacgcgggcggctggcagggcggcgcgcaggtgcccggctacctggaggaggagggcatcgacccggcctccaccaccgacacctacgcggcgatcaagctcggcatcgacaaccgccgctgggccggggtgcccttctacctgcgcaccggcaagcgcctgggccgccgggtcaccgagatcgcggtcgtcttccagcgggccccgcactcccccttcgactccacggcgacggaggagctgggcgagaacgccatcgtcatccgcgtccagcccgacgagggcatgacggtgcgcttcggctccaaggtgccgggcacgtcgatggagatccgggacgtgtcgatggacttcgcgtacggcgagtccttcaccgagtccagcccggaggcgtacgaacggctgatcctggacgtccttctgggtgacgccaacctgttcccgcgccaccaggaggtggaagagtcctggcggatcctcgacccgatcgaggagtactgggcctcgcacgacaagcccgcgcagtacgcgtcgggcggctggggaccgcgggaagcggacgagatgctcgcacgagacggacggagctggcgcaggccatga

SEQ ID NO: 16946 - protein, 592 aa, Streptomyces coelicolor A3(2)
MSEELPAGAPQETKATKEAKETRTAQEAAGPLHAEEAEEARAAEAAKASGRAKAPRGAKKSATNRAAKEAKGKGAAGEGVEPVAPLDWSNPLRDPQDRRLPRIAGPSGLVIFGVTGDLSRKKLMPAVYDLANRGLLPPGFSLVGFARRDWEDQDFAEVVHDAVREHARTPFREEVWQQLSEGMRFIPGDFDDDNAFEQLRKAVEELDASRGTSGNYAFYLSVPPKFFPKVVQQLKKHGLTDAPAGSWRRAVIEKPFGHDLDSARDLNALVHEVFDPEQVFRIDHYLGKETVQNILALRFANQMYEPIWNRSYVDHVQITMAEDIGIGGRAGYYDGIGAARDVIQNHLLQLMALTAMEEPAAFDARSLLTEKLKVLRAVRLPDDLGEHTVRGQYAGGWQGGAQVPGYLEEEGIDPASTTDTYAAIKLGIDNRRWAGVPFYLRTGKRLGRRVTEIAVVFQRAPHSPFDSTATEELGENAIVIRVQPDEGMTVRFGSKVPGTSMEIRDVSMDFAYGESFTESSPEAYERLILDVLLGDANLFPRHQEVEESWRILDPIEEYWASHDKPAQYASGGWGPREADEMLARDGRSWRRP

SEQ ID NO: 16947 - DNA, 1839 bp, Xanthomonas axonopodis pv. citri str. 306
  CDS (1)..(1839): transl_table=11
atgagtgagcaagcaaccacaccgccgtgcatcatcgtggtgttcggcgcacgcggcgatctgaccaagcgcctggtcatgccggcgctgtacaacctgcgccgttccggtgcgctgggcgatgatttcgccattgtcggcatggaccatggcgacatcagcgagcgcgcctggcggaccaacatggggcagtcgatgacgcagctgctcagcagccgcgatgccgaattccagaccgacgaattcgacaccgccacctgggactggctgcgcgaacgcatgcattacctgcgcggcgacttcaccgatcagggagcctatcgatcgctgggcggcgtgctggacaagctgcacaagcgctacggcacgcagggcaatgtgctgttctatctggccaccgccgcgcgcttcttcgagccggtattgctcaacctgggcgaggctggcctggtcaagcagcgcgaaggcgaaggctggcgccgggtcatcgtggaaaaacccttcggctacgatctgcccagcgcccagcacctcaatgccacggtcgccaaggtgctgcacgaggatcaggtgttccgcatcgatcatttcctgggcaaggaaaccgtgcagaacattctcgcgttccgcttcgccaatggcttgttcgaaccggtgtggaaccgcgaccgcatcgaccatgtgcagatcaccgcggccgaaaccatcggagtggaagggcgcggacggttctacgaccccaccggctgcctgcgcgacatggtgccgaaccatctgttccagctgctggcgatgattgcgatggagccgccagcggccttcaccaccgaggcgatgcatcgccgtcgcgccgaagtgatcgaagcggtgcgcccgatcaaacccgaagacgtggtgcgcgggcaatacgcctccggtgcggtcaatcgcaatgcggtgccgggttatcgcgaagaagacaccgtgcccgacgattcggacaccgaaacctatgtggcgatgaagctacaggtggacacctggcgctgggccggcgtgccgttctacctgcgcaccggtaagcgcctgcgcgaacgcacgaccgagatcgccattcgcttcaagccggcaccgctggcgcccttccgcagtaccgaggtgggcggctacggccccgactggctggtgctgcatatccagccggacgagggcatctcgctgcagttcgacgtcaagcgtccgggcgcgcaggtggcactggcaccggtgcgcatggacttccgttaccgcgactggttccccaaggaatacacggtgggctacgagcgcctgctgcaggactgcatgaacggcgaagccggcttgttccaggatgcggccatggtggaaggcgcatggcgcatcgtgcaaccgatcctggatgcatggaaacaacccccaagcgacttccccaattacgccgccggcagcgccggcccttcggctgccgatgcactactggcaatgaatggcggacacgcctggcgcgcactcaccccagggcgcaagccgccaccgcgccggccgccggaagcgcgtgctggcgctgccgcgccgattaagaaaaccaccggcaaatctgccaagaaggccgccaaggcgccggccgagaaggtcaccaaggcgccagccagacgcgcatctgcggcttcagcaagaccatcgcaggatgcggctacgtcgcctagcagcgcggccaggaaggccgtgagcaaacgcgtaaccggcaaggtcgcaaaggccgccggcaaaaccgcggcaggcaagggcgcagcgaagaagtcggccagcaagaccgtggcgcgcacgccacgccgctga

SEQ ID NO: 16948 - protein, 612 aa, Xanthomonas axonopodis pv. citri str. 306
MSEQATTPPCIIVVFGARGDLTKRLVMPALYNLRRSGALGDDFAIVGMDHGDISERAWRTNMGQSMTQLLSSRDAEFQTDEFDTATWDWLRERMHYLRGDFTDQGAYRSLGGVLDKLHKRYGTQGNVLFYLATAARFFEPVLLNLGEAGLVKQREGEGWRRVIVEKPFGYDLPSAQHLNATVAKVLHEDQVFRIDHFLGKETVQNILAFRFANGLFEPVWNRDRIDHVQITAAETIGVEGRGRFYDPTGCLRDMVPNHLFQLLAMIAMEPPAAFTTEAMHRRRAEVIEAVRPIKPEDVVRGQYASGAVNRNAVPGYREEDTVPDDSDTETYVAMKLQVDTWRWAGVPFYLRTGKRLRERTTEIAIRFKPAPLAPFRSTEVGGYGPDWLVLHIQPDEGISLQFDVKRPGAQVALAPVRMDFRYRDWFPKEYTVGYERLLQDCMNGEAGLFQDAAMVEGAWRIVQPILDAWKQPPSDFPNYAAGSAGPSAADALLAMNGGHAWRALTPGRKPPPRRPPEARAGAAAPIKKTTGKSAKKAAKAPAEKVTKAPARRASAASARPSQDAATSPSSAARKAVSKRVTGKVAKAAGKTAAGKGAAKKSASKTVARTPRR

SEQ ID NO: 16949 - DNA, 1719 bp, Drosophila melanogaster
  CDS (1)..(1719)
atgcaatatctatcactaatcttttttaaattacaactatttattcttggccaaaatttgacgttaccttgctttcttttattctctcaaaattatacttcaattaaattacccgaaatgatttccatggacccccacaatgaggaggcgtattccatcgtggtcttcggagcctcaggcggattggccaaaaagaaggtgtttccggcgctttgggctctcttccgggagaatcggctgccccagggcaccaaaatatttactttcacccggtccccgctgcagacgaagacgtaccggttgcagattcttccctatatggagctggacaagcatcgggaccccaagaagtacaacctcttttggacgaccgtgcactgtgtgcagggcgagtacgacaagccggagaactacgtggcactcacggaggcgatggtacaccaggagacaaagcacaatcaggtgcgcgcgaatcgaatcttctacctggcgctgccaccgatcgttttcgatcaggtgaccctcaatgtcagtcgaaaatgcagctcgaccacgggatggaaccgcataatagtggagaagcccttcgcgcgggacgacatctcctacaaggcctttcaaacctcgctgtgcaactgcttccgggagtcgcagatttacctgatggaccacctcctcagccggcaggtgatgcagaacttctttgcgctgcgctactcaaaccacttgtgggccgagaccctgaaccaccgccacgtggcggcggtgatgatatccataaagtgtgagctgccggtgtcggtgaatcgggcagactactttaatcagtttggcattattcgcgacctgatgaccaaccacatgatccagatgctggccatgctggctatggatcagccgtacgccaacactgctgacgacctgcgtgccgaacggctgaaggttcttcgccaggtgctaactcccaacataggcgacgtcgtcttggctcaataccgcaacaaccggcgggagactgaccccgcgaagtgcggctacacggagcacacctacatcccgaaggactcctttacgcccacattcgctctggtggtgctgcacatcaacaaccgccgttggaccggggtacccttcattctcagagcgggaaaagccttgaacgacaccaagtcggaggtgcgtatccagtacaagccggtggactgcgacaccttccacagcgacagtactgacattcgtaacgagctagtcctgagatccttccccacggaagaggtctttatgcgcatgcgcctcaagcggcagggcgaggatatctgccttcgggagagcgagatcaacctgcgagtggatgatcggggaccgaagggactccaaggactgcccggctacctgctcaacgtgtttcaaggcgaccagacgctcttcatgcgctccgatgagcagtgcgagatttggcgcatattctcccccgttctcgccaccatcgattcggatcgtccccgcccgttgcactatgactttggatcacggggtcctttgctggcctatcgcaaggccgagcgcgctggcttcgtattcttcgccacggacgagtggcatcagagcgaagagacgttagaatacacggtcaagaatagcaagcagctaatcggaccccataccgccctcaagccagtaagagatcctcggtccaagaggtcgaattccaatccttag

SEQ ID NO: 16950 - protein, 572 aa, Drosophila melanogaster
MQYLSLIFFKLQLFILGQNLTLPCFLLFSQNYTSIKLPEMISMDPHNEEAYSIVVFGASGGLAKKKVFPALWALFRENRLPQGTKIFTFTRSPLQTKTYRLQILPYMELDKHRDPKKYNLFWTTVHCVQGEYDKPENYVALTEAMVHQETKHNQVRANRIFYLALPPIVFDQVTLNVSRKCSSTTGWNRIIVEKPFARDDISYKAFQTSLCNCFRESQIYLMDHLLSRQVMQNFFALRYSNHLWAETLNHRHVAAVMISIKCELPVSVNRADYFNQFGIIRDLMTNHMIQMLAMLAMDQPYANTADDLRAERLKVLRQVLTPNIGDVVLAQYRNNRRETDPAKCGYTEHTYIPKDSFTPTFALVVLHINNRRWTGVPFILRAGKALNDTKSEVRIQYKPVDCDTFHSDSTDIRNELVLRSFPTEEVFMRMRLKRQGEDICLRESEINLRVDDRGPKGLQGLPGYLLNVFQGDQTLFMRSDEQCEIWRIFSPVLATIDSDRPRPLHYDFGSRGPLLAYRKAERAGFVFFATDEWHQSEETLEYTVKNSKQLIGPHTALKPVRDPRSKRSNSNP

SEQ ID NO: 16951 - DNA, 1440 bp, Chlorobium tepidum TLS
  CDS (1)..(1440): transl_table=11
atgagcggcactctcgacaacttcaccatcgtcatcttcggcgcgagcagcgacctggcttcgcgcaagctttttccgtcgattttccagctcgcgcggtgggggcacatgcctgagagcttccggctgattggcgtcgggcggcaggagcaaagccacgaggagttccgcgcgttcgtccgcagtcgcctgctggagcactcgcccgaagccgccggtgacgccgcgcggctcgacgccttctgcctccgcctcttttatgcccgcgtcgatctggacgatccggcgagctacgaagtgctgcgcgacgagatcatgcgcgaggaaaaagtgggagggagcacttgccgcaacctgatgttctatctgtcgataccgccgagccttgcgcctgccgtggtgcgcaatctcggcaaggccgggctgggtggacgtgaacagtcgtgcaccgggtggcgcaagctcatcgccgaaaagccctacggccacgatctcgaaagcgcccgcgagctgaaccgcgttatcaacgaggtgttcgaggagaaccaggtctatcgcatcgaccactacctcggcaaggagccggtgcagaacatcatggtgttccgcttctcgaacggtattttcgagccgctctggaaccggcagtatatcgcgcaggtgcagatcaccatcgccgaggatttcggcatccgggatcgcggcgcgtactacgaggagtcgggacttttgcgtgacatcatccagaaccacggcttgcagttgctcacggccatcgcgatggagccgccggtcgatctcagcgccgattcgatccgcgacgagaaagcgaaagttctgcgttcggtgcggcacttcactcctgattcggttcgggagtcggtggtgatcggccaatacgaggggtaccgcaacgagaaaaatgtcgcgccggactcgaaagtcgagaccttcgctgccgtgaagtttcacgtggataactggcgttggtcgggtgtgccgttctacatgaaagcgggcaagaatctcgccaagcgcgtgaccgaaatcgtcatcaccttccgctgcccgccgcagaattattacggcccatccggcggggcggcgtgctgtacgccgaaccaggtggtactcggcatccagcccgacgaaacggttgccatccgctttggcgccaagcgccccggcgagcagatgattaccgatccggtgttcatgaagttcgactaccgcgatacttttcagggcgaaggtcttacgccgtaccaccgcctcctgctcgatgccatcgagggcaaccagatgaacttcatccgcaaagacagcgtggagtactcgtgggaaattatcgacagcctgaaaaattcaatcgacggccaggttccggagcaatatccagttcatagctgggggccggaatcgtcgaggatttacgggtga

SEQ ID NO: 16952 - protein, 479 aa, Chlorobium tepidum TLS
MSGTLDNFTIVIFGASSDLASRKLFPSIFQLARWGHMPESFRLIGVGRQEQSHEEFRAFVRSRLLEHSPEAAGDAARLDAFCLRLFYARVDLDDPASYEVLRDEIMREEKVGGSTCRNLMFYLSIPPSLAPAVVRNLGKAGLGGREQSCTGWRKLIAEKPYGHDLESARELNRVINEVFEENQVYRIDHYLGKEPVQNIMVFRFSNGIFEPLWNRQYIAQVQITIAEDFGIRDRGAYYEESGLLRDIIQNHGLQLLTAIAMEPPVDLSADSIRDEKAKVLRSVRHFTPDSVRESVVIGQYEGYRNEKNVAPDSKVETFAAVKFHVDNWRWSGVPFYMKAGKNLAKRVTEIVITFRCPPQNYYGPSGGAACCTPNQVVLGIQPDETVAIRFGAKRPGEQMITDPVFMKFDYRDTFQGEGLTPYHRLLLDAIEGNQMNFIRKDSVEYSWEIIDSLKNSIDGQVPEQYPVHSWGPESSRIYG

SEQ ID NO: 16953 - DNA, 1530 bp, Thermosynechococcus elongatus BP-1
  CDS (1)..(1530): transl_table=11
atggtaaccctatttgaaaatcccctgcgggttggactacgccaagagcgaaccccagagccgctgattttagtcatttttggtgccagtggcgaccttactcagcgcaagctgattccctcgatttatcaactgagactcgaacgccgtctgccccccgaactgaccattgttggcgtggcgcggcgcaactggagtcatgactattttcgcaagcacctccgtcaaggggtcgaggagtttggtggcggcattcaggcggaacccctgtggcaggaatttgcccaaggtttgttttattgctctggcaatatcgatgatcccgccgcctacacccagctgaaaacactgctagctgagctagatgaaaaacgccaaactcgcagcaatcgcgtcttttaccttgcggtctcaccgagctttttcgttgaggccattcagcaactgggggcagcggggctattgagtgatccccaaaaacatcgtcttgtgattgaaaagccctttggccgtgatctcacctctgcccaagccctcaatgaggtggtgcagtcggtgtgcaaggaggagcaagtttaccgcattgaccactacctcggtaaagagacggtgcaaaacctgatggtgtttcgctttgccaatgccatttttgaacccctctggaaccgccagtacgtggatcatgtgcagattactgttgctgaaaccgtcggggtggaagatcgcgcgggctactatgaaactgcgggtgccctgcgggacatggtgcaaaaccacattctccagttgctggctctgaccgcgatggaaccccccaatgccctcgatgccgatagtctgcgtagcgaaaaggtgaaagtcctccaagctacccgtttagcggatcttgataatctcgatgcctgtgctgtccgcggccaataccgagccggctggatgaagggcaaacctgttgtgggctatcgtcaggagccgggggtgagtcctacctccaccactcccacctatgcggccctaaaactagggattgataactggcggtggcagggggtgcccttctatgtgcgcacgggtaaacgcttggcaaaaaaggtcacagaaatctcaattcagtttcgtggggtgcctttactgattttccagtcggccgcccgccaaaccaatcccaatatcctgacgatgcgcattcaacccaatgaagggattgctctgcgctttgaggcaaaaatgccgggtgcagatctgcgcacacgcacggtggaaatggactttagctacggctcctcctttggaatggccacagcggatgcctatgcgcggttattactggactgcatgttgggggaccaaaccctgtttacgcgcgcagatgaggtagaggcggcttggcgggtggtgatgccggttttaacggcttgggacgcccccacagatccagaggccatacccacctatgacgcggggacttgggggcccgatgcggcagaagtgatgattaatgccgatggccggcgctggcggcgactttga

SEQ ID NO: 16954 - protein, 509 aa, Thermosynechococcus elongatus BP-1
MVTLFENPLRVGLRQERTPEPLILVIFGASGDLTQRKLIPSIYQLRLERRLPPELTIVGVARRNWSHDYFRKHLRQGVEEFGGGIQAEPLWQEFAQGLFYCSGNIDDPAAYTQLKTLLAELDEKRQTRSNRVFYLAVSPSFFVEAIQQLGAAGLLSDPQKHRLVIEKPFGRDLTSAQALNEVVQSVCKEEQVYRIDHYLGKETVQNLMVFRFANAIFEPLWNRQYVDHVQITVAETVGVEDRAGYYETAGALRDMVQNHILQLLALTAMEPPNALDADSLRSEKVKVLQATRLADLDNLDACAVRGQYRAGWMKGKPVVGYRQEPGVSPTSTTPTYAALKLGIDNWRWQGVPFYVRTGKRLAKKVTEISIQFRGVPLLIFQSAARQTNPNILTMRIQPNEGIALRFEAKMPGADLRTRTVEMDFSYGSSFGMATADAYARLLLDCMLGDQTLFTRADEVEAAWRVVMPVLTAWDAPTDPEAIPTYDAGTWGPDAAEVMINADGRRWRRL

SEQ ID NO: 16955 - DNA, 1476 bp, Oceanobacillus iheyensis HTE831
  CDS (1)..(1476): transl_table=11
atggaacaaactatacagccaagagccgttattgtaatcttcggagcaactggagatttagcaaagcgtaaattattcccttccatttatcgtttgtaccgaagcggaaaattagatgagcattttgcagtaattggtttagcacgtcgtccttggacagatgaagtacttagagaaaatgtggaaaattccatacaagatgctctttctccggatgaggatttatccgaatttatttcccatttctattataaatcttttgatgtgacggaaaaagaatcgtatcaaggacttaatgaaatcattcaaaaccttgaaggtcaataccaaacagaaggaaatagactattttatctggcaatggctccagatttctttggtgctattgcaaatcaactcaatgattatggattaaagaacacgagtggttggactagacttgtgatcgaaaaaccatttggacatgatttaccttctgctaaaaagttaaaccatgaattacaagccgcatttcgtgaagatcaaatttatcgtatcgaccactatctaggtaaagagatggtgcaaaatattgaagtaatccgttttgccaacggtatttttgaacatttgtggaataatcgctttatctcaaacatccaaattacgagtagcgaaacgcttggagtagaggaacgagcacgttattatgacacttctggtgctacgcgggatatggttcaaaatcatatgttacaaatggttgctctactggcgatggaacctccgattagtttaacaacagaggaagtacgctctgaaaaaattaaagtattgcgtgccttaagaatgatggagacaaatgaaatagatgattatttcattcgcggtcaatacggtgctggtacagttaaaggtaattctgttattggttatcaagacgaagatgaacaactagaaaattctcgtactgaaacatttgtagctggaaaacttctcattgacaattaccgatgggcaggcgttcctttctatattcgtacaggaaagcgcatgacagaaaaatccacaaaaattgtaattgagttcaaagacattccaatgaatctttattaccaaaaagatgatcaaaggaatccaaatttattggttattaatattcaaccaaatgaaggaattacgctttgcttgaatgcacgtaaatcaggtgaaggtgcactagcagagccaattcaattagcataccaccaaaatgctgtatctggaatcaatacaccagaagcatatgaaaaactaatttacgatagtatgcttggtgatgcgactaactttacccattgggatgaagttgctttatcttggcaatttgtcgataagattttggaaaactggtcagaaaatcaaccagcattccctaattatcgttctggatcgatgggaccagaagcatctgatgaactgttgaaaaaagatggtttccattggtggccaatctaa

SEQ ID NO: 16956 - protein, 491 aa, Oceanobacillus iheyensis HTE831
MEQTIQPRAVIVIFGATGDLAKRKLFPSIYRLYRSGKLDEHFAVIGLARRPWTDEVLRENVENSIQDALSPDEDLSEFISHFYYKSFDVTEKESYQGLNEIIQNLEGQYQTEGNRLFYLAMAPDFFGAIANQLNDYGLKNTSGWTRLVIEKPFGHDLPSAKKLNHELQAAFREDQIYRIDHYLGKEMVQNIEVIRFANGIFEHLWNNRFISNIQITSSETLGVEERARYYDTSGATRDMVQNHMLQMVALLAMEPPISLTTEEVRSEKIKVLRALRMMETNEIDDYFIRGQYGAGTVKGNSVIGYQDEDEQLENSRTETFVAGKLLIDNYRWAGVPFYIRTGKRMTEKSTKIVIEFKDIPMNLYYQKDDQRNPNLLVINIQPNEGITLCLNARKSGEGALAEPIQLAYHQNAVSGINTPEAYEKLIYDSMLGDATNFTHWDEVALSWQFVDKILENWSENQPAFPNYRSGSMGPEASDELLKKDGFHWWPI

SEQ ID NO: 16957 - DNA, 1668 bp, Bifidobacterium longum NCC2705
  CDS (1)..(1668): transl_table=11
ttgcgtacacgtttgcgtacgcgattggcccaacgcacggcacagcacacgcaatgtggcccaaatcgcagcccaaatcgcatatcgcctctagcgatagatagccgccggcgactacccttgtacattatgagtgaatcccccaattggagcaatcccctgcgcgactcgcgcgacctcagactgccccgtatcgccggcccatgcagcctcgtcattttcggtgtcacgggcgatctggcacaaaagaaactgctgccagccgtctacgacctggcgaaccgtggcctactgccgccgagcttcggtctgaccggcttcgcccgccgcgactggacacaggaacggttcatcgaattcgtcaaggccgccgtccaggcgcattgccgtacgccgttcaaggagtcgacttggcgcaatctggccgccggcatccgcttcgtgcagggtacgttcgacgacccggaggccttcgagcgcctgagcgccaccgtgcaggagcttgaccgcgaccgcggcacgcagggtaaccatgccttctacatgtcggtgccgccgcgcgcattcccacaggtcgccaagcagctggccgcctccggcctgtcgcgctcgtccgagggcgcatggcgccgcgtgatcatcgagaagccgttcggccatgatctggccagcgccaaggaactcgacagcgtggtatccgaagtgttcgacccgagctccgtgttccgcatcgaccactacctcggcaaggaaaccgtgcagaacctgctggccctgcgtttcgccaacgccatgtacgagccgatctggaacgccaactatgtggaccacgtgcagatcacgatggccgaggacatcggcatcggcggccgcgccggctattacgacggcatcggcgccgcacgcgacgtcatccagaaccacctgcttcagctcatggctctgaccgccatggaggagccggtgagcttcaccgccaaggacctgaccgccgaaaagaccaaggtgctttccgccgtgcgcctgcccaaggacctcgccgccaacaccgcgcgcggccagtacgccaagggctggcagggctcgcacgaagtggtcggctacttggaggaaaaaggcatcgaccccaagagcaccactgaaacgtacgccgccatccgcctcgatatcgacacccgccgctgggctggcgtgccgttctacctgcgttgcggcaagcgcctcggcaagcgtgtaaccgaaatcgccgtggtgttcaagcgcgccccgcatctgccgttcgagcagaccgccgtgcgcgaactcggcaagaacgccatcgtgattcgcgtgcagcccgacgagggcgtcaccatgcgcttcggagccaaggtgccgggcggctccaccatggaggtccgtgacgtgaacatggacttcagctacggccgctccttcaccgagaactcgccggaagcctatgagcgactgattctggacgtgctgctcggtgatccgccgttgttcccgaccaccgaagaggtgaacctcagctgggagatcctcgatccgattgaacaattctggtccacgcttggccagccgcaggcctaccgcgccggtacgtggggtccggcacaggccgacgaaatgctggcgcgcgacggccgccactggaggatgccatga

SEQ ID NO: 16958 - protein, 555 aa, Bifidobacterium longum NCC2705
MRTRLRTRLAQRTAQHTQCGPNRSPNRISPLAIDSRRRLPLYIMSESPNWSNPLRDSRDLRLPRIAGPCSLVIFGVTGDLAQKKLLPAVYDLANRGLLPPSFGLTGFARRDWTQERFIEFVKAAVQAHCRTPFKESTWRNLAAGIRFVQGTFDDPEAFERLSATVQELDRDRGTQGNHAFYMSVPPRAFPQVAKQLAASGLSRSSEGAWRRVIIEKPFGHDLASAKELDSVVSEVFDPSSVFRIDHYLGKETVQNLLALRFANAMYEPIWNANYVDHVQITMAEDIGIGGRAGYYDGIGAARDVIQNHLLQLMALTAMEEPVSFTAKDLTAEKTKVLSAVRLPKDLAANTARGQYAKGWQGSHEVVGYLEEKGIDPKSTTETYAAIRLDIDTRRWAGVPFYLRCGKRLGKRVTEIAVVFKRAPHLPFEQTAVRELGKNAIVIRVQPDEGVTMRFGAKVPGGSTMEVRDVNMDFSYGRSFTENSPEAYERLILDVLLGDPPLFPTTEEVNLSWEILDPIEQFWSTLGQPQAYRAGTWGPAQADEMLARDGRHWRMP

SEQ ID NO: 16959 - DNA, 1509 bp, Drosophila melanogaster
  CDS (1)..(1509)
atggtctgcgagggaacccactttgacggcaagattccgcacacgttcgtcatctttggggcgtcgggcgatctggccaagaagaagatctaccccacgctctggtggctctaccgcgatgacctgctgcccaagccgaccaagttctgcggctatgcccgttccatgctgaccgtcgatagcatcaaggagcagtgtctgccgtacatgaaggtccagccgcacgagcagaagaagtacgaggagttctgggccctcaatgagtacgtgtccggcagatatgacggacgcactggcttcgagctgcttaaccagcagctggagattatggagaacaagaacaaggccaaccgcatcttctatctggccctgccgcccagcgtcttcgaggaggtgactgtcaacatcaagcagatctgcatgtcggtctgcggttggaaccgcgtgattatcgagaagcctttcggccgggatgacgcctcctcgcaggcgctgagcgaccatctggccggtctgttccaggaggatcagctgtaccgcatcgatcactacctgggcaaggagatggtgcagaacctgatgaccatacgcttcggcaacaagatcctcagctcgacgtggaaccgcgagaacatcgcctccgtgctgatcacgttcaaggagcccttcggcacgcagggtcgtggcggctacttcgacgagttcggcatcatacgcgacgtgatgcagaaccatctgctgcagatcctctcgctggtggccatggagaagccggtgagctgccacccggacgacattcgtgacgagaaggtcaaggtgctgaagagcatcgaggccctgacgctggatgacatggtgctgggccagtacctgggcaatccgcagggtacaaacgatgatgcgcgcacgggctacgtggaggaccccaccgttagcaacgattcgaacacgcccacctacgccctcggcgtgctcaagatcaacaacgagcgctggcagggagtgcccttcatcctgcgctgcggcaaggcgctgaacgagcgcaaggcggaggtgcgtatccagtaccaggacgtgcccggcgacatcttcgagggcaatacgaagcgcaacgagctggtcatccgcgtccagccgggcgaggccctgtactttaagatgatgaccaagagccccggcatcacgttcgacatcgaggagacggagctggacctcacctacgagcaccgctacaaggactcctacctgccggacgcgtacgagcgtctcatcctcgacgtcttctgcggctcccagatgcacttcgtccgctcggacgagctgcgcgaggcgtggcgcatatttacgcccattctgcaccagatcgagaaggagcacattcggccaatcacctaccagtacggatcgcgcggtcccaaggaggcggaccgcaagtgcgaggagaacaatttcaagtactccggctcctacaagtggcacggcggcaaggcggccacgtccaatcactga

SEQ ID NO: 16960 - protein, 502 aa, Drosophila melanogaster
MVCEGTHFDGKIPHTFVIFGASGDLAKKKIYPTLWWLYRDDLLPKPTKFCGYARSMLTVDSIKEQCLPYMKVQPHEQKKYEEFWALNEYVSGRYDGRTGFELLNQQLEIMENKNKANRIFYLALPPSVFEEVTVNIKQICMSVCGWNRVIIEKPFGRDDASSQALSDHLAGLFQEDQLYRIDHYLGKEMVQNLMTIRFGNKILSSTWNRENIASVLITFKEPFGTQGRGGYFDEFGIIRDVMQNHLLQILSLVAMEKPVSCHPDDIRDEKVKVLKSIEALTLDDMVLGQYLGNPQGTNDDARTGYVEDPTVSNDSNTPTYALGVLKINNERWQGVPFILRCGKALNERKAEVRIQYQDVPGDIFEGNTKRNELVIRVQPGEALYFKMMTKSPGITFDIEETELDLTYEHRYKDSYLPDAYERLILDVFCGSQMHFVRSDELREAWRIFTPILHQIEKEHIRPITYQYGSRGPKEADRKCEENNFKYSGSYKWHGGKAATSNH

SEQ ID NO: 16961 - DNA, 1470 bp, Pseudomonas putida KT2440
  CDS (1)..(1470): transl_table=11
atggccgcaatcagtgtcgaaccttgcacctttgccctgtttggcgccctcggcgacctggcattgcgcaagctgtttcctgcgctctaccagctcgaccgggccaacctgttgcacccggacacccgcctgctggccctcgcccgtgaggtcggcagtgcgcaggagcacctggacagcatcgaagcccacctgcgccggcacgtgcccgaggcagatatcgagcctgctgcgctggggcgcttccttgcccgcctgaattaccagcacctggacttccttcagcccgagggctatcaggccctggccgagcagctgccgggcgagctgccgctgatcgcctacttcgccacggcggcggcggtgtatggggccatctgcgaaaacctcgacaaggtcgggctggctgcgcgcacccgggtagtgctcgagaaacctattggccacgacctggagtcgtcgcgccgggtcaacgacgccgtggcgcggttcttccctgaaagccgggtttaccgcattgaccattacctgggcaaagagacggtgcagaacctgattgccctgcgcttcgccaatagcctgttcgaaacccagtggaaccagaattccatctcccatgtggagattaccgtcgcggaaaaggtcggtatcgagggccgttggggttatttcgacaaggccggccaactgcgcgacatgatccagaatcacctgctgcagttgctgtgcctgatcgccatggacccgcccagcgaactgtccgccgatgccatccgcgacgagaaggtgaaagtgctcaaagccctggcaccgatcactggcgacggcctgagcaccagcgtggtgcgcggccagtacattgccggctacagcgaaggcaagccggtgccgggttacctggaagaagacaacgccaacgcccagagcgacaccgaaaccttcgtcgccctgcgcgccgacatccgtaactggcgctggtcgggcgtgccgttctacctgcgaaccggcaagcgcatgccgcaaaaactgtcgcagatcgtcattcacttcaaggaaacgccgcactacatcttcgccccggaacagcgtttgcagatcggtaacaagctgatcatccgcctgcaaccggacgaaggcatttctttacgggtgatgaccaaggagcagggcctggacaagggcatgcaactgcgcagtggcccattgcagctgaatttttccgatgcctggcgcagtgcacgaattccggatgcctacgagcggctgttgctcgaagtgatgcgcggcaaccagaacctgttcgtgcgcaaggacgaaatcgagtatgcctggaagtggtgcgaccagttgatcgccggctggcgtaatgcgggcgatgcgcccaagccatacgcggcgggctcctgggggccgatgagctcgattgcactgatcacacgcgatgggagggcgtggtatggggatatctga

SEQ ID NO: 16962 - protein, 489 aa, Pseudomonas putida KT2440
MAAISVEPCTFALFGALGDLALRKLFPALYQLDRANLLHPDTRLLALAREVGSAQEHLDSIEAHLRRHVPEADIEPAALGRFLARLNYQHLDFLQPEGYQALAEQLPGELPLIAYFATAAAVYGAICENLDKVGLAARTRVVLEKPIGHDLESSRRVNDAVARFFPESRVYRIDHYLGKETVQNLIALRFANSLFETQWNQNSISHVEITVAEKVGIEGRWGYFDKAGQLRDMIQNHLLQLLCLIAMDPPSELSADAIRDEKVKVLKALAPITGDGLSTSVVRGQYIAGYSEGKPVPGYLEEDNANAQSDTETFVALRADIRNWRWSGVPFYLRTGKRMPQKLSQIVIHFKETPHYIFAPEQRLQIGNKLIIRLQPDEGISLRVMTKEQGLDKGMQLRSGPLQLNFSDAWRSARIPDAYERLLLEVMRGNQNLFVRKDEIEYAWKWCDQLIAGWRNAGDAPKPYAAGSWGPMSSIALITRDGRAWYGDI

SEQ ID NO: 16963 - DNA, 1506 bp, Pseudomonas putida KT2440
  CDS (1)..(1506): transl_table=11
atgactaaacagacccttgcggccgcccccccttgtaccctgttcctgttcggcgccaatggcgacctggtcaagcgcctgctgatgcccgcgctgtacaacctcagccgtgacggtttgctggaccgtaacctgcgcatcgtcggcgttgaccataacccggccagcgccgaggatttcgccgcgcgcctgcacgcgttcatggtcgagcgtgacaaaggcggcgagggcagcgccaagtgcctggacgagaagctatgggcccgcctggccaagcgcctcgattaccagacgggcgactttctcgatccggccacctaccaggccctggccaggcgcatcgacaagacccgccacggcaatgccattttctatctggccacgtcgccgcgcttcttccccgaggtggcgcagcgcctggggcaggccggcttgctggacgagtctgccggcggctttcgccgggtggtggttgaaaaaccgttcggcaccgacctggccagcgccgaggcgctcaacgcctgcctgctgaaggtgatgggcgagcggcagatctaccgcatcgaccattacctgggcaaagagacggttcagaatattctggtcagccgcttttccaacggcttgttcgaatcgttctggaacaatcactacatcgaccacgtgcagatcaccgcagcggaaaccgtcggtgtcgagacccgtggtgcgttctatgacagcaccggcgccctgcgcgacatggtgcccaaccacctgttccagttgctggcgatggtggccatggagccgccggccgcgttcggcgccgatgcggtgcgcggtgaaaaggccaaggtggtcggcgctattcgcccatggtcggcaaaaatggcccagaagaattccgtacgaggccagtacagagccggcaagcaggggcgcaagccgttgccaggctaccggcaggagcccaacgtcgcgccggatagccagaccgagacctacgtggcgctgaaggtgatgatcgacaactggcgctgggccggcgtgccgttctacctgcgcaccggcaagcgcatgagcgtgcgtgacaccgagattgccatctgcttcaagcccgcaccgtatgcgcagtttcgcgagtcggagctggaacggcccaaacccaactacctgaaaatccagatccagcccaatgaaggcatgtggttcgacctgcaagccaaacggcccgggccagagctggtgatggagaatgtcgagttgggttttgcctacaaggacttcttcaagatgaccccggccactggctacgagacgctgatctatgactgcctgaccggtgaccagaccctgttccagcgggctgacaacatcgaaaacggttggcgagcggtgcagccgtttctcgatgcctgggcccagggcggcgaagtgcatgagtactcggctggcgaagatgggcctgaggccggcaatgaattgctgacccgcgacaagcgggagtggcaccggttggggtga

SEQ ID NO: 16964 - protein, 501 aa, Pseudomonas putida KT2440
MTKQTLAAAPPCTLFLFGANGDLVKRLLMPALYNLSRDGLLDRNLRIVGVDHNPASAEDFAARLHAFMVERDKGGEGSAKCLDEKLWARLAKRLDYQTGDFLDPATYQALARRIDKTRHGNAIFYLATSPRFFPEVAQRLGQAGLLDESAGGFRRVVVEKPFGTDLASAEALNACLLKVMGERQIYRIDHYLGKETVQNILVSRFSNGLFESFWNNHYIDHVQITAAETVGVETRGAFYDSTGALRDMVPNHLFQLLAMVAMEPPAAFGADAVRGEKAKVVGAIRPWSAKMAQKNSVRGQYRAGKQGRKPLPGYRQEPNVAPDSQTETYVALKVMIDNWRWAGVPFYLRTGKRMSVRDTEIAICFKPAPYAQFRESELERPKPNYLKIQIQPNEGMWFDLQAKRPGPELVMENVELGFAYKDFFKMTPATGYETLIYDCLTGDQTLFQRADNIENGWRAVQPFLDAWAQGGEVHEYSAGEDGPEAGNELLTRDKREWHRLG

SEQ ID NO: 16965 - DNA, 1458 bp, Pseudomonas putida KT2440
  CDS (1)..(1458): transl_table=11
gtggagagtggtggtttgactattccttgcgacattctggtcttcggcggcaccggtgatctggccctgcacaaattgcttccggcgctctaccacctgtttcgcgaggcccgtctgaaccctgccgtgcgggtcatcgcactggccaggcgcaacctgccacgcatcgactatctgaagctcgccgaacgccattgtcgggcgcagattgcccgcagcgacttcgacgaagaggtgtggcagcggttttccgcacgggtcgactacttcccgatggatgcttcacagagcgccgacttcggccgcctggcacgctacctgggcgaacccggtggactgacacgcatcttctacctggccaccgctcccaacctgttcgtgccgattgccaaccacctgcgcattgccggactggccgacaccgaagcgcgcatcgtgctggaaaaaccgatcggccattcgctggaatcggccactgccatcaatgaagcgattggcacggtgttcgaagaaagacaggtgttccgcatcgaccactacctgggcaaggaaaccgtgcagaacctgatggccctgcgttttgccaatgccctgctggagccggtgtggcgcaacaaccaggtcgaccatgtccagatcagcgtttgcgagacactgggcgtagaaaaccgcggtgcctactacgatcgcgccggggctattcgcgacatgctgcagaaccacctgctgcagctgctgtgcctggtggccatggagccacccgcgcaattcgaggcagaggcggtacgcgacgaaaaggtgaaaatcctgcgcgccctcaagccgatcaccggccaggatgtgcaggacaagacggtacgcggccaatatggggccgggcgtatcggcggccaggaagtgccggcctactactttgaaaaggacgtcgacaacgacagcgataccgaaactttcgtggccatcgaggcgcatatcgacaactggcgctgggcgggcgtgcctttctatctgcgcaccggcaaacgcatggcgcggcgcgcttcgcagatcgtcatccagttcaagccagtgcctcacgaactgttcagcggcggccaggtcaaccagttgctgatacagctgcaaccggacgaacgcatcagcctgcgcatgatgaccaagagcccaggcaagggcatgcgcctggaacccgtggacctggaccttaatctggcccaggtgttcagccagactcgccgctgggaagcctacgagcgtctgctgctggatgtgctcgaaggtgattcgacactgttcatgcgccgcgatgaagtggaagcagcctgggcttgggtagatccaatcatcaagggctgtgaagagcacttccaggcgccccgcccctacccggctggcagtttcgggcccgaacaagccaacagcctgctcgccaggcatggcaggcactggcatggctga

SEQ ID NO: 16966 - protein, 485 aa, Pseudomonas putida KT2440
MESGGLTIPCDILVFGGTGDLALHKLLPALYHLFREARLNPAVRVIALARRNLPRIDYLKLAERHCRAQIARSDFDEEVWQRFSARVDYFPMDASQSADFGRLARYLGEPGGLTRIFYLATAPNLFVPIANHLRIAGLADTEARIVLEKPIGHSLESATAINEAIGTVFEERQVFRIDHYLGKETVQNLMALRFANALLEPVWRNNQVDHVQISVCETLGVENRGAYYDRAGAIRDMLQNHLLQLLCLVAMEPPAQFEAEAVRDEKVKILRALKPITGQDVQDKTVRGQYGAGRIGGQEVPAYYFEKDVDNDSDTETFVAIEAHIDNWRWAGVPFYLRTGKRMARRASQIVIQFKPVPHELFSGGQVNQLLIQLQPDERISLRMMTKSPGKGMRLEPVDLDLNLAQVFSQTRRWEAYERLLLDVLEGDSTLFMRRDEVEAAWAWVDPIIKGCEEHFQAPRPYPAGSFGPEQANSLLARHGRHWHG

SEQ ID NO: 16967 - DNA, 1485 bp, Staphylococcus epidermidis ATCC 12228
  CDS (1)..(1485): transl_table=11
ttgagtactaaacaaaaacacattccctgtttgattacaatattcggtgccacaggagatttgagtcatagaaagctatttccttctatattccatttatatcaacaagacaatttagatgaacatattgctattattggtataggacgtcgcgattataataacgaacaatttcgcgaccaagttaaaacgtcaattcaaacttatgttaaagatacagatagaattgatgagtttatgacgcatgttttttatcataaaactgacgtgagtgataaagaaagttatcagtcattacttcaatttagtgagcgactagattcagaatttgctttaggtgggaatcgtctgttttacttagcgatggcaccacaattttttggagtgatctcagattaccttaaatcttctggtcttactcaaactacaggatttaaacgcttagttatagagaaaccatttggcagtgatcttaaatctgctgaatcattaaataatcaaataagacgttcgtttaaagaagaagaaatttatcggatagatcactatcttggcaaagatatggtgcaaaatatagaagttttgcgattcgcaaacgcgatgtttgaacctttatggaataataaatacatttcaaatattcaagttacatcatcagaagtattaggtgtcgaagatcgtggtggctactatgaatctagtggtgcacttaaagacatggtacaaaatcacatgctacagatggttgctttacttgcaatggaagcaccgataagtttgaatagtgaagatatacgtgcagaaaaagtcaaagtacttaaatctcttagacaattaaaaccagaagaagttaaaaagaatttcgtgcgtggtcaatatgatcaaggcaatatagatggtaaacaggttaagtcatatcgagaagaagatcgcgtagcaaaggattcggttacaccgacatttgtatcgggtaaattaacaattgataactttagatgggctggagttcctttctacattagaacgggtaaacgtatgaaatcaaaaacgatacaagtcgtagtagaatttaaagaagtacctatgaatttatattatgaaactgacaatttactagattctaatttgctagtcattaatattcaaccaaatgaaggaatttcattgcatttaaatgctaaaaagaacattcaaggaattgatactgagccagtgcaattatcatacgcaatgagtgctcaagataaaatgaatacagttgatgcatatgaaaacttattgtttgattgtcttaaaggtgatgcgactaattttacacattgggaagaattaaaatctacttggaaatttgtagatgcaatccaagatcaatggacaatggttgaaccatgtttccctaactatgaagcgggtacaaatggacctcttgaaagtgatcttttattaagtcgtgatggaaatcattggtgggatgatatccactaa

SEQ ID NO: 16968 - protein, 494 aa, Staphylococcus epidermidis ATCC 12228
MSTKQKHIPCLITIFGATGDLSHRKLFPSIFHLYQQDNLDEHIAIIGIGRRDYNNEQFRDQVKTSIQTYVKDTDRIDEFMTHVFYHKTDVSDKESYQSLLQFSERLDSEFALGGNRLFYLAMAPQFFGVISDYLKSSGLTQTTGFKRLVIEKPFGSDLKSAESLNNQIRRSFKEEEIYRIDHYLGKDMVQNIEVLRFANAMFEPLWNNKYISNIQVTSSEVLGVEDRGGYYESSGALKDMVQNHMLQMVALLAMEAPISLNSEDIRAEKVKVLKSLRQLKPEEVKKNFVRGQYDQGNIDGKQVKSYREEDRVAKDSVTPTFVSGKLTIDNFRWAGVPFYIRTGKRMKSKTIQVVVEFKEVPMNLYYETDNLLDSNLLVINIQPNEGISLHLNAKKNIQGIDTEPVQLSYAMSAQDKMNTVDAYENLLFDCLKGDATNFTHWEELKSTWKFVDAIQDQWTMVEPCFPNYEAGTNGPLESDLLLSRDGNHWWDDIH

SEQ ID NO: 16969 - DNA, 1512 bp, Bradyrhizobium japonicum USDA 110
  CDS (1)..(1512): transl_table=11
gtgacaaaagacccgcaagccaagcgcaagccggaaaattgcgccttcgtcatctttggcgtgaccggagaccttactcatcgccttgtgatgccctcgctctacaatctcgcggccgagcacctgttaccggaaaagttctgtgtcgtcggcgtggcccgcaagggccaatcggatgacgagctgcgcagcagcctgttgaagggcctgcgccagttcgcgacgcgacccgtggacgacgatatcgcccagaagctgctgcaatgcctgaccttcgtcgaggccgacccgaaggactcgccgtccttcgaccgcttgcgcgagcatctggattcgctggaatgcgcgcaggacaccggcggcaaccggctgttctatctggcaacgccgcccgccgcgttcgcgccgaccgcgcgcgagctcggccgcaccggcatgatggaggagaacggcgcctggcgacgcctcgtgatcgaaaagccgttcggcaccgatctcgcctcggcacgcgcgctgaacgccgagctcctgaagatcatggacgagcaccagatctaccggatcgatcactatctcggcaaggagacggtgcagaacattttggtgctgcgctttgccaacggcatgttcgagccgatctggaatcgcaaccacatcgaccacatccagatcacggtggaagagaagctcggcgtcggccatcgcggcggcttctacgacgccaccggcgcgctgcgcgacatggtaccgaaccatctgttccagctgatgtcgctggtcgcgatggagccccccgcccgcttcgacgcgcattccgtgcgctccgagaaggccgacgtgctcacctcgatccagcagcccagccgggaagaggcgctgaagaattcagtgcgcgcgcaatatctcgccggccgcatcggcgacgaggagatcacggactatcgcaagaccgaggacgtcaagcccggcagcaccaccgagacctttgtcgcgctcaagctgatgatcgacaattggcgctgggccggcgtccccttctacttgcgcaccggcaaggcgctgggtcacaagcgcaccgaagtcgcgatcaagttcaagcaggcgccgctgtcgatgttttcgggcacggacgtcgaccgcctgtcgcagaacttccttaccatcggcatcgcgccgaccgagaccatcgagcttcagttcaacgccaagattccgggcccgagcatcaccatcgacggcgtcgagatgaagttccgctatggcgactatttccgcgtcgatccctcgaccggctacgagacgctgatctacgactgcatgatcggcgacaacatactgttccagcgcgccgacggcatcgaggccggatggcaggcggtgcagccgttcctggacgcctggaagagcgagggcaccaacggcatcgagacctatgaagccggcagcgacggccccgcctgcgcggacgagctgctccggcgcgacggacgaagctggcggaagttttcgtga

SEQ ID NO: 16970 - protein, 503 aa, Bradyrhizobium japonicum USDA 110
MTKDPQAKRKPENCAFVIFGVTGDLTHRLVMPSLYNLAAEHLLPEKFCVVGVARKGQSDDELRSSLLKGLRQFATRPVDDDIAQKLLQCLTFVEADPKDSPSFDRLREHLDSLECAQDTGGNRLFYLATPPAAFAPTARELGRTGMMEENGAWRRLVIEKPFGTDLASARALNAELLKIMDEHQIYRIDHYLGKETVQNILVLRFANGMFEPIWNRNHIDHIQITVEEKLGVGHRGGFYDATGALRDMVPNHLFQLMSLVAMEPPARFDAHSVRSEKADVLTSIQQPSREEALKNSVRAQYLAGRIGDEEITDYRKTEDVKPGSTTETFVALKLMIDNWRWAGVPFYLRTGKALGHKRTEVAIKFKQAPLSMFSGTDVDRLSQNFLTIGIAPTETIELQFNAKIPGPSITIDGVEMKFRYGDYFRVDPSTGYETLIYDCMIGDNILFQRADGIEAGWQAVQPFLDAWKSEGTNGIETYEAGSDGPACADELLRRDGRSWRKFS

SEQ ID NO: 16971 - DNA, 1440 bp, Clostridium tetani E88
  CDS (1)..(1440): transl_table=11
atgaaaaataaagccattaccatatttgggggaacaggagatttagcctatcgaaaattattcccttctctatataatttatatatgttagggagtattaatgatgaatattctattataggaattggtaggagagattatacaaaagaggattatttaacttatattcaagcaggagttaaaaagtttgccagaataaattatagtgatgataagtttgataagttttctaaaattataacctattataaaatggatattcaaaaggaagaagaatataagggtttaattaaatattataaagataaagatattattaaaaatcatatttactattatgcagttgcaccaagattttttattccaataactaaaggattaaaaaataataaatgttaccttaaagatgcaaaagttattattgaaaagccttttggagaagatttagaatcagctacttacctaaatgaacagctttcttttgtatttaaggacaagaatatttatcatattgatcattatttaggcaaagaaatgatacaaaatattataaatataagatttgccaacgcaatatttaaaggaatttggaacaaagattttattgagaatatacaaattaatgcttttgaaagcataggtgttaacaatagaggtggctattatgaccaaagtggtgcattaaaagatatggttcaaaatcatctatttcaattattgtccatagtagctatggaagaacccaaagaatttaatagtgattttattcatgaagctcaactcaaggtattaactgaaatgaagccaatagaggatagggatattgataattacttagttatgggtcaatatgaaggatatagggaagaaaaagatgttaatctaaaatcaaaaacagaaacttatgttgctatgaaaataataattgataatgaaagatggcaaggtgtacctttctatattcgtacaggtaaaaagctaaataagagagaaacggaaattataattaaatttaaatcaacaaataaaaatatagaaggaaatttattaattataaaaattcaaccagatgagggaatttatttaaaatttaatataaagaaacctggtactgtggatgagattcaaaaagtaagtatggatttttgtcaaagctgtattttagagaatagaattaatacgccagaagcctatgaaagattattaaaagcatgtatggattcagatagaagtttattttcaaaatgggagcaaattgtagtaagttggaaatatatcaacaaagttttagaaagttatagatcttattcaaataaactttataggtataagccggagacaattggaccaaaggaggcagaagagttagttaaaaaggataatcattattggataaatgatgaaagtaatagttgcttaaaacaaggagaggatagttaa

SEQ ID NO: 16972 - protein, 479 aa, Clostridium tetani E88
MKNKAITIFGGTGDLAYRKLFPSLYNLYMLGSINDEYSIIGIGRRDYTKEDYLTYIQAGVKKFARINYSDDKFDKFSKIITYYKMDIQKEEEYKGLIKYYKDKDIIKNHIYYYAVAPRFFIPITKGLKNNKCYLKDAKVIIEKPFGEDLESATYLNEQLSFVFKDKNIYHIDHYLGKEMIQNIINIRFANAIFKGIWNKDFIENIQINAFESIGVNNRGGYYDQSGALKDMVQNHLFQLLSIVAMEEPKEFNSDFIHEAQLKVLTEMKPIEDRDIDNYLVMGQYEGYREEKDVNLKSKTETYVAMKIIIDNERWQGVPFYIRTGKKLNKRETEIIIKFKSTNKNIEGNLLIIKIQPDEGIYLKFNIKKPGTVDEIQKVSMDFCQSCILENRINTPEAYERLLKACMDSDRSLFSKWEQIVVSWKYINKVLESYRSYSNKLYRYKPETIGPKEAEELVKKDNHYWINDESNSCLKQGEDS

SEQ ID NO: 16973 - DNA, 1485 bp, Lactobacillus plantarum WCFS1
  CDS (1)..(1485): transl_table=11
atgagtaacgaaaaaattgccttattcaccatctttggcggtactggtgacctcgcacagcgtaaactgtacccgtcactatttaagctctatcaaaagggctatctcaaggaccactttgccgttattgggacggctcggcgtccttggactgatgatcactatcatgaagttattagtgactccctagctgatctgaatgctgatcaggaaacggtgacgcaatttgcgagccatttttattatcaatcgcatgacgttactgatgctgaacattaccgaactttgaaaaaattatcagaaaagctggacgcccaatatggtttacaaggcaaccggatcttctacttagcaatggcaccaaacttcttcggtacgattgcccaacacttacgttccgaaaatattctgacagataacggttttaaccgcgtcattatcgaaaagccttttggtcatgattatgaaagtgccaaggaacttaacgaccaattaacggctacttttaacgaaaatcagatttatcgaattgaccactaccttggtaaagaaatgattcaaaatatcacggccattcgttttggcaataatatttgggaatcattatggaacaaccgttacatcgacaatgtccaaattacgttaagtgaaaaactgggtgtcgaagaacgggccgtttactatgataacagcggtgccttgcgggatatggtccaaaatcacattttgcaaattttgagtctgttaacaatggatcaaccagttgaattcactgaaaatgatatcgacgtggaaaaggtcaaggctttacggagcttacgaccacttaaaccagaagaagtcgcaaccaactttgtccgtggtcaatacggtgccggcgatgatgctaaagcttaccgcgacgaagataagatttcatcagattctaacaccgatactttcgtcgctggtaaagtcatgatcgataattatcggtggtccggagtgccgttttacatccggactgggaaacgcttagccgataagttcacgcgaatcgacgtggtgttcaaacggccagtcgtcaatatcttcaatcatgaagacgtccgagctaatgacgacgcagcaaccagtctcgatccaaacatcttgacaatcaacgttgaaccgactgaaggcttcgagctccgcatgaatgctaaagcaatcggccaaggcttcgcaaccaccccggtcaagttgaattattctcacgatgctgaagccacggctggtagcccagaagcttacgaacgtttgcttcacgatgccttaaatggcgacgcaaccaactttacccactggcaagaggttgccgattcgtggaaattcgttgacgtcattcaaaaatactgggatgaacatcaacccgaatttccaaactaccgccctggtacaatgggaccagatgcggccgatgaattattacgtcaagatggtcaccgctgggtctaccgcaactag

SEQ ID NO: 16974 - protein, 494 aa, Lactobacillus plantarum WCFS1
MSNEKIALFTIFGGTGDLAQRKLYPSLFKLYQKGYLKDHFAVIGTARRPWTDDHYHEVISDSLADLNADQETVTQFASHFYYQSHDVTDAEHYRTLKKLSEKLDAQYGLQGNRIFYLAMAPNFFGTIAQHLRSENILTDNGFNRVIIEKPFGHDYESAKELNDQLTATFNENQIYRIDHYLGKEMIQNITAIRFGNNIWESLWNNRYIDNVQITLSEKLGVEERAVYYDNSGALRDMVQNHILQILSLLTMDQPVEFTENDIDVEKVKALRSLRPLKPEEVATNFVRGQYGAGDDAKAYRDEDKISSDSNTDTFVAGKVMIDNYRWSGVPFYIRTGKRLADKFTRIDVVFKRPVVNIFNHEDVRANDDAATSLDPNILTINVEPTEGFELRMNAKAIGQGFATTPVKLNYSHDAEATAGSPEAYERLLHDALNGDATNFTHWQEVADSWKFVDVIQKYWDEHQPEFPNYRPGTMGPDAADELLRQDGHRWVYRN

SEQ ID NO: 16975 - DNA, 1506 bp, Vibrio parahaemolyticus RIMD 2210633
  CDS (1)..(1506): transl_table=11
atgatggtaataccagaaaacagcagcatcgttatttttggtgcttcaggtgaccttacatatcgtaagctcattcctgctttataccacctttatgcgaacaagcagcttccagagagttttgccattcttggcgtaagtcgtactgaatacagtgacgagtcctaccgcgagaagctgaaaaaatcgcttcaagaaatggaaaaaaccgagccagaaacgcttgatgcatttatcaaccatctgcattaccaagcaattaacacttctgacacgcaagattacagcaagctggcaacacgtttagaccaacttgccgacgaatatcaattcgaacaacgtaatacgcttttctacctagctacacctccaagcctatacagtgtgatccctgcaagccttgcagcacatggtttgaacaatgaggaagatggctggaaacgtctgatcatcgagaaaccgttcggttacgaccttgagtcagcacgcacgttggataaagaaattcacgagcacttccaagaacatcaaatctaccgtatagaccattatttaggtaaagagacggttcaaaacctgcttgttttccgtttctctaacgcgatgtttgaaccgctttggaaccgtaacttcattgattacgtggaaatcacaggcgctgaattccttggcgtagaagagcgtggtggttactacgacaactctggcgctgtgcgcgatatgttccaaaaccacttgctacaagtattggcaatggtcggtatggaaccaccagcacaaatcaacgcagattcaatgcgtgatgaagtggtgaaagtgcttcaatgcctaaaaccactggatgaaacagcattacgtaacgatcttgtccttggtcagtacactgcatcagacgtacgcggccaacaccttccgggttaccgtgaagaaaacggcgtagcggacgattctcgtactgagacgtacattggtctaaaagcttacatcaacaactggcgttggaatggtgtacctttctatgtacgtacaggtaagcgtcttccgactcgcgttactgaagtggttattcactttaaacaaacaccgcacccagtgtttggccaaaatgcgccagaaaacaaactgatcattcgtattcagccagacgaaggcattcagatgagctttggtttgaaagaaccaggtgcaggctttaatgcgaaggaagtgaaaatgaacttccactacgcagacctgcaagagactcaaatgctaactgcgtacgagcgtcttctacttgatgctctaaatggcgatgcgacgctatttgcacgtagcgatgcagttgaagcatgttggcagtacgttcagccaattttagacttcaaacaagatcctcaatcactcttcggatacgcatgtggtacatggggtcctaaagagtctgatgacttgcttcagcgtgacaaccgcgcttggcgtttcccatgtaaaaacctaacagatacggactactgtgaactatga

SEQ ID NO: 16976 - protein, 501 aa, Vibrio parahaemolyticus RIMD 2210633
MMVIPENSSIVIFGASGDLTYRKLIPALYHLYANKQLPESFAILGVSRTEYSDESYREKLKKSLQEMEKTEPETLDAFINHLHYQAINTSDTQDYSKLATRLDQLADEYQFEQRNTLFYLATPPSLYSVIPASLAAHGLNNEEDGWKRLIIEKPFGYDLESARTLDKEIHEHFQEHQIYRIDHYLGKETVQNLLVFRFSNAMFEPLWNRNFIDYVEITGAEFLGVEERGGYYDNSGAVRDMFQNHLLQVLAMVGMEPPAQINADSMRDEVVKVLQCLKPLDETALRNDLVLGQYTASDVRGQHLPGYREENGVADDSRTETYIGLKAYINNWRWNGVPFYVRTGKRLPTRVTEVVIHFKQTPHPVFGQNAPENKLIIRIQPDEGIQMSFGLKEPGAGFNAKEVKMNFHYADLQETQMLTAYERLLLDALNGDATLFARSDAVEACWQYVQPILDFKQDPQSLFGYACGTWGPKESDDLLQRDNRAWRFPCKNLTDTDYCEL

SEQ ID NO: 16977 - DNA, 1497 bp, Bacteroides thetaiotaomicron VPI-5482
  CDS (1)..(1497): transl_table=11
atggataaatttgcaatgattatttttggtgcttcgggcgacttgactaaacgcaagttgatgcccgcattgtactctctgtatcgggataaacggctgacggggagttttactgttctgggaattgggcgtactgtctattctgatgaagattaccgttcatatatacttggggagttgcagcagtttgtaaaggctgaagagcagaatttggagctgatgtcttcttttgtgtctcatttgtattatttgccgatggatcctgcgaaagtggagggatattcgcagttgcgggagcgtttggtagagcttacgaaggaggtcgatccggataatttgttgttctatctggctactccgccttcgctgtatggggtggtgcctttgcatttgaaggcggccgggctgaatactcctcattctcgtattattgttgagaagccgttcgggtatgatctggagtcggcgcttgagttgaataagatttactcttctgtgtttgatgagcatcagatttatcgtatcgatcattttctgggcaaggagacggcgcagaatgtgcttgctttccgtttcgccaatggtatttttgagccgttatggaatcgtaattatattgattatgtggagattactgctgtagagaatctgggtattgagcagcgcggaggtttttacgagacggcgggggctttgcgggatatggtgcagaatcacctgattcagctcgtagctcttacggctatggagccgccggcggtattcaatgcggataatttccggaatgaggtagtgaaggtttatgagtcgctgactccgcttacggagacggacttgaatgaacatatcgttcgcggacaatatacggcttcgggcaataagaaggggtatcgtgaggaaaagggagtggctcccgactcgcgtacggagacttatattgcgatgaagctgggcatcagtaactggcgttggagcggggtaccgttctacatccgcaccggtaagcagatgccgacgaaggtgacggaaattgtcgttcacttccgcgagacgccccatcagatgttccgctgttccggcggtaactgtccgagggctaataagttgatccttcgtttgcaaccaaacgagggtattgtgttgaagatcggaatgaaggttccgggtgcaggtttcgaagtccgtcaggtgacgatggatttcagttacgcacagttgggcggcgtgccgagcggtgacgcttatgcccgtctgattgacgactgcattcagggagatccgaccttatttactcgaagtgatgctgtagaggcttcctggaacttctttgatccggtcttacgttattggaaagataatccggacgcacctttgtacggctatccggcaggtacgtggggacctctcgaaagtgaagctatgatgcacgagcatggggcagactggaccaatccgtgtaagaatttaacaaatacagaccaatattgcgaactatga

SEQ ID NO: 16978 - protein, 498 aa, Bacteroides thetaiotaomicron VPI-5482
MDKFAMIIFGASGDLTKRKLMPALYSLYRDKRLTGSFTVLGIGRTVYSDEDYRSYILGELQQFVKAEEQNLELMSSFVSHLYYLPMDPAKVEGYSQLRERLVELTKEVDPDNLLFYLATPPSLYGVVPLHLKAAGLNTPHSRIIVEKPFGYDLESALELNKIYSSVFDEHQIYRIDHFLGKETAQNVLAFRFANGIFEPLWNRNYIDYVEITAVENLGIEQRGGFYETAGALRDMVQNHLIQLVALTAMEPPAVFNADNFRNEVVKVYESLTPLTETDLNEHIVRGQYTASGNKKGYREEKGVAPDSRTETYIAMKLGISNWRWSGVPFYIRTGKQMPTKVTEIVVHFRETPHQMFRCSGGNCPRANKLILRLQPNEGIVLKIGMKVPGAGFEVRQVTMDFSYAQLGGVPSGDAYARLIDDCIQGDPTLFTRSDAVEASWNFFDPVLRYWKDNPDAPLYGYPAGTWGPLESEAMMHEHGADWTNPCKNLTNTDQYCEL

SEQ ID NO: 16979 - DNA, 1524 bp, Enterococcus faecalis V583
  CDS (1)..(1524): transl_table=11
atgaatgaaaaagtagcattatttactattttcggggggacaggtgatcttgccaaacgtaaattgtatccttccctgttccgcttatataaaaaaggattattagctgagcgttttgcggtgattggtaccgcacgtcgggaatggacagacgaatactatcgtgaaatcgtccgtgaaaccattcaagacttaaatcccacggccgaagaggcaactgaattttctagtcatttctattaccaatcacataatgtgaatgatacggaacattataataccttaaaagaattatctgatcgcctaaatgaacaataccacttagaaggcaatcatgtttactatttagctatggcccctcaattctttggaaccattgttaatcacttgaaatcacaacatattatttcggaagaaggctttgatcgtctaattatcgaaaagccatttggttctgattatgaatctgcctacgaattaaatgaagaaattcgtgctgcatttcctgaacaagatattttccgaattgaccattacttaggcaaagaaatgatccaaaatatttcagccattcgttttgccaataatatttttgaatcacaatggaacaatcgttacattgataatgtccaaatcaccttcgctgaaagcttaggtgtcgaggatcgtggcggctattatgaccacagtggcgcactaaaagatatggttcaaaatcatattttacaagtcgttgcattgctttctatggagcctcctgttgccttttctgaaaaagaaattcggactgaaaaagtaaaagctttacgtgccatccgcctttattctgaagaagaagcccttcaaaatttcgtgcgtggacaatacggcgaaggtcagctagctgatcaaacatttgcagcctatcgtgatgaaccaaatgtggcagaaacttcatccactgaaacttttgttgctggtaaatttttaattgataatttccgttggtctggcgtccctttctatgttcgcacaggtaaacgattaactgaaaaaggcacacgcattaacatcgtctttaaacaagtacctattaatgtcttcaaagatgatacgtgtgaagaatgcgataaaaccgatttaccaccgaatgttttaactatctatatccaaccaactgaaggattttcattaaccttaaatggaaaagaaatcggtcaagggttcaatacaactccagtgaaacttgatttccgtcaaagtgctgaaatgactgaaaatagtccagaagcatacgaaaaacttctattagactgcctaaatggcgatagtacaaacttctctcattgggacgaagttgcccaatcttggcgcattgttgacattattcgacatgcttgggataaaacagacgtttctttccctaattatgccgctggcacaatgggcccgcaagctgccttcgacttattagaaaaagatggctttacttgggaatggcaaccagataactggtaccgtgaccgcggtcaacttgatcaataa

SEQ ID NO: 16980 - protein, 507 aa, Enterococcus faecalis V583
MNEKVALFTIFGGTGDLAKRKLYPSLFRLYKKGLLAERFAVIGTARREWTDEYYREIVRETIQDLNPTAEEATEFSSHFYYQSHNVNDTEHYNTLKELSDRLNEQYHLEGNHVYYLAMAPQFFGTIVNHLKSQHIISEEGFDRLIIEKPFGSDYESAYELNEEIRAAFPEQDIFRIDHYLGKEMIQNISAIRFANNIFESQWNNRYIDNVQITFAESLGVEDRGGYYDHSGALKDMVQNHILQVVALLSMEPPVAFSEKEIRTEKVKALRAIRLYSEEEALQNFVRGQYGEGQLADQTFAAYRDEPNVAETSSTETFVAGKFLIDNFRWSGVPFYVRTGKRLTEKGTRINIVFKQVPINVFKDDTCEECDKTDLPPNVLTIYIQPTEGFSLTLNGKEIGQGFNTTPVKLDFRQSAEMTENSPEAYEKLLLDCLNGDSTNFSHWDEVAQSWRIVDIIRHAWDKTDVSFPNYAAGTMGPQAAFDLLEKDGFTWEWQPDNWYRDRGQLDQ

SEQ ID NO: 16981 - DNA, 1647 bp, Streptomyces avermitilis MA-4680
  CDS (1)..(1647): transl_table=11
atgagcaagactccttcgaccgggacgccgggcaccgagaagcctgtcaccgggacgccggccaccgagacgcctgtcacggaggctccggtcaccgaggctccggtcaccgaggcgtcggccgtcgactgggccaaccccctgcgcgacccccgggaccgccgtctcccccgtatcgcgggcccctcgggcctcgtcatcttcggggtcaccggcgacctgtcccgcaagaagctgatgccggccatctacgacctggccaaccgcggtctgctcccgccgggcttctcgctcctcgggttcgcccgccgggactgggaggaccaggacttcgcgcaggtggtgcacgactcggtgcgcgagcacgcccgcacggagttccgcgaggaggtctggcagcagctcgccgagggcatgcggttcatcccgggcgacttcgacgacgacatggcgttcaagcaactgcgcgcgtccgtcgacgagctggacgcctcccgcggcaccagcggcaactacgccttctatctctcggtaccgccgaagttcttcccgaaggtcgtccagcagctcaagaagcacgggctcgcggacgcgccggagggctcctggcggcgtgcggtcatcgagaagccgttcggccacgacctggccagcgcgcgtgagctgaacgcgatcgtgcacgaggtgttcgacccggaccaggtgttccgcatcgaccactacctgggtaaggagaccgtccagaacatcctggcgctccgcttcgccaaccagatgtacgagccggtctggaaccggtcgtacgtcgaccacgtacagatcaccatggccgaggacatcggcatcggcggccgtgcggggtactacgacggcatcggttcggcccgtgacgtcatccagaaccacctcctccagctgatggcgctgaccgccatggaggagccggccgccttcgacgccgagtcgctgctcgccgagaagctgaaggtcctcaagtccgtgaagctgccggggaacctgggcgagcacaccgtgcgcggtcagtacacggcgagctggcagggcggcgagcgggtgcgcggctacctccaggaggacggcatcgaccccaggtcgacgacggacacctacgcggccgtgaagctggaggtcgacaaccgccgctgggcgggcgtccccttctatctgcgcaccggcaagcgtctgggccgccgggtgaccgagatcgcggtggtcttccagcgcgcgccccactcccccttcgactcgaccgccaccgaggagttgggcgccaacgcgatcgtcgtccgtgtccagcccgacgagggcatgaccgtgcgcttcggttcgaaggtgccgggtacgtcgatggagatccgggacgtctcgatggacttcgcgtacggcgagtcgttcaccgagtccagcccggaggcgtacgaacggctgatcctggatgtcctgctcggcgacgccaatctcttcccccgccatcaggaggtggaagagtcctggaagatcctcgacccgatcgaggggtactgggacacgcacggcaagcccgcgcagtacccctcgggatcctggggtcccgaggaagccgacgagatgctcgcacgagacggacggagctggcgcaggccatga

SEQ ID NO: 16982 - protein, 548 aa, Streptomyces avermitilis MA-4680
MSKTPSTGTPGTEKPVTGTPATETPVTEAPVTEAPVTEASAVDWANPLRDPRDRRLPRIAGPSGLVIFGVTGDLSRKKLMPAIYDLANRGLLPPGFSLLGFARRDWEDQDFAQVVHDSVREHARTEFREEVWQQLAEGMRFIPGDFDDDMAFKQLRASVDELDASRGTSGNYAFYLSVPPKFFPKVVQQLKKHGLADAPEGSWRRAVIEKPFGHDLASARELNAIVHEVFDPDQVFRIDHYLGKETVQNILALRFANQMYEPVWNRSYVDHVQITMAEDIGIGGRAGYYDGIGSARDVIQNHLLQLMALTAMEEPAAFDAESLLAEKLKVLKSVKLPGNLGEHTVRGQYTASWQGGERVRGYLQEDGIDPRSTTDTYAAVKLEVDNRRWAGVPFYLRTGKRLGRRVTEIAVVFQRAPHSPFDSTATEELGANAIVVRVQPDEGMTVRFGSKVPGTSMEIRDVSMDFAYGESFTESSPEAYERLILDVLLGDANLFPRHQEVEESWKILDPIEGYWDTHGKPAQYPSGSWGPEEADEMLARDGRSWRRP

SEQ ID NO: 16983 - DNA, 1524 bp, Streptomyces avermitilis MA-4680
  CDS (1)..(1524): transl_table=11
ttgtcgagcagcaacccgctgcgtgaccccgcagaccgacggctcccgcgtatcgcggggccgtcgggcctggtcatcttcggcgtcacgggcgatttgtcacgtaaaaagctgatgccagccgtgtacgatctcgccaaccgcgggctgctgccgccgggcttctcgctcgtcggcttcgcccgccgcgactgggagcacgaggacttcgcccaggtcgtccacgacgccgtcaaggaacacgcccgtacggagttccgcgaggaggtctggcagcagctcatccaggggatgcgcttcgtccagggcaccttcgacgacgacgacgccttcgagcggctgcgcgacaccatcggggaactggacaaggcacagggcacgggcggcaacttcgccttctacctgtccgtgccgccgtccgccttcccggtggtcatccagcagctcaagaagcacggcctggccgaccagtcggacggctcctggcgccgcgcggtcatcgagaagcccttcggacacgacctcaagtcggccgaggagctcaacgcgatcgtccacgaggtcttcggctcggaccaggtcttccgcatcgaccactacctgggcaaggagaccgtccagaacatcctggcgctgcgcttcgccaacacgatgttcgagccgatctggaaccggtccttcgtggaccatgtgcagatcaccatggccgaggacatcggtatcggcggccgcgccggctactacgacggcatcggcgccgcccgtgacgtcatccagaaccacctgctccagctgatggcactgaccgccatggaggagcccgcctccttcgacgcggacgcgctcgccgccgagaagaccaaggtgctcggcgccgccaagctgccgaaggacctgagcaagaacaccgtccgcggacagtacgcggccggctggcagggcggcgagaaggtcgtcggctatctccaggaagacggcatcgaccccaagtcgaagaccgacacctacgcggccgtcaagctcgaggtggacaaccgccgctgggcgggcgtccccttctatctccgtaccggcaagcgcctgggccgccgcgtcaccgagatcgcggtcgtcttccagcgcgccccgcactcccccttcgaccacacggcgacggaggagctcggccagaacgcgatcgtcatccgcgtccagcccgacgagggcatcaccgtccgcttcggctccaaggtgcccggcacctcgatggagatccgggacgtctcgatggacttcgcgtacggcgagtcgttcaccgagtccagcccggaggcgtacgagcggctgattctggacgtgctgctcggcgactcgaacctcttcccgcgcaccgaggaggtcgagctgtcctggaagatcctcgacccgatcgaggagcactgggacaagcacggcaagcccgcgcagtaccccgcgggcacgtggggtcccgtcgaggcggacgaaatgctcgaacgagacggacggagctggcgtcgcccatga

SEQ ID NO: 16984 - protein, 507 aa, Streptomyces avermitilis MA-4680
MSSSNPLRDPADRRLPRIAGPSGLVIFGVTGDLSRKKLMPAVYDLANRGLLPPGFSLVGFARRDWEHEDFAQVVHDAVKEHARTEFREEVWQQLIQGMRFVQGTFDDDDAFERLRDTIGELDKAQGTGGNFAFYLSVPPSAFPVVIQQLKKHGLADQSDGSWRRAVIEKPFGHDLKSAEELNAIVHEVFGSDQVFRIDHYLGKETVQNILALRFANTMFEPIWNRSFVDHVQITMAEDIGIGGRAGYYDGIGAARDVIQNHLLQLMALTAMEEPASFDADALAAEKTKVLGAAKLPKDLSKNTVRGQYAAGWQGGEKVVGYLQEDGIDPKSKTDTYAAVKLEVDNRRWAGVPFYLRTGKRLGRRVTEIAVVFQRAPHSPFDHTATEELGQNAIVIRVQPDEGITVRFGSKVPGTSMEIRDVSMDFAYGESFTESSPEAYERLILDVLLGDSNLFPRTEEVELSWKILDPIEEHWDKHGKPAQYPAGTWGPVEADEMLERDGRSWRRP

SEQ ID NO: 16985 - DNA, 1476 bp, Shigella flexneri 2a str. 2457T
  CDS (1)..(1476): transl_table=11
atggcggtaacgcaaacagcccaggcctgtgacctggtcattttcggcgcgaaaggcgaccttgcgcgtcgtaaattgctgccttccctgtatcaactggaaaaagtcggtcagctcaacccggacacccggattatcggcgtagggcgtgctgactgggataaagcggcatataccaaagttgtccgcgaggcgctcgaaactttcatgaaagaaaccattgatgaaggtttatgggacaccctgagtgcacgtctggatttttgtaatctcgatgtcaatgacactgctgcattcaaccgtctcggcgcgatgctggatcaaaaaaatcgtatcactattaactactttgccatgccgcccagcacttttggcgcaatttgcaaagggcttggcgaggcaaaactgaatgctaaaccggcacgcgtagtcatggagaaaccgctggggacgtcgctggcgacctcgcaggaaatcaatgatcaggttggcgaatacttcgaggagtgccaggtttaccgtatcgaccactatcttggtaaagaaacggtgctgaacctgttggcgctgcgttttgctaactccctgtttgtgaataactgggacaatcgcaccattgatcatgttgagattaccgtggcagaagaagtggggatcgaagggcgctggggctattttgataaagccggtcagatgcgtgacatgattcagaaccacctgctacaaattctctgcatgattgcgatgtctccgccatctgacctgagcgcagacagcatccgcgatgaaaaagtgaaagtactgaagtccctgcgccgcatcgaccgctccaacgtacgcgaaaaaaccgtacgcgggcaatatactgcgggcttcgcccagggcaaaaaagtgccgggatatctggaagaagagggcgcgaacaaaagcagcaatacagaaaccttcgtggcgatccgcgtcgacattgataactggcgctgggccggtgtgccattctacctgcgtactggtaaacgtctgccgaccaaatgttctgaagtcgtggtctatttcaaaacacctgaactgaatctgtttaaagagtcgtggcaggatctgccgcagaataaactgactatccgtctgcaacctgatgaaggcgtggatatccaggtactgaataaagttcctggccttgaccacaaacataacctgcaaatcaccaagctggatctgagctattcagaaacctttaatcagacgcatctggcggatgcctatgaacgtttgctgctggaaaccatgcgtggtattcaggcactgtttgtacgtcgcgacgaagtggaagaagcctggaaatgggtagactccattactgaggcgtgggcgatggacaatgatgcgccgaaaccgtatcaggccggaacctggggacccgttgcctcggtggcgatgattacccgtgatggtcgttcctggaatgagtttgagtaa

SEQ ID NO: 16986 - protein, 491 aa, Shigella flexneri 2a str. 2457T
MAVTQTAQACDLVIFGAKGDLARRKLLPSLYQLEKVGQLNPDTRIIGVGRADWDKAAYTKVVREALETFMKETIDEGLWDTLSARLDFCNLDVNDTAAFNRLGAMLDQKNRITINYFAMPPSTFGAICKGLGEAKLNAKPARVVMEKPLGTSLATSQEINDQVGEYFEECQVYRIDHYLGKETVLNLLALRFANSLFVNNWDNRTIDHVEITVAEEVGIEGRWGYFDKAGQMRDMIQNHLLQILCMIAMSPPSDLSADSIRDEKVKVLKSLRRIDRSNVREKTVRGQYTAGFAQGKKVPGYLEEEGANKSSNTETFVAIRVDIDNWRWAGVPFYLRTGKRLPTKCSEVVVYFKTPELNLFKESWQDLPQNKLTIRLQPDEGVDIQVLNKVPGLDHKHNLQITKLDLSYSETFNQTHLADAYERLLLETMRGIQALFVRRDEVEEAWKWVDSITEAWAMDNDAPKPYQAGTWGPVASVAMITRDGRSWNEFE

SEQ ID NO: 16987 - DNA, 1491 bp, Nitrosomonas europaea ATCC 19718
  CDS (1)..(1491): transl_table=11
atgaatgatgcaaaaatgagccagactgaaaagctgccctgcctgtttgtcatttttggtgcaactggagatctcgcctcaaacaagttgctgcccgcgttatttgagttggaaaatgctggccgcctggcagataatttttccatcgttgctttctcgcgccgcgagtggacaactgacgattggctcgaacatctgcgtgaaatactgaagaataggattgatcaatcttttccggaaggagtgctggagcgtttttttgcacgtttccgttatcagcagggagatctcaacgatatcgaatcctatcgtgtgttagctgccggtctggcgcccggatcggcttgttctcgtacggtattttatcttgcgatcaggcctgctgatttcgttgcggtgatcaggaatctcaaagctgctggcctcaatgagccgcgaggaatgaaccgtgtagtgattgaaaaaccgtttggagaggatcttgaatcggcacaggtactgaatcgcttattgcatcagcattttgatgaagagcagatttatcgtatcgatcatttccttggtaaggaaaccgtacagaatctgcttgttttccggtttgccaatacgttgatcgagccactgtggaatcgtaattttattgatcatgtacaaattacggtggcggaatcgggtggtattgaaaaacgtgcagggtattatgatcgtgctggtgcgttgcgtgatatgttgcagaatcatttgatgcaattattgaccgtagttgccatggaaccgccacctgctcttgaggcagatgctttacgtgacgaaaaggtcaaagtactacgttcgattcgtcccattgccaagcgcgcgatacatgcccatgctgtgcgcgctcaatatactcacggtaatatcgatgggcaggtggtggcaggttatcagcaggaagataatgttgaacgggattcgattaccgaaacttttgtggcagccaagttctacattgataattggcgctggcggggagtgccgttttatctgcgtacaggtaagcgtatgccgaaacagaattcgatgatcgcaattcgtttcaagcatcctccccagcaacttttccgtgaaacaccattggaatggattgcaccaaactgggtgttgctttcgattcagcctgaagaatcgatgcacatggaaattcatgttaaacaacccggtctcgatatgaatacccgggtgatgcagatgaacgcaagttttctcaaaaccgatgaacaggcgctggatgcttatgaagcgctactgctcgacgtcattgaaggcgatcgctcacttttcattcgttttgatgaagttgaatgggcgtggcaagtgattgatcctattctgaaacattgggtggtagagcgcgaatatatcccgacttaccctgctggcagttgggggccggcagaggctaatcgcttgtttgacaacgatgatcagacctggcgcaacgagctttag

SEQ ID NO: 16988 - protein, 496 aa, Nitrosomonas europaea ATCC 19718
MNDAKMSQTEKLPCLFVIFGATGDLASNKLLPALFELENAGRLADNFSIVAFSRREWTTDDWLEHLREILKNRIDQSFPEGVLERFFARFRYQQGDLNDIESYRVLAAGLAPGSACSRTVFYLAIRPADFVAVIRNLKAAGLNEPRGMNRVVIEKPFGEDLESAQVLNRLLHQHFDEEQIYRIDHFLGKETVQNLLVFRFANTLIEPLWNRNFIDHVQITVAESGGIEKRAGYYDRAGALRDMLQNHLMQLLTVVAMEPPPALEADALRDEKVKVLRSIRPIAKRAIHAHAVRAQYTHGNIDGQVVAGYQQEDNVERDSITETFVAAKFYIDNWRWRGVPFYLRTGKRMPKQNSMIAIRFKHPPQQLFRETPLEWIAPNWVLLSIQPEESMHMEIHVKQPGLDMNTRVMQMNASFLKTDEQALDAYEALLLDVIEGDRSLFIRFDEVEWAWQVIDPILKHWVVEREYIPTYPAGSWGPAEANRLFDNDDQTWRNEL

SEQ ID NO: 16989 - DNA, 1455 bp, Rhodopirellula baltica SH 1
  CDS (1)..(1455): transl_table=11
atgtcacatacaattgtcatctttggtgccagcggcgacctgaccagccgcaaactggtcccggcactcttccgactcttctcacgcggacgcctgcccgactcgactcgcattgtcggtgtttcgcgaagtccctacgaacattccgagtggcgaaaatcgcttcgcgaaaccaccgccaaatttgtcggcaagtctttcagcgaagaagcctgggaatcattcgcaccgaacatctactaccagcccggcgacatcaaagacgcagagtcgtttcaatcgctggcgacgtttttggatgaaatcgaagaaggcaaatcgaccggtcgagtctactacctgtcgaccatgccacagttgtacgaagaagcgatccagcaactcggggccgcgggactcgcctgcgacaaaaccggaccgcgacgggtgatcatcgagaaaccgttcggcacggatctgaaaacggcccagcgtctgaacgaatcgatccacaacgtttttcgcgaagatcagatctaccggatcgatcattacctcggcaaagaaaccgtacagaacattttcgcgttgcgttttgccaacagtatcttcgaaccgctgtggaaccggaactacatcgaccacgtgcaaatcaccgtggccgaagaagtcgtcatcggccggcgagctggctactacgacaacagcggaatcctccgcgacatgttccagaatcatattctgcaactgatgatgatcacggcgatggaaccgccggcgaaatttgacgccgctttggttcgcgatgagaaagtcaaagtgttgcacagtgttcgcaagatgacgggtggcgacttcgcatctcaaaccgttcgcggccagtacgacggctacctgcaagaggaaggcgtcccggcgaacagccaaacggaaacctttgccgcgttgaaactgtactgcgacaactggcgatggcagggcgtgccgttcttcttgcgaagcggcaaaggcatgtcatgccgaacgacccagatcgtgatccagttcaaaaacgttccgcaccaattgtttggcggatcgaagaaggagaacaaacttggcaaccgattggtcattcaagtccaaccggccgaaggcatccaattgcacttcgaaaccaaggttgccgacgccggaatgaagacgcgaaccaaccacttggacttcaacttccaagattcgatcggcggccaagaaatgcccgacgcctatcagcgactgctgctggacgcggtgcaaggcgacgccagcctctttgctcgcggcgacgaagtcgaactggcctggagcatcatcgatccaatcatcgaagcgtggcgaagcccggccgctccgccactgcacacgtaccaaaccggcctttggggccccgaagaatgctcgcagtggctgttcgaccaaaaacgcgaatggttcgacgtctgcccagttatttaa

SEQ ID NO: 16990 - protein, 484 aa, Rhodopirellula baltica SH 1
MSHTIVIFGASGDLTSRKLVPALFRLFSRGRLPDSTRIVGVSRSPYEHSEWRKSLRETTAKFVGKSFSEEAWESFAPNIYYQPGDIKDAESFQSLATFLDEIEEGKSTGRVYYLSTMPQLYEEAIQQLGAAGLACDKTGPRRVIIEKPFGTDLKTAQRLNESIHNVFREDQIYRIDHYLGKETVQNIFALRFANSIFEPLWNRNYIDHVQITVAEEVVIGRRAGYYDNSGILRDMFQNHILQLMMITAMEPPAKFDAALVRDEKVKVLHSVRKMTGGDFASQTVRGQYDGYLQEEGVPANSQTETFAALKLYCDNWRWQGVPFFLRSGKGMSCRTTQIVIQFKNVPHQLFGGSKKENKLGNRLVIQVQPAEGIQLHFETKVADAGMKTRTNHLDFNFQDSIGGQEMPDAYQRLLLDAVQGDASLFARGDEVELAWSIIDPIIEAWRSPAAPPLHTYQTGLWGPEECSQWLFDQKREWFDVCPVI

SEQ ID NO: 16991 - DNA, 1479 bp, Chromobacterium violaceum ATCC 12472
  CDS (1)..(1479): transl_table=11
atggagactcgttctacccctaccccggccttcgacatggtgctgttcggcggcgccggcgacctggtgatgcgcaagctgctgccttcattgtaccaggcgcataacgccggcctgctcaacgaacagggccgcatcctggcgctgggccgcaaggacctgagccgcgacgactacctggcttccgtcgaaaagcagtcccgcatccatatcaagtcccacttcgacgatgccgcctggcagagcttctgtagccgcatcgactacctgcgcgtcgacgcctcccaggccgccgactacccggcgctggccgagaaggtcggcgacgacgccggcaaggtggtggtgtgctaccttgccaccgcgcccaatctgttcgccggcatctgcgaaaacctggccgcggtcggcctgaaccgccccaatgtgcgggtggtgctggaaaagccgctgggcaccgacctcgactcgtccaacgagatcaacgacgacgtcgcccgcttcttcaaggaagagcagctgtaccggatcgaccactacctgggcaaggagtcggtgcagaacctgatggccatccgcttcgccaacgcgctgttcgagccgctgtggcgccgcgaatggatacacgacgtgcagatcaccatttcggaagaactgggcgtcggcagccgcggcgatttctacgacggcaccggcgcgctcagggacatggtgcagaaccacctgctgcagctgctgtgcatcgtggcgatggagccgccggccaacctggaagccgacgccgtccgcgacgagaagctgaaggtgctgaaggcgctgcgcccgttcaccgagcacgatgtcgccgccaagaccgtgcgcggccagtacaaggccggcgccagcggcggccagccggtggtcggctaccaggacgaggccggcattcccgccggcagccagaccgagaccttcgtcgccatcaaggccgagatcgacaactggcgctgggccggcgtgcccttcttcctgcgcaccggcaagcggatgcaggaacgcctggccgagatcgtcatcaacttccgcgatgtgccgcaccaggtgttcaccggcccgctgggcggcagccaccacgccaaccggctggtgatccgcctgcagcccgaggaaagcatccgcctgtacttcctggccaaggagccgggcgacaccatgcgcctgcagccggcctacctggacctggacttctacaaggcgttcaaggtgcgccgcgccgacgcctacgagcgcctgctcttggacgtgatccgcggcaagctggcgctgttcatgcgccgcgacgagctgatcgaggcctggcgctgggtcgagcccatcatggacacctgggccgccagcaccaacaacccgcccaagcaatacaccgccggcagctggggcccggccgcgtccagcgcgctgctgtcgcgcgacggcatcagctggcacgaggagtgttaa

SEQ ID NO: 16992 - protein, 492 aa, Chromobacterium violaceum ATCC 12472
METRSTPTPAFDMVLFGGAGDLVMRKLLPSLYQAHNAGLLNEQGRILALGRKDLSRDDYLASVEKQSRIHIKSHFDDAAWQSFCSRIDYLRVDASQAADYPALAEKVGDDAGKVVVCYLATAPNLFAGICENLAAVGLNRPNVRVVLEKPLGTDLDSSNEINDDVARFFKEEQLYRIDHYLGKESVQNLMAIRFANALFEPLWRREWIHDVQITISEELGVGSRGDFYDGTGALRDMVQNHLLQLLCIVAMEPPANLEADAVRDEKLKVLKALRPFTEHDVAAKTVRGQYKAGASGGQPVVGYQDEAGIPAGSQTETFVAIKAEIDNWRWAGVPFFLRTGKRMQERLAEIVINFRDVPHQVFTGPLGGSHHANRLVIRLQPEESIRLYFLAKEPGDTMRLQPAYLDLDFYKAFKVRRADAYERLLLDVIRGKLALFMRRDELIEAWRWVEPIMDTWAASTNNPPKQYTAGSWGPAASSALLSRDGISWHEEC

SEQ ID NO: 16993 - DNA, 1539 bp, Gloeobacter violaceus PCC 7421
  CDS (1)..(1539): transl_table=11
atgaccgcatcgttgactggaggattgagcgccaatccgttgcgccaggggctgcgcctggagcgcacgcccaagcctgccattttgactatcttcggggcctccggagatttgaccgtccgcaagctgatcccagccctttacgacctggcccgcgaccggcgattgccccctgaattcacggtcgtgggctatgcccgtcgcccctacagccacgaagaatttcgcgaaatgatgaaggaaggggtagccaagtattcgcgcagcaagctgggcaacctctgggaaagtttctccaagggcatctattacttccagggggacctcgacaatctccagaattttaaggacctcggcgaatttttgcagactctagatagcgagcgcggcaccctcggcaaccgggccttctacatggctaccgccccgagtttctttgcgcccatcatcgagaatctgggcggagcgggcctggcgggcgacgtgcgcaacacgcgcctggtgatcgaaaaacccttcggccacgacctggagtcggctcaaaatctcaacaaagtcgtccagcaagtctttcacgaaaagcaggtctaccgcatcgatcactacctgggcaaagagaccgttcagaatatcctggtcttccgctttgccaattcgatctgggaaccgctctggaacaaccgctacgtcgatcacgtgcagatcacggtagcagagacggtgggggtcgaaaaccgcgggccgtactacgacgaagccggcggcgcgctgcgcgacatgatccagaatcacctggtacagctgttggctctcaccgccatggagccgccctccgccttcgaggccgacaccgtgcgcgacgaaaaagtgaaagtcctgcgcgccacccaggtcggccaggggccgaacggccttgcggcagtccgcgcccagtacgccaacggctggatttcaggcgaaccggtgcacgcctaccgcgacgaaccccgggtcaaccccgacgttcagactgcgagctatattgccgccaaattcatgatcaacaattggcgctggaagggcgtgccgtttttgctgcgcaccggcaaacgcctcgccaagcgcgtcaccgaaattgccctgcaatttcgggaagtgccgcacctgctctttccgtcgagcagcgcgggccagctcagcccgaacatgctggtgctgcgcatccaaccggacgaaggcatttcgctgcgcttcgaggccaagcggccggtggccgacatcgccatgcgctcggtgaacatggactttcactacggcggcaccttcgaggtcgcctcgcccgaagcctacgagcggttgctgctcgattttctgctcggggatcagacgctgtttacccgcgcggacgaagtcgaggcggcctggaagatcgtcacaccgctcatcgagcgctgggaaatccagaaagccggcgatctcaattactacgacgccggttcctgggggccgagtgccgcgagtaagctgatggacaacggccgccgctggcggcgcctatag

SEQ ID NO: 16994 - protein, 512 aa, Gloeobacter violaceus PCC 7421
MTASLTGGLSANPLRQGLRLERTPKPAILTIFGASGDLTVRKLIPALYDLARDRRLPPEFTVVGYARRPYSHEEFREMMKEGVAKYSRSKLGNLWESFSKGIYYFQGDLDNLQNFKDLGEFLQTLDSERGTLGNRAFYMATAPSFFAPIIENLGGAGLAGDVRNTRLVIEKPFGHDLESAQNLNKVVQQVFHEKQVYRIDHYLGKETVQNILVFRFANSIWEPLWNNRYVDHVQITVAETVGVENRGPYYDEAGGALRDMIQNHLVQLLALTAMEPPSAFEADTVRDEKVKVLRATQVGQGPNGLAAVRAQYANGWISGEPVHAYRDEPRVNPDVQTASYIAAKFMINNWRWKGVPFLLRTGKRLAKRVTEIALQFREVPHLLFPSSSAGQLSPNMLVLRIQPDEGISLRFEAKRPVADIAMRSVNMDFHYGGTFEVASPEAYERLLLDFLLGDQTLFTRADEVEAAWKIVTPLIERWEIQKAGDLNYYDAGSWGPSAASKLMDNGRRWRRL

SEQ ID NO: 16995 - DNA, 1476 bp, Photorhabdus luminescens subsp. laumondii TTO1
  CDS (1)..(1476): transl_table=11
atggcggttacttctacagctcaggcttgtgatttagtcatttttggcgctaaaggggatttggcacgccggaaattattgccttccctttatcagcttgagaaagcgggttatatccacccagaaacccggattatcggtgttggccgggctgattgggataaaaaagcttataccaaggttgttgaagaagctttaaatacattcttgccagaaaaattagattcagaattatggaagatattgagtgagcgtttggcgttctgcaatctggatgttaatcaaaaagaagactttgccaaattgaaggcaattcttaagcaggataatcggcctgcaatccattattttgcgatgccacccagtacttttggttcggtttgtcacggattgggccttgcagggctaaataaagagccaaatcgagttgtgatggaaaagcctttagggaccgatcttgaatcatccaaagccatcaatgatgaagtagctaaatatttcaatgagcgtcaggtttatcgcatcgatcattatctgggtaaagaaaccgtattgaatctgttggcgctgcggtttgccaattccttgtttgtgaataattgggataaccggacaattgatcatgtacaaattacagtagctgaagaagtcggtattgaaggccgttggggttattttgaccaagctgggcagatgcgcgatatgattcagaatcacctgttgcaaatattgaccatgattgctatgtctcctccggcagatctgacgacagaccgtatccgtgatgaaaaagtaaaagtattgcgttctctgcgctgtattgatcatacgaatgtgcgggagaagacggtacgaggtcaatacactgctggttttgttcaggggcataaggtaccggggtatctggaagaagagggggcaaaccagtccagccggacggaaacttttgtctctatccgtgtcgatattgatgactggcgttgggccggggttcctttctacctgagaaccggtaaacgtctgccaacgaaatgttccgaggtggtagtttatttcaaaaagcctgcactgaacttgttttctgagtcttatcaacaactaccgcagaataagctaacgattcgtttgcagccggatgaaggtattgatattgaagtgctgaacaaagctccggggctggaacacaagcatcgtctgcaaaccactaagctagatctgagtttctctgaaacgtttaaccatattccgttggcggatgcttatgagaggttactgctggaggctatgcggggtattcaggcgctatttgttcgtcgtgatgaagtggaagaagcgtggaaatgggttgattctattatgaatgcatgggcggcggataatgatgcgcctaagccttatcaggcggggacgtgggggccggtcgcttctgttgcgatgatcactcgcgatggtcgttcgtggaatgagtttgagtaa

SEQ ID NO: 16996 - protein, 491 aa, Photorhabdus luminescens subsp. laumondii TTO1
MAVTSTAQACDLVIFGAKGDLARRKLLPSLYQLEKAGYIHPETRIIGVGRADWDKKAYTKVVEEALNTFLPEKLDSELWKILSERLAFCNLDVNQKEDFAKLKAILKQDNRPAIHYFAMPPSTFGSVCHGLGLAGLNKEPNRVVMEKPLGTDLESSKAINDEVAKYFNERQVYRIDHYLGKETVLNLLALRFANSLFVNNWDNRTIDHVQITVAEEVGIEGRWGYFDQAGQMRDMIQNHLLQILTMIAMSPPADLTTDRIRDEKVKVLRSLRCIDHTNVREKTVRGQYTAGFVQGHKVPGYLEEEGANQSSRTETFVSIRVDIDDWRWAGVPFYLRTGKRLPTKCSEVVVYFKKPALNLFSESYQQLPQNKLTIRLQPDEGIDIEVLNKAPGLEHKHRLQTTKLDLSFSETFNHIPLADAYERLLLEAMRGIQALFVRRDEVEEAWKWVDSIMNAWAADNDAPKPYQAGTWGPVASVAMITRDGRSWNEFE

SEQ ID NO: 16997 - DNA, 1581 bp, Vibrio vulnificus YJ016
  CDS (1)..(1581): transl_table=11
gtgtcactgatagggtgggctcatcctttaagccgtatccaggcacacaacaagtacctcgtttttaagggaaagatgatggtaataccagaaaacagcagcatcgtaatttttggtgcttcaggtgatttaacatatcgcaagttgatccctgctttataccacctctacgcaagtaagcagctaccagaaaactttgctattttaggtgtcagccgcactgaatacagcgatgaatcttatcgcgaaaagttaaagcgctctcttcaggaaatggagaaaacggaaccagctattctggattcatttatcgaccatcttcactatcaagccatcaacacgtcagacacacaagactacgcgaagttggttgtacgtttagacgaattggccgctcaataccagttcgaacaacgtaatacactgttttatcttgccacaccgccaagcctttacagtgtcattccttcaagccttgctcatcacggtcttaacagtgaagaggatggttggaaacggctgatcattgaaaaaccgtttggttatgatttggcttcggcacgtcagctcgacaaagaaatacacgattgcttccaagagcatcagatctatcgcatcgaccactaccttggaaaagagaccgtgcaaaacttacttgttttccgtttctctaacgccatgtttgaacctctgtggaaccgcaacttcattgattatgtggaaatcacaggtgccgaattccttggcgtggaagagcgtggcggttattacgacggctccggcgctgtgcgcgatatgttccaaaaccatctactgcaagtattggcaatggtgggcatggaaccgcctgcacaaattaatgccgattccatgcgtgatgaagtagtgaaagttctgcagtgtttaaaaccgcttgaggaagatgatctgcgtaacaacctagttttgggtcaatacacagcatcagacgtgcgcggacaacatctgcttggctaccgtgaagaaaacggcgtagcggacgattctcgtactgagacttacattggtcttaaagcgtacatcaataactggcgttggaatggcgtgccattctacgtgcgcacgggtaagcgtcttccaactcgcgtaacagaagtggttatccacttcaaacaaacaccgcatccggtatttggccaaaacgccccagaaaacaaactgatcattcgtattcagcctgatgaaggcattcaaatgagcttcggtttgaaagaacctggtgcaggctttaaagcgaaagaagtgaagatgaacttccattatgcttcgttgcaagagacgcaaatgctgaccgcctatgagcgtctgcttcttgatgcgttaaacggcgatgcaacgctgtttgctcgcagcgatgcggtcgaagcgtgttggaaatacgttcaacctatcctcgatttcaaacaagatccacaagcactctttggttatgcctgcggcacttgggggccaaaagagtcagacgatttgctgcagcgtgacgatcgcgcgtggcgtttcccatgcaaaaacctaacagatacggactactgcgaactatga

SEQ ID NO: 16998 - protein, 526 aa, Vibrio vulnificus YJ016
MSLIGWAHPLSRIQAHNKYLVFKGKMMVIPENSSIVIFGASGDLTYRKLIPALYHLYASKQLPENFAILGVSRTEYSDESYREKLKRSLQEMEKTEPAILDSFIDHLHYQAINTSDTQDYAKLVVRLDELAAQYQFEQRNTLFYLATPPSLYSVIPSSLAHHGLNSEEDGWKRLIIEKPFGYDLASARQLDKEIHDCFQEHQIYRIDHYLGKETVQNLLVFRFSNAMFEPLWNRNFIDYVEITGAEFLGVEERGGYYDGSGAVRDMFQNHLLQVLAMVGMEPPAQINADSMRDEVVKVLQCLKPLEEDDLRNNLVLGQYTASDVRGQHLLGYREENGVADDSRTETYIGLKAYINNWRWNGVPFYVRTGKRLPTRVTEVVIHFKQTPHPVFGQNAPENKLIIRIQPDEGIQMSFGLKEPGAGFKAKEVKMNFHYASLQETQMLTAYERLLLDALNGDATLFARSDAVEACWKYVQPILDFKQDPQALFGYACGTWGPKESDDLLQRDDRAWRFPCKNLTDTDYCEL

SEQ ID NO: 16999 - DNA, 1650 bp, Corynebacterium diphtheriae NCTC 13129
  CDS (1)..(1650): transl_table=11
ttgcccaacgtgagtaaaccagtggctaacggaaacaccgtagaaagtaacaatgctgaacttgctttcggcggtgttgatttttcctattctgatacacatgagaattcgtgtagtagaacgtcaagcaaatgggtcaatcccctaagggatgctgaggacaagcgcctcccccgcatcgcgggcccgtgcggaatggttatttttggtgtaactggtgatctcgctcggaaaaagctcctgccagcgatctatgatcttgcacacaggggcctattgcctgcaggtttcagtcttgtcggctacggtcgacgaggctggtctaaggccgactttgaaaattacgtcaagcaagcagttgttgccggtgcccgtaccgatttccgcgaaaatgtttgggcacgacttgccgaaggtatgcacttcgttcaaggcaatttcgatgatgatgcagcatttgatagtttggcatcgcttttggcggatcttgatcagacccgtggaactgccggtaactgggccttttatctctctgttccaccagattatttttcggatgtttgccatcaacttcagcgctcaggcatggctacagccgagggcaattcatggcgtcgcgtcattgtggaaaagccttttgggcatgatcaagaatcagcacgtcagctaaacaacttgatcaattcagtattccctgaaaagtcagtatttcgtatcgaccactacttgggtaaagagacagtgcaaaatattatggcactgcgctttgcaaaccagctatttgatccgctctggaattctcactatgttgaccatgtccaaatcaccatggctgaggatatcggtctaggcggtcgcgctggttactatgatggaatcggcgccgctagagacgttatccaaaaccaccttattcagctgttggcgctggtagctatggaggaacccgtagcttttaccccacaagagcttcaggctgaaaaaatcaaggttcttcgtgccactcgcccagtagaaccttttgctaaaacaacagcccgagggcaatattcgcgcggttggcagggatctgagctcgtccaaggtctacgagaagaagacggatttgatcctaattccggaactgaaacttatgctgcctgcacactcgagataaattcgcgtcgttgggccggtgtgcccttttatcttcggactggaaagcgtttaggacgccgggtgactgagatcgcccttgtattcaaggatgcgcctcatcagccatttagcgaaggtagccgtcattcccaaggccgcaacgtcgtagtgatccgagtccagcctgatgagggtatgctgatgcgttttggttccaaggttcctggtaacacgatggaagtacgcgacgtcaacatggacttctcgtactcagaggcatttaccgaagaatcaccggaagcctacgaacgactcattctcgatgcacttctcgacgaagcaagtctcttcccaacaaatgaagaagttgagcttagctggcagatcctagatccgatattgaacttctggtctgatcgtgggcaaccggaagaataccccgctggcacctggggcccagctggtgcagacaagatgctggagcgcgaaggtcgcgcttggcgtcgaccttaa

SEQ ID NO: 17000 - protein, 549 aa, Corynebacterium diphtheriae NCTC 13129
MPNVSKPVANGNTVESNNAELAFGGVDFSYSDTHENSCSRTSSKWVNPLRDAEDKRLPRIAGPCGMVIFGVTGDLARKKLLPAIYDLAHRGLLPAGFSLVGYGRRGWSKADFENYVKQAVVAGARTDFRENVWARLAEGMHFVQGNFDDDAAFDSLASLLADLDQTRGTAGNWAFYLSVPPDYFSDVCHQLQRSGMATAEGNSWRRVIVEKPFGHDQESARQLNNLINSVFPEKSVFRIDHYLGKETVQNIMALRFANQLFDPLWNSHYVDHVQITMAEDIGLGGRAGYYDGIGAARDVIQNHLIQLLALVAMEEPVAFTPQELQAEKIKVLRATRPVEPFAKTTARGQYSRGWQGSELVQGLREEDGFDPNSGTETYAACTLEINSRRWAGVPFYLRTGKRLGRRVTEIALVFKDAPHQPFSEGSRHSQGRNVVVIRVQPDEGMLMRFGSKVPGNTMEVRDVNMDFSYSEAFTEESPEAYERLILDALLDEASLFPTNEEVELSWQILDPILNFWSDRGQPEEYPAGTWGPAGADKMLEREGRAWRRP

SEQ ID NO: 17001 - DNA, 1590 bp, Yersinia pestis biovar Microtus str. 91001
  CDS (1)..(1590): transl_table=11
ttgaccttttttgacgcatttttatctgggtttactggctatagtcaaagagagtacattagtaatgtaagaaaattacaaatatcctgcaacgaggagaatagcatggcagtaatgaatacagtccaggtagcccaggcgtgtgacctggtgattttcggcgctaaaggtgatttggctcgccggaaactgctgccttctctttaccaattagaaaaagcgggtcatatccacccagatactcggataatcggtgttggccgtgctgagtgggataaagatgcgtacaccgctgtggtaaaggaagccctcgatacctttatgaaagagccgctggatgacgagctatggcaaaaactcagctcgcgcctcgacttctgcaatctggatgtgaatgacagtaagcatttcaccaaattaggtaaaatgctcgatcaaaaacatcgcaccacgattaactactttgctatgccgccgagtacatttggtgcgatttgtaaaggcctgggagaagccgggttaaacaaagagcctagccgagtggtaatggaaaaaccattgggaaccgatttagcgccctcaagggtaattaacgatcaggtagccgagtatttcaacgaatgtcaggtttaccgtattgaccactatttagggaaagaaacggtattaaacctgttggcgcttcgcttcgctaactcgttgttcgcctcaaactgggacaaccgcactatcgatcatgtgcaaattaccgtcgcagaagaggtcggaattgaagggcgttggggctattttgatcaggccggtcagatgcgtgacatgatccaaaaccatctgttgcaaatcctgacgatgatcgccatgtcaccccccgcagatctcagtacggatcgcatccgtgatgaaaaagtaaaagtactgcgttcgctgcgccgtattgatcacaccaatgtgcgcgaaactacagttcgtgggcaatatactgccggctttgtacagggcaataaagtgccgggttatctggaagaggaaggcgcgaataagaatagcaataccgaaacatttgtgtctattcgggtggatatcgatgactggcgttgggctggggtacctttctacctgagaaccggtaagcgcctacccagcaaatgctctgaagttgtggtttactttaagaaccccgcactgaatctcttccgcgaatcttatcaacaactgccacaaaacaaactgacaattcgtttgcaaccggacgaagggatcgaaattgaagtgctgaataaagtccccggattggaacataagcatcgtttacaaaccactaagcttgatctcagtttctccaaaaccttcaatgagcagcatattgctgatgcctatgaacgtctgctactggagaccatgcggggtattcaagcgctgtttgtgcgccgtgatgaggtcgaagaggcgtggaaatgggtcgattctattatgaatgcgtgggcggcagataatgaagcaccaaaaccataccagtccggtacatgggggcctgtggcatccgttgctatgatcacccgtgatggccggtcatggaatgagttcgagtaa

SEQ ID NO: 17002 - protein, 529 aa, Yersinia pestis biovar Microtus str. 91001
MTFFDAFLSGFTGYSQREYISNVRKLQISCNEENSMAVMNTVQVAQACDLVIFGAKGDLARRKLLPSLYQLEKAGHIHPDTRIIGVGRAEWDKDAYTAVVKEALDTFMKEPLDDELWQKLSSRLDFCNLDVNDSKHFTKLGKMLDQKHRTTINYFAMPPSTFGAICKGLGEAGLNKEPSRVVMEKPLGTDLAPSRVINDQVAEYFNECQVYRIDHYLGKETVLNLLALRFANSLFASNWDNRTIDHVQITVAEEVGIEGRWGYFDQAGQMRDMIQNHLLQILTMIAMSPPADLSTDRIRDEKVKVLRSLRRIDHTNVRETTVRGQYTAGFVQGNKVPGYLEEEGANKNSNTETFVSIRVDIDDWRWAGVPFYLRTGKRLPSKCSEVVVYFKNPALNLFRESYQQLPQNKLTIRLQPDEGIEIEVLNKVPGLEHKHRLQTTKLDLSFSKTFNEQHIADAYERLLLETMRGIQALFVRRDEVEEAWKWVDSIMNAWAADNEAPKPYQSGTWGPVASVAMITRDGRSWNEFE

SEQ ID NO: 17003 - DNA, 1557 bp, Apis mellifera
  CDS (1)..(1557)
atgatgaaaacgtccactgaagagagtttgcactttatcagacagtcgctgaaatcggaagaaatggatcatctcgaaggaattcattttgatcgaaattatcctcatgtgtttgtaacactcggagcttctggcgacttagcaaaaaaaaaaatctatccaacgctatggtggttgtttagggataatcttttaccaaaaactaccacattctttggttacgcacgtacaaatatgtccgtgaatcaattacgagcaaaatgtcatccatatatgaaagtaaaatcggatgaagaaaaaaagtatgaagaattttggaaattgaattactatatggctggccaatatgattcgcaaaaaggattcgaaatgttgaacaatgaattgaagaaatacgaggaaggatacaatattaccaatagactgttttacttggccttaccaccgaatgtatttgaaaatgtaaccgtgcacattaggaatgtttgtatgagtgataaaggatggaccagagtaattatagaaaaaccgttcggccgcgacgcgactacgtcacagattttgtccgatcatctcgcatccttattcagagaagatcagatttatcgtatcgatcattatttgggaaaagaaatggttcaaaatttaatgactctacgatttggtaatcgaatattcagtccaacgtggaatagggataatgtggcctctgtacaaattacatttaaagagccatttggtacgcaaggaagaggcggctatttcgatgaatttggtatcattagggacgtcatgcagaatcatttgttacaaattttatcattggttgcgatggagaagccagcgtcttgtcatccggatgatatacgagatgagaaggtaaaagtgttaaagtgcataaagactttgacgctggacgatgttgtattaggtcaatatattggtgatcctgaatccgatgatcctgatgctcgacttggctatttggatgatgctactgtaccttccggttcaattactcccacatattcccttgctgtgttgaaaattaataacgagcggtgggatggtgttccatttatcctcaaatgtggaaaagctttaaacgaacgaaaggcagaagttagaatacaatatcaagatgtacctggcgatatatttgatggaaaagcgaaaagaaatgaattggtaattagagtacaaccaggtgaagcattatatattaaaatgatgacgaaatcacctggtattacatttgaaatggaagaaacagaattagatcttacatatggttctaggtataaggatctaaaacttccggatgcatacgaacgattaattttggatgtattttgtggctcgcaaatgcatttcgtacgtaatgatgaactttcgcaagcatggagaatttttacgcccttgcttcatcaaatagaaaacgaaagaattaaaccaattccgtataaatatggttcacgaggacccaaagaagcagatgaaatggcaaaagaaaataatttcgcttactatggttcatacaaatgggtgaaaccataa

SEQ ID NO: 17004 - protein, 518 aa, Apis mellifera
MMKTSTEESLHFIRQSLKSEEMDHLEGIHFDRNYPHVFVTLGASGDLAKKKIYPTLWWLFRDNLLPKTTTFFGYARTNMSVNQLRAKCHPYMKVKSDEEKKYEEFWKLNYYMAGQYDSQKGFEMLNNELKKYEEGYNITNRLFYLALPPNVFENVTVHIRNVCMSDKGWTRVIIEKPFGRDATTSQILSDHLASLFREDQIYRIDHYLGKEMVQNLMTLRFGNRIFSPTWNRDNVASVQITFKEPFGTQGRGGYFDEFGIIRDVMQNHLLQILSLVAMEKPASCHPDDIRDEKVKVLKCIKTLTLDDVVLGQYIGDPESDDPDARLGYLDDATVPSGSITPTYSLAVLKINNERWDGVPFILKCGKALNERKAEVRIQYQDVPGDIFDGKAKRNELVIRVQPGEALYIKMMTKSPGITFEMEETELDLTYGSRYKDLKLPDAYERLILDVFCGSQMHFVRNDELSQAWRIFTPLLHQIENERIKPIPYKYGSRGPKEADEMAKENNFAYYGSYKWVKP

SEQ ID NO: 17005 - DNA, 1533 bp, Nasonia vitripennis
  CDS (1)..(1533)
atgactctcaaaagtgttctgatcctctgcttcttggccactgcagccttgactgaatgctctgccttcgtcccgcattcattgagtacacggaacaattcagtgcatcatacttttgttcttctcggggcttcgggtgacctcgcaaggcgtgaaatctatccagctctttggtacctctatcgcgatggacatttgctacgaaagacagaaatattcggttacgcccggagcgccctaacgatcgctgatatcagagacagagtcgcgcccttcatccaggtgaggccccaggaagaaaagctctacaacgagttctggtcgctaaaccggtacatcaacggcagcagagatgccgataccgattacgacaggattgacaggatcgtcagcgaatccgaagaaaatgaaaccgaggctaaccggatattctatttggcgctgccgcctgcaaccttccccagcaccgcgtcccagatcaagagagcttgcatggccaaaaaaggctctaccaaagtcgtggtggagaaacctttcggtcgcgattccgaaagctccgaagaactctcggaacatctcaaagcactcttcaccgaggaccagatttaccgcatggatcacttcctcggctacgagatggtgcagaacctcctcagtctcagattcgccaatcggatgttcagtccgtcttggaacaaggataatatcgccgcgatcgaggtcgacttcaaagaaaacttcggtatcgagggtcgtggtggatacttcgatagcaacggaatgatcagagatgttatgcagaaccacctgctgcagatcgtgtcactcgttgctatggagaaaccggtatccgttgatcccgatgatatcagagatgccaaggtggaactcttgaagaaaacaaggccgattgtcctagacgatgtcgtgatcggtcagtacgtagcaaatcccgaatcggcggatccccgcgagaggatcggctacagagatgacccgaccgtaaagaacgactcgatcaccgcgacgttcgccttgaccgtcctgaaaatcgacaacgagcgctggactggtgtccccttcatcattcgcgctggcaaaggactgaatataaaccgaaccgatgtgatcatccagtacaaaaacgttgaccacgatctcttcgacggccagagtcagaggaacgagttggtcattcgtcgcgtgggaaagaccgaagctttgcaggccaagctcacctctaaaactccaggtatcacgagcgatctcgagagaatcacgattgattttgactacactaaggcgtatcccgatctgcaaaatccaggagcttacgagcgtctgcttctcgacgttttccgcggcacccagttaaactttgtgcgctccgatgagctcagcgaagcttggcgaattttcacgcctgcgcttcacgaaattgaaaacaggaagatccggcctatcgagtataaatttggcacgactggtcctgtagaagccgatgaaatggagaaaaaaaacgattttttgtaa

SEQ ID NO: 17006 - protein, 510 aa, Nasonia vitripennis
MTLKSVLILCFLATAALTECSAFVPHSLSTRNNSVHHTFVLLGASGDLARREIYPALWYLYRDGHLLRKTEIFGYARSALTIADIRDRVAPFIQVRPQEEKLYNEFWSLNRYINGSRDADTDYDRIDRIVSESEENETEANRIFYLALPPATFPSTASQIKRACMAKKGSTKVVVEKPFGRDSESSEELSEHLKALFTEDQIYRMDHFLGYEMVQNLLSLRFANRMFSPSWNKDNIAAIEVDFKENFGIEGRGGYFDSNGMIRDVMQNHLLQIVSLVAMEKPVSVDPDDIRDAKVELLKKTRPIVLDDVVIGQYVANPESADPRERIGYRDDPTVKNDSITATFALTVLKIDNERWTGVPFIIRAGKGLNINRTDVIIQYKNVDHDLFDGQSQRNELVIRRVGKTEALQAKLTSKTPGITSDLERITIDFDYTKAYPDLQNPGAYERLLLDVFRGTQLNFVRSDELSEAWRIFTPALHEIENRKIRPIEYKFGTTGPVEADEMEKKNDFL

SEQ ID NO: 17007 - DNA, 1524 bp, Magnaporthe grisea 70-15
  CDS (1)..(1524)
atggccgcagaatcccatgccgctgctgagctggagctcaaggacaacacggtcattgtggtccttggtgcctccggcgatttggccaagaagaagacttatcccgcacttttcggactctaccggaaccaatttctccccaaggacatcaagattgttggatatgccaggacaaagatggaccacgaagagtacattaggagaatcaggtcgtacattaagacgcccaccaaggacatggagcagcagctcgatgatttctgctcgctctgcacctacgtcgcgggccagtatgacaaggacgagtctttctacaacctgaacgaccacctcgaggacctcgagaagaaccagagcgaggctcacaggcttttctacatggcgctcccgcccagcgtcttcacaattgtgtcacagcatctgaagaggtgctgctaccccaccagggggattgctcgcgtcattgtcgagaagccttttggcaaggacctggccagctcccgcgagctccagaagtctctggagccagactggaaggaggatgagttgttccgcatcgatcattacctgggcaaggagatggtcaagaacatcctcatccttcgctttggaaactccttcttgggcgcgacatggaatcgtcaccacatcgacaacgtacagatcacgttcaaggagccattcggcaccgaaggtcgcggtggctactttgacgagtttggcatcattcgtgacgtaatgcagaaccacttgctgcaggttctgacactgttggccatggagcggccaatttcattctcctctgaggacattcgtgacgagaaggtccgcgttctccgtgccattcctgccatcgagcccaagaatgtcatcatcggccagtacggaaggtcgcttgacggaagcaagccgtcgtataaggaggacgacacagtgcccaaggagtcgaggtgcccgaccttctgcgcattggtagcttacatcaagaacgagcgctgggatggcgtccccttcattatgaaggcaggaaaggccttgaacgagcagaagacggagattcgtatacagttcaaggatgtcacatccggtattttcaaggatatcccccgcaacgagctcgtcatgcgtatccagcccaacgagagtgtctacatcaagatgaactcgaagctgcccggactcagcatgcagacggtggttacggagctcgatctgacttaccgccgacgcttctctgatctgaagatccctgaggcttacgaatcattgattttggactgcttgaagggtgatcactccaacttcgttcgagacgacgagctcgacgccagctggagaatcttcacacccctgctgcactatcttgatgataacaaggagattgtgcccatggagtacccctacggctcacgaggacctgccgttctcgacgattttaccgcatcatatggctacaaattcagcgacgcggctggctaccagtggcctaccactagcgccgcgctgcacgctaacaagttctga

SEQ ID NO: 17008 - protein, 507 aa, Magnaporthe grisea 70-15
MAAESHAAAELELKDNTVIVVLGASGDLAKKKTYPALFGLYRNQFLPKDIKIVGYARTKMDHEEYIRRIRSYIKTPTKDMEQQLDDFCSLCTYVAGQYDKDESFYNLNDHLEDLEKNQSEAHRLFYMALPPSVFTIVSQHLKRCCYPTRGIARVIVEKPFGKDLASSRELQKSLEPDWKEDELFRIDHYLGKEMVKNILILRFGNSFLGATWNRHHIDNVQITFKEPFGTEGRGGYFDEFGIIRDVMQNHLLQVLTLLAMERPISFSSEDIRDEKVRVLRAIPAIEPKNVIIGQYGRSLDGSKPSYKEDDTVPKESRCPTFCALVAYIKNERWDGVPFIMKAGKALNEQKTEIRIQFKDVTSGIFKDIPRNELVMRIQPNESVYIKMNSKLPGLSMQTVVTELDLTYRRRFSDLKIPEAYESLILDCLKGDHSNFVRDDELDASWRIFTPLLHYLDDNKEIVPMEYPYGSRGPAVLDDFTASYGYKFSDAAGYQWPTTSAALHANKF

SEQ ID NO: 17009 - DNA, 1494 bp, Gibberella zeae PH-1
  CDS (1)..(1494)
atggagctcaagcagaacacgacaatcgtcgtgctcggtgcttctggtgatctggcgaaaaagaagacgtaccctgcgctttttggtctttaccgaaaccagttccttcccaaggatgtcaagattgtcggatatgcccgtactaagatggatcacgacgaatatattcgacgcatcaagtcatacataaagacccctacaaaggagattgagcaacaacttgaagacttcgccgcgctttgcacctatgtctctggtcagtacgacaaggacgagtccttccagggtctcgagcagcacctccaggaggttgaagcaagccgtcctgagaaccaccgtctcttctatatggcgctcccccccagtgttttcaccattgtttctcagcacctcaagaagatctgttaccccaagaacggcatcgcgcgtgtcattgtcgagaagcctttcggcaaggatcttgccagctcccgtgagcttcaaaagtccctcgagcctgattggaacgagcaggagctgttccgaattgaccattaccttggtaaggagatggtcaagaacatcctgatccttcgatttggtaactctttcctcggcgctacgtggaaccgacaccacatcgacaacgttcagatcacattcaaggagccatttggtaccgagggacgtggaggttactttgacgagtttggtatcgttcgtgatgttatgcagaaccatcttcttcaggttctcactctcctggctatggagcgacctatttccttcaacgccgaggatattcgtgacgagaaggtccgcgtccttcgcgccatccctgctatcgagcccaagaacgtcatcatcggccagtacggcaagtctctcgacggcagcaagcccgcctatcgcgaggatgacaccgttcctcaggattcacgatgcccgactttctgcgccctggtcgcatacatcaagaacgaacgttgggacggtgtgcctttcatcatgaaggccggaaaggctctcaacgagcagaagaccgagatccgcatccagttcaaggatgttacatcgggtatctttaaggatattccccgaaacgagcttgtcatgcgtattcagcccaacgagagtgtttatatcaagatgaactccaagttgcctggtctcagcatgcaaactgttgtcaccgagcttgatttgacctaccgaagacgattctccgacctcaagatccccgaggcttacgagtcacttgtccttgactgcctcaagggtgatcagtccaactttgtccgtgatgatgaacttgatgccagttggcgcatctttacacccctgctccactacctggacgacaacaaggagattatccctatggagtatccttatggctctcgcggccctgctgtccttgacgacttcacctcgtcttatggctacaagtttagtgatgctgctggctaccaatggccaactaccaacgctgctgctgcacccaacaagttgtaa

SEQ ID NO: 17010 - protein, 497 aa, Gibberella zeae PH-1
MELKQNTTIVVLGASGDLAKKKTYPALFGLYRNQFLPKDVKIVGYARTKMDHDEYIRRIKSYIKTPTKEIEQQLEDFAALCTYVSGQYDKDESFQGLEQHLQEVEASRPENHRLFYMALPPSVFTIVSQHLKKICYPKNGIARVIVEKPFGKDLASSRELQKSLEPDWNEQELFRIDHYLGKEMVKNILILRFGNSFLGATWNRHHIDNVQITFKEPFGTEGRGGYFDEFGIVRDVMQNHLLQVLTLLAMERPISFNAEDIRDEKVRVLRAIPAIEPKNVIIGQYGKSLDGSKPAYREDDTVPQDSRCPTFCALVAYIKNERWDGVPFIMKAGKALNEQKTEIRIQFKDVTSGIFKDIPRNELVMRIQPNESVYIKMNSKLPGLSMQTVVTELDLTYRRRFSDLKIPEAYESLVLDCLKGDQSNFVRDDELDASWRIFTPLLHYLDDNKEIIPMEYPYGSRGPAVLDDFTSSYGYKFSDAAGYQWPTTNAAAAPNKL

SEQ ID NO: 17011 - DNA, 1503 bp, Candida glabrata CBS 138
  CDS (1)..(1503)
atgtcagaacctgttaagtttgagaagaataccgttgttgtggtgtttggtgcttctggtgatttggccaagaagaagactttcccagctttgtttggtttgttcagagaaggatacctgcacgaatccaccaagattatcggttatgcgcgttccagtcttaccgttgaggaattgactgagcgtatcaagcctcacttgaagactccaaggggtaaggaggacgaggccaagattccacagttcttcaagctgctgacctatgtctccggtccttacgaccaggacgacggtttcatccgcttgcgtgagcagattgagaccttcgaaggtgccaagtgctccaccgtgccacacagactgttctacttcgctttgccaccaagcgtgttcttgccagtcgccaccaacattaagcgtctggtgtacgccgaaaacggtgtcactagactgatcgtggagaagccatttggtagagatctagagaccgctagaaagctacaagccgacttgagtccattgttcaaagaagaagaaatctacagaattgaccattacttgggtaaggaattggtcaagaacttgctagtcatgagattcggtaaccagttcttgaacagtgcttggaacagagacaacatccaatccattcagatctccttcaaagaacctttcggtaccgagggccgtggtggttacttcgataacatcggtatcataagagacgtcatgcaaaaccacttgttgcaagtgttgactttgttgaccatggagagacctgtctccttcgacccagaagccatccgtgacgagaaggttaaggtcctaaaagctatggctccattcgaccctaaggacatcttgatcggtcaatacggtaagtccgaagatggctctaagccagcttacttggatgacgaaaccgttaagccaggctccaagtgtgtcaccttcgccgccatcgccttccaaatcgaaaacgaacgttgggaaggtgttccaatcgttatgagagctggtaaagctcttaacgagggtaaagtagaaatcagactgcaatacaaggctgtcgcttccggtgtattcaagaacatcccacacaacgaattggttatcagaattcaaccaaatgaagccgtttacatgaaattcaacgccaagacaccaggtctgtcaaacgctactcaagtcactgacctagacttgacttactcttccagatacaaggacttctggatcccagaagcttacgaagctttgatcagagatgctctattgggtgaccactctaatttcgttagagatgatgagcttgatgtcagttggagtttattcacacctctattgaactacctagaaggaccagatgctcctcaaccagaaatatatccatacggttcaagaggtccaagcggtctaagggactacttgaagaagcacaattacatgatcgaggaaaagcacccatacacttggccagtcaccactccagatgaggattaa

SEQ ID NO: 17012 - protein, 500 aa, Candida glabrata CBS 138
MSEPVKFEKNTVVVVFGASGDLAKKKTFPALFGLFREGYLHESTKIIGYARSSLTVEELTERIKPHLKTPRGKEDEAKIPQFFKLLTYVSGPYDQDDGFIRLREQIETFEGAKCSTVPHRLFYFALPPSVFLPVATNIKRLVYAENGVTRLIVEKPFGRDLETARKLQADLSPLFKEEEIYRIDHYLGKELVKNLLVMRFGNQFLNSAWNRDNIQSIQISFKEPFGTEGRGGYFDNIGIIRDVMQNHLLQVLTLLTMERPVSFDPEAIRDEKVKVLKAMAPFDPKDILIGQYGKSEDGSKPAYLDDETVKPGSKCVTFAAIAFQIENERWEGVPIVMRAGKALNEGKVEIRLQYKAVASGVFKNIPHNELVIRIQPNEAVYMKFNAKTPGLSNATQVTDLDLTYSSRYKDFWIPEAYEALIRDALLGDHSNFVRDDELDVSWSLFTPLLNYLEGPDAPQPEIYPYGSRGPSGLRDYLKKHNYMIEEKHPYTWPVTTPDED

SEQ ID NO: 17013 - DNA, 1509 bp, Debaryomyces hansenii CBS767
  CDS (1)..(1509)
atgtcagtagaaccatttggtaaacacgttaccattgtcgtctttggggcctctggtgatttagctaagaagaagacgttcccagcattatttggattattccgtgaaggagaattgccatcaacgatcaaggtgattgggtatgcaagatcagaattatcagatgctgactttaaggaaagaatatcagccaatttcaagggcgttaatgatagtaacaagcataaggtcgacgaattcttgaacttgtgttcttatactcaaggtcaatacgattccgcagaaggttttaaaaagttgaatgaggagatggaaaagtatgaaaaagattccggtgttgacaaacctgaaagattgttctacttggctttacctccatcggtattcgtcactgttgcaagtcatataaaggaaaatgcctacaccaaaactggtgaggttagattaattgtcgaaaagccgtttggtaatgacttggaatcttctaggaagttgcaaaagagcttggccccattgttcacagaagaagaattgtatagaattgaccactacttaggaaaggaaatggttaagaacttggtatttttaagatttagtaatgaatttcttaacgcttcatggaacaaaaaccacatcaagtcgatccagatatctttcaaggaagcttttggtactgaaggtagaggtggttatttcgatgatattggaattgttagagatgtcatgcaaaaccatttgttgcaagttttgactttgttaactatggaaagaccagtctctattgaccctgaagctatcagagatgaaaaggtcaaggtcttgaaagcatttggtgaactcgaaactgatgacatcttattgggacaatatactaagtccgaagatggaaccaaaccaggttacttagatgatgacactgttaaaggtgactccaagtgtgttacatatgctgcacttggtatgcaaatccacaatgaaagatgggaaggtgttccaattgttatgagagctggtaaggctttgaaagaatctaaggttgaaattagaattcaattcaaggaagtggctaagggtatgttcaatgacattcaaagaaatgaattagttatgagaattcaaccaaatgaagccgtctatatgaaaatcaattctaagatcccaggtatttctgctgttccttctgttaccgacttggatttaacatactcatctagatactctaaggaattttggatcccagaggcttacgaatcattaattagagactgttacttaggtaaccatgctaatttcgtcagagacgatgaattggatctttcatggaagttgttcactccattgttacagcacatcgaatcaaaggatggcccaacacctgaaccttatccttatggttctaacggtccaaagaatttgagacctttcttatctgatcacggttataacttctacgatgaaggcacttatgaatggcctttaaccaccccaaatgttaagggtaaaatgtaa

SEQ ID NO: 17014 - protein, 502 aa, Debaryomyces hansenii CBS767
MSVEPFGKHVTIVVFGASGDLAKKKTFPALFGLFREGELPSTIKVIGYARSELSDADFKERISANFKGVNDSNKHKVDEFLNLCSYTQGQYDSAEGFKKLNEEMEKYEKDSGVDKPERLFYLALPPSVFVTVASHIKENAYTKTGEVRLIVEKPFGNDLESSRKLQKSLAPLFTEEELYRIDHYLGKEMVKNLVFLRFSNEFLNASWNKNHIKSIQISFKEAFGTEGRGGYFDDIGIVRDVMQNHLLQVLTLLTMERPVSIDPEAIRDEKVKVLKAFGELETDDILLGQYTKSEDGTKPGYLDDDTVKGDSKCVTYAALGMQIHNERWEGVPIVMRAGKALKESKVEIRIQFKEVAKGMFNDIQRNELVMRIQPNEAVYMKINSKIPGISAVPSVTDLDLTYSSRYSKEFWIPEAYESLIRDCYLGNHANFVRDDELDLSWKLFTPLLQHIESKDGPTPEPYPYGSNGPKNLRPFLSDHGYNFYDEGTYEWPLTTPNVKGKM

SEQ ID NO: 17015 - DNA, 1497 bp, Yarrowia lipolytica CLIB122
  CDS (1)..(1497)
atgactggcaccttacccaagttcggcgacggaaccaccattgtggttcttggagcctccggcgacctcgctaagaagaagaccttccccgccctcttcggcctttaccgaaacggcctgctgcccaaaaatgttgaaatcatcggctacgcacggtcgaaaatgactcaggaggagtaccacgagcgaatcagccactacttcaagacccccgacgaccagtccaaggagcaggccaagaagttccttgagaacacctgctacgtccagggcccttacgacggtgccgagggctaccagcgactgaatgaaaagattgaggagtttgagaagaagaagcccgagccccactaccgtcttttctacctggctctgccccccagcgtcttccttgaggctgccaacggtctgaagaagtatgtctaccccggcgagggcaaggcccgaatcatcatcgagaagccctttggccacgacctggcctcgtcacgagagctccaggacggccttgctcctctctggaaggagtctgagatcttccgaatcgaccactacctcggaaaggagatggtcaagaacctcaacattctgcgatttggcaaccagttcctgtccgccgtgtgggacaagaacaccatttccaacgtccagatctccttcaaggagccctttggcactgagggccgaggtggatacttcaacgacattggaatcatccgagacgttattcagaaccatctgttgcaggttctgtccattctagccatggagcgacccgtcactttcggcgccgaggacattcgagatgagaaggtcaaggtgctccgatgtgtcgacattctcaacattgacgacgtcattctcggccagtacggcccctctgaagacggaaagaagcccggatacaccgatgacgatggcgttcccgatgactcccgagctgtgacctttgctgctctccatctccagatccacaacgacagatgggagggtgttcctttcatcctccgagccggtaaggctctggacgagggcaaggtcgagatccgagtgcagttccgagacgtgaccaagggcgttgtggaccatctgcctcgaaatgagctcgtcatccgaatccagccctccgagtccatctacatgaagatgaactccaagctgcctggccttactgccaagaacattgtcaccgacctggatctgacctacaaccgacgatactcggacgtgcgaatccctgaggcttacgagtctctcattctggactgcctcaagggtgaccacaccaactttgtgcgaaacgacgagctggacatttcctggaagattttcaccgatctgctgcacaagattgacgaggacaagagcattgtgcccgagaagtacgcctacggctctcgtggccccgagcgactcaagcagtggctccgagaccgaggctacgtgcgaaacggcaccgagctgtaccaatggcctgtcaccaagggctcctcgtga

SEQ ID NO: 17016 - protein, 498 aa, Yarrowia lipolytica CLIB122
MTGTLPKFGDGTTIVVLGASGDLAKKKTFPALFGLYRNGLLPKNVEIIGYARSKMTQEEYHERISHYFKTPDDQSKEQAKKFLENTCYVQGPYDGAEGYQRLNEKIEEFEKKKPEPHYRLFYLALPPSVFLEAANGLKKYVYPGEGKARIIIEKPFGHDLASSRELQDGLAPLWKESEIFRIDHYLGKEMVKNLNILRFGNQFLSAVWDKNTISNVQISFKEPFGTEGRGGYFNDIGIIRDVIQNHLLQVLSILAMERPVTFGAEDIRDEKVKVLRCVDILNIDDVILGQYGPSEDGKKPGYTDDDGVPDDSRAVTFAALHLQIHNDRWEGVPFILRAGKALDEGKVEIRVQFRDVTKGVVDHLPRNELVIRIQPSESIYMKMNSKLPGLTAKNIVTDLDLTYNRRYSDVRIPEAYESLILDCLKGDHTNFVRNDELDISWKIFTDLLHKIDEDKSIVPEKYAYGSRGPERLKQWLRDRGYVRNGTELYQWPVTKGSS

SEQ ID NO: 17017 - DNA, 1524 bp, Candida albicans SC5314
  CDS (1)..(1524): transl_table=12
atgtcatttgattcatttggagattatgctaccattgttgtttttggtgcttcaggagatttagctaaaaagaaaacctttccagcattatttggattatttagagaaaaacaattaccatcaacggttcaaatcattggttatgctagatcacatttagaagatgaagaatttaaacaaagaatttctgaacattttaaaggtggtgatgaaaaaactaaaactgaatttttaaaacttgtttcatatattagtggaccttatgatactgatgaaggttataaaaaattagaatcaagatgtcaagaatatgaaaaggccaataaagataaaaatgatagttatactcccgaaagattattttatttggcattaccaccatcagtgttcactactgtttgtgaaaaagttaaaaaaaatgtttatccaccagaagaaagtaaaggtaaacttagaattattattgaaaaaccttttggacgtgatttagatacttatcgtgaaatgcaaaaagaaatttccccattatttactgaagatgaaatttatagaattgatcattatttaggtaaagaaatggtgaaaaatttattggttttacgatttggtaatgaattatttagtggagtttggaataataaacatatttcttcaattcaagtttcatttaaagaagcttttggtactgaaggtagaggtggttattttgataccattggaatcattagagatgttatgcaaaatcatttattacaagttttaactttattaaccatggaaagaccagtttcatttgatcctgaagccgttagagatgaaaaagttaaagttttaaaagcatttgatgctattgatattaatgacgttatattgggtcaatatactaaatctgaagatggtaaaaaaccaggttatttagatgataaaaccgttaatccggattctaaagctgttacttatgctgctttccgtgtaaacattcataatgaaagatgggatggagttccaattgttttacgtgctggtaaagctttagatgaaagtaaagttgaaattagaattcaatttaaaccagtcgccaaggggatgtttaaagaaattcaaagaaatgaattagttattagagtacaaccaaatgaagccatttatttaaaaattaattccaaaatccctggaatttctactgaaacttcattaactgatttagatttaacttatgctactcgttattctaaagatttttggattcctgaagcttatgaagcattaattagagattgttatttaggtaatcattctaattttgttagagatgatgaattggatgtttcttggaaattatttactccattattgaatgccgttgaagatccagctaaaaaaattgaattacaatattatccttatggttcaaaaggtccaaaagatttaagaaaatatttgaatgaacatggttatatatttagtgatccaggtacttatcaatggccattaactagtcctaacgttaaagggaagatttag

SEQ ID NO: 17018 - protein, 507 aa, Candida albicans SC5314
MSFDSFGDYATIVVFGASGDLAKKKTFPALFGLFREKQLPSTVQIIGYARSHLEDEEFKQRISEHFKGGDEKTKTEFLKLVSYISGPYDTDEGYKKLESRCQEYEKANKDKNDSYTPERLFYLALPPSVFTTVCEKVKKNVYPPEESKGKLRIIIEKPFGRDLDTYREMQKEISPLFTEDEIYRIDHYLGKEMVKNLLVLRFGNELFSGVWNNKHISSIQVSFKEAFGTEGRGGYFDTIGIIRDVMQNHLLQVLTLLTMERPVSFDPEAVRDEKVKVLKAFDAIDINDVILGQYTKSEDGKKPGYLDDKTVNPDSKAVTYAAFRVNIHNERWDGVPIVLRAGKALDESKVEIRIQFKPVAKGMFKEIQRNELVIRVQPNEAIYLKINSKIPGISTETSLTDLDLTYATRYSKDFWIPEAYEALIRDCYLGNHSNFVRDDELDVSWKLFTPLLNAVEDPAKKIELQYYPYGSKGPKDLRKYLNEHGYIFSDPGTYQWPLTSPNVKGKI

SEQ ID NO: 17019 - DNA, 1509 bp, Ustilago maydis 521
  CDS (1)..(1509)
atgcctgcctccaacgcccccgctttcgacaatgacactatcatcgtagtccttggcgcctcaggagatctggcaaagaagaagacgttcccagcgctctttaacctcttccgcctcggcctgctgccccaggccactcacattatcggatatgcacgaacaaagatggaaagggatgcgtttgccgaaaaggtcacaagtcacctcaaaaacgtcgacgatgaccagggaaagaaggacatccacaactttctcgaaatttgccaatacatctcgggtcagtacgacgaagacgcctcgttccagaatctcaacaaggagatggagcgcatcgaggctgaaatgaagcacgactcgcccagccgcctcttctacatggcgttgccgcccaacgtcttcaccgtcgtcgcaaagggtctcaagaagaactgctactcacaaaagggtcacaaccgaatcgtcatcgaaaagccctttggcaaggacctcgagagcagccgagagatgattggcgcgctcaagggtctgtggaaagaggacgagactttccgcatcgaccactacctcggaaaggagatggtcaagaacctgcttatcatgcgctttggcaaccctttcatcgatgccggccttaacaacaagctggtcgacaatgtccaaatcacctttaaggagcctttcggtaccgagggccgtggtggctactttgacgagtttggtatcatccgcgacatccagcagaaccacttgtcccaggtgctctctctgctcgccatggagcgacccaagtcgttctcggcagaggacatccgcgacgaaaaggtcaaagtgctcaagtcggtacctgccatcgagccaaaggacgtgcttatcggccagtacactgccgccaacggcaagccaggctacaaggatgacgagacggtgcccaaggacagcaactgtcccacctttgctgccttggcgctatttgtcaacaacgagcgctggaagggtgttccttttatcctcaaggcgggcaaggcactagatgaggccaaggtggtgattcgtatccagttcaaagacacgccagaaggcctcttcaacgatgttccgcgcaacgagctggtcatccgcatccagcccgacgaggcggtctacttcaagatgaacgccaagaagcctggcctcgagatggctacgcttcccgccgacttggacctcacctacaaggagcgcttctcccaggtgcgcatccccgaagcgtacgaggctctcatcttggacgcgctcaacggcgaccactcaaactttgtgcgagacgacgagctggaagtgtcgtgggccatcttcacgcctctgctgcacgccatcgatgcgggcaagatcaagaacgagccgtacgaatatggcagccgtggacctgcttcgctcaacgaattcaccgaacgctacggctacaagcgcaccaacgaatcgtacgaatggcccaccaccaacgtcaacaaggtgcaaggaaaaatgtag

SEQ ID NO: 17020 - protein, 502 aa, Ustilago maydis 521
MPASNAPAFDNDTIIVVLGASGDLAKKKTFPALFNLFRLGLLPQATHIIGYARTKMERDAFAEKVTSHLKNVDDDQGKKDIHNFLEICQYISGQYDEDASFQNLNKEMERIEAEMKHDSPSRLFYMALPPNVFTVVAKGLKKNCYSQKGHNRIVIEKPFGKDLESSREMIGALKGLWKEDETFRIDHYLGKEMVKNLLIMRFGNPFIDAGLNNKLVDNVQITFKEPFGTEGRGGYFDEFGIIRDIQQNHLSQVLSLLAMERPKSFSAEDIRDEKVKVLKSVPAIEPKDVLIGQYTAANGKPGYKDDETVPKDSNCPTFAALALFVNNERWKGVPFILKAGKALDEAKVVIRIQFKDTPEGLFNDVPRNELVIRIQPDEAVYFKMNAKKPGLEMATLPADLDLTYKERFSQVRIPEAYEALILDALNGDHSNFVRDDELEVSWAIFTPLLHAIDAGKIKNEPYEYGSRGPASLNEFTERYGYKRTNESYEWPTTNVNKVQGKM

SEQ ID NO: 17021 - DNA, 1515 bp, Cryptococcus neoformans var. neoformans B-3501A
  CDS (1)..(1515)
atggcggcgccttctaacaacaaatcaggcaccattccttccatggaggcatccggcgaagctcttacagacgagactgtcgttatcgtgctcggtgctagtggtgatcttgccaaaaagaagaccttccctgccctttttgcccttttcactcagggccttttgcctaaggatgttcatattgttggatatgcgagaaccaagatggataaggatgagttccacaggcgcgaaattcaatacatcaagggcgatcaggaaaagatcaagcaattccaagaactttcttcttacgtatcgggcccttacgacgaggatgctggttataaagagcttctcaagcatgtggaggagcttgaacgcgataggaaaacccgtaaccgcattttctacatggctcttcccccttcagtttttactaccgttgccaagggcctcaagaagaactgttactcttctcaaggtaccaatcgtatcatcattgaaaagccattcggcaaggatctcgagtcatgccgccagatgatgagtgaactcaagtcccagtgggcggaaaacgaaacctaccgtatcgatcactacctcggcaaagagatggtcaagaacctacttgttctccgctttggcaatgtcttcctcgatgcttctttcaacaaaaattttgtcagcaacgttcagatcaccttcaaagagcctttcggcaccgagggtcgtggaggatactttgacgaatttggaattattcgcgatgtttgccaaaaccatctcatgcaagctttgtcgatacttgctatggaacgacctgtttctttttctgctgaggatatcagggatgagaaggtcaaggttctccgctgcatccctgctattgaccgcaaggacgttcttttcggtcaatatgtcgccgctggggacaagccaggctatcttgaagatgataccgtacccaaagactctatctgtcccacatttgccgccatgactttgtggattaacaacccgcgatgggaaggtgttcctttcatcatgaaggcaggaaaagctttgaacgaggccaaagtcgaaattcgtgtgcagtacaaagatgctacgcagggtattttcaccgatatctctcgggacgagcttgtgatgcgcattcaacccgatgaagctgtatacctcaaaatgaacaacaagcttcctgggttccacacgcgtgctgttcctgttgaacttgacctcacctataagaagcgattcacggacgccaacattcctcaggcgtacgaagctctcattctcgatgctctcaagggcgatcactcgaactttgttcgtgatgacgagctggatgtcgcttggaagatcttcacccccattcttcattggatcgacagtaaagatgcgcctaagccggagccgtacccctatggttcccgaggacccaaacaaatcgatgaattcgctgccaagtatggattcaagcgcagcccgcagacttattcctggcctaagacatctgcaagtctttga

SEQ ID NO: 17022 - protein, 504 aa, Cryptococcus neoformans var. neoformans B-3501A
MAAPSNNKSGTIPSMEASGEALTDETVVIVLGASGDLAKKKTFPALFALFTQGLLPKDVHIVGYARTKMDKDEFHRREIQYIKGDQEKIKQFQELSSYVSGPYDEDAGYKELLKHVEELERDRKTRNRIFYMALPPSVFTTVAKGLKKNCYSSQGTNRIIIEKPFGKDLESCRQMMSELKSQWAENETYRIDHYLGKEMVKNLLVLRFGNVFLDASFNKNFVSNVQITFKEPFGTEGRGGYFDEFGIIRDVCQNHLMQALSILAMERPVSFSAEDIRDEKVKVLRCIPAIDRKDVLFGQYVAAGDKPGYLEDDTVPKDSICPTFAAMTLWINNPRWEGVPFIMKAGKALNEAKVEIRVQYKDATQGIFTDISRDELVMRIQPDEAVYLKMNNKLPGFHTRAVPVELDLTYKKRFTDANIPQAYEALILDALKGDHSNFVRDDELDVAWKIFTPILHWIDSKDAPKPEPYPYGSRGPKQIDEFAAKYGFKRSPQTYSWPKTSASL

SEQ ID NO: 17023 - DNA, 1578 bp, Tribolium castaneum
  CDS (1)..(1578)
atgccgctgctaaaaatagacgacgatgatgctgccaattcagaggtttgtttggccctttaccggaagtctctcaaatccaaagaaatggaccacggagggacccacttcgatgggcaccacccccacgtctttataaccctcggagcttcgggagacttagcccggaagaaaatctaccccacgttgtggtggctgtaccgggacaacctcctgccggtcaatacagtattcttcggctacgcccgaagcaagacgtcagtccaggaaatcaaggaaaaatgcaagccatacatgaaggtgaggcacggagaggaagagcgctttgaggacttctggaagttgcactattacgtcgctgggtcgtacgactccaggaccgacttcgagcgcctcaaccaggagctgtgcccctttgagaaagggccggccgccaacagggtcttctacttggcgctgccgccgtcggtgtttgagaccgtaaccgttcatatccgaaattcgtgcatggccccaaaaggctggacaaggatcattattgagaaaccgttcggtcgcgatttcgactcctcgcaaaaactgtcgaaccacttgggctctctcttcaccgagcagcaaatctaccggatagaccactatctgggcaaggaaatggtgcaaaacctcatgaccctgaggttcggcaatcgcattttcaacccgacctggaaccgcgacaacatcgcctcgatccagatcagtttcaaggaaccctttggcacgcaaggccgcggggggtatttcgacgagttcggtattatccgggacatcatgcaaaaccacctcctccaaatactgacgcttgccgcgatggagaaaccggcgtcagtccaccctgacgatataagaaacgagaaagtgaaagtcttgcgctgcatcaaagtgattgagaaaaaggacgtggttctgggccagtacgtcggggaccccaacggggagggcgaagccaaactgggctatctggacgacccgaccgtccccaacgattcagtgacccccacctacgccttggccgcgctccatatcaacaacgagcgctgggacggggtccccttcattcttaaatgtggcaaagctttgaatgaacggaaggccgaagtccgcatccaattcaaggacgttcctggggacatcttcgacggaaagccgaaacgtaacgaactggtcatcagggtgcagcctggcgaagccttgtatgtgaaattgatggtgaaaacgccgggcatggccttcgatatggaggagacggaactcgatctgacttacggacacagatacgcgaatgttaaattgcccgacgcttacgaacggttgattttggacgtattctgcggctcgcaaatgcatttcgtccgctcggacgagctaagcgaggcttggaggatcttcactccacttttgcaccaaattgaaagcgagagagttaaaccaatcccctacgtgtatgggagccgtgggcctaaggaggccgacgaaatgttgctaaacaacaacttcacttacacaggctcgtacaaatggcccgcccccaaaatgtga

SEQ ID NO: 17024 - protein, 525 aa, Tribolium castaneum
MPLLKIDDDDAANSEVCLALYRKSLKSKEMDHGGTHFDGHHPHVFITLGASGDLARKKIYPTLWWLYRDNLLPVNTVFFGYARSKTSVQEIKEKCKPYMKVRHGEEERFEDFWKLHYYVAGSYDSRTDFERLNQELCPFEKGPAANRVFYLALPPSVFETVTVHIRNSCMAPKGWTRIIIEKPFGRDFDSSQKLSNHLGSLFTEQQIYRIDHYLGKEMVQNLMTLRFGNRIFNPTWNRDNIASIQISFKEPFGTQGRGGYFDEFGIIRDIMQNHLLQILTLAAMEKPASVHPDDIRNEKVKVLRCIKVIEKKDVVLGQYVGDPNGEGEAKLGYLDDPTVPNDSVTPTYALAALHINNERWDGVPFILKCGKALNERKAEVRIQFKDVPGDIFDGKPKRNELVIRVQPGEALYVKLMVKTPGMAFDMEETELDLTYGHRYANVKLPDAYERLILDVFCGSQMHFVRSDELSEAWRIFTPLLHQIESERVKPIPYVYGSRGPKEADEMLLNNNFTYTGSYKWPAPKM

SEQ ID NO: 17025 - DNA, 1524 bp, Prochlorococcus marinus str. MIT 9301
  CDS (1)..(1524): transl_table=11
atgccttcaactttaagtaatcctctaagattaggcttacggcaggaaagagtcatatctccacaatgcttggtaatatttggtgctagtggagaccttactcatagaaaattaataccagccttatttgaactctatttacaaagaagaattcctagtgaatttggaatagttggttgtgcgagaagaccttggactgataatgagtttagagaaaagatgaaagtaaagctatcaaataaaatatctggtaaagaaacggagtgggaacaattttctaattaccttttctatgaacctgttgacttacaacaaagtgatcatgtcgtaaggctttctaaaagattaaatgaaattgataaaaaacaagctactcatggtaatagaacattttatttatcagtatctccgaatttctatgcaagtggatgtaaagctcttaaagaagctggccttttagatgaccccaagaaaagtcgtttagtgattgaaaaaccttttggaagagattattcaagtgcaaaaaaattgaataaaatcgtccaaagttgtgctgaagaaaatcagatttataggatcgatcattatttaggtaaagagacagttcaaaatattcttgttttgaggtttgctaacactatttttgaaccaatttggaacagaaattatatatcaagtgttcaaattacttcatctgaaacagtgggtgttgaagatagggcaggttattacgaaagctcaggtgctttaagggatatgcttcaaaaccatatgacacaaatgcttgctgttactgctatggaacctcctgggaagtttgagccagaagcaataagaaatgaaaaagctaaggttcttcaagcttcaaaacttgctgacgaaaatgaaccgtggaattgttgcataagaggtcaatatggagagggagggaatatttcaaatcaactgaaaggatataggcaggaagatggtgttaattccaatagcacaacagaaacttatatcgcgacaaaagttttcgttgataactggcgttggcaaggtgttccattttatttgagaacaggtaaaagactgcctaaaagacttggagaaatagtcttgacttttaaagacgttcctgttcatttatttgaatcaacaataataaatcctgccccaaatcaacttatccttagaattcagccaaatgaaggggcgactttcaagtttgaggtaaaatctccaggttctggaatgaaatcaagacctgttgaaatggaattttcttatgatgaatcatttggagaaccatcagatgaaggctatgtaagattattagcggatgcaatgctttctgacccaactttatttactcgaagcgatgaagtagaggcagcctggaaactttataccccattaatagaattgatggataattctccttggaagttacctatttataattatgaatccatgacgtggggacctcctgaatctgatcaattactctcaaaagataatattttctggcgtagaccttaa

SEQ ID NO: 17026 - protein, 507 aa, Prochlorococcus marinus str. MIT 9301
MPSTLSNPLRLGLRQERVISPQCLVIFGASGDLTHRKLIPALFELYLQRRIPSEFGIVGCARRPWTDNEFREKMKVKLSNKISGKETEWEQFSNYLFYEPVDLQQSDHVVRLSKRLNEIDKKQATHGNRTFYLSVSPNFYASGCKALKEAGLLDDPKKSRLVIEKPFGRDYSSAKKLNKIVQSCAEENQIYRIDHYLGKETVQNILVLRFANTIFEPIWNRNYISSVQITSSETVGVEDRAGYYESSGALRDMLQNHMTQMLAVTAMEPPGKFEPEAIRNEKAKVLQASKLADENEPWNCCIRGQYGEGGNISNQLKGYRQEDGVNSNSTTETYIATKVFVDNWRWQGVPFYLRTGKRLPKRLGEIVLTFKDVPVHLFESTIINPAPNQLILRIQPNEGATFKFEVKSPGSGMKSRPVEMEFSYDESFGEPSDEGYVRLLADAMLSDPTLFTRSDEVEAAWKLYTPLIELMDNSPWKLPIYNYESMTWGPPESDQLLSKDNIFWRRP

SEQ ID NO: 17027 - DNA, 1470 bp, Herminiimonas arsenicoxydans
  CDS (1)..(1470): transl_table=11
atggctcttaccgattttgatcttgtcctgtttggcggcggcggcgatttgtcgatgcgcaaactgatcccggcaatgtatgcacgcgaccgcgcaggcgatttgccggccaccgcgcaaatcatctgcatcggccgtcaaaactggaacgatgccgaattcgtccaggcactgaacgaaaatgcacggcagcacatcaatgaaaaagtgttcgcacaagcgtcctgggacaagttctgcgcccgcgtgcgctatgtctcgctggacgccaccgatgccgccacttaccagccgctcaacgatgtactgcgcagcgataccaacatcacacgcgtgttttatctggcgacaccgcctacgctgtttgccaggatttgccacaatctgtcggcacgcggactggccaccgaacattcgcgcgtcgtgctggaaaaaccgctgggtcgcgacctcgccagcgcaaaggaaatcaatctggaggtcggtcaggtcttcaaggaatcgcaaattttccgcatcgaccattacctcggcaaggaagcggtgcagaatctgctcgctctgcgcttcggcaatgtgctgtttgaaccgctgtggcggcgcgaatggatttccgacgtgcagatcacgattgccgaagaaatcggcgtcggcaatcgcatgggttattacgaaacctccggtgcactgcgcgacatgctgcaaaaccatttgctgcaattgctgtgtatcgtcgccatggaaccgccgctgtccgtctctgccgatgcagtgcgcgatgaaaagctcaaggtcctgcgttcgctcaaaccgttcacgccgaccacgctggccaggaatatcgtgcgcggccagtatcgcgccggccatgtcgaaggcaaggcagtgccggcctaccggcaggaaaaaaatgccaacccggagtcaaataccgaaaccttcgtggccgtcaaagccgagatcgatacctggcgctgggccggtgtgccgttctatctgcgtaccggcaaacgcatggccgatcagctggccgagatcgtggtgcgtttcaaggcaattccgcattctatttttacgcaatcgaatagcagctttcagccgaactgcctggtgatccgtctgcagccggacgacggcctgcaattaaatctgatggccaaaacgccaggcgacggcatgcgcctgaagccggtcgaactcgaactggatttcgccgaaaccttcaaggcgccgcgcatggatgcctatgaacgcctgctgctggatgtattgcgcggccaactgaccttgttcatgcgcagcgacgaactggaagcagcgtgggaatgggtggaacccgtactgcgctactgggagcacgagggcaatgaaccgatgccgtatacatccggcacctggggccccgccgcagccagcgccctgatcgggcgcgatggcttgcaatggcgcgaagaagcgttgccggaatag

SEQ ID NO: 17028 - protein, 489 aa, Herminiimonas arsenicoxydans
MALTDFDLVLFGGGGDLSMRKLIPAMYARDRAGDLPATAQIICIGRQNWNDAEFVQALNENARQHINEKVFAQASWDKFCARVRYVSLDATDAATYQPLNDVLRSDTNITRVFYLATPPTLFARICHNLSARGLATEHSRVVLEKPLGRDLASAKEINLEVGQVFKESQIFRIDHYLGKEAVQNLLALRFGNVLFEPLWRREWISDVQITIAEEIGVGNRMGYYETSGALRDMLQNHLLQLLCIVAMEPPLSVSADAVRDEKLKVLRSLKPFTPTTLARNIVRGQYRAGHVEGKAVPAYRQEKNANPESNTETFVAVKAEIDTWRWAGVPFYLRTGKRMADQLAEIVVRFKAIPHSIFTQSNSSFQPNCLVIRLQPDDGLQLNLMAKTPGDGMRLKPVELELDFAETFKAPRMDAYERLLLDVLRGQLTLFMRSDELEAAWEWVEPVLRYWEHEGNEPMPYTSGTWGPAAASALIGRDGLQWREEALPE

SEQ ID NO: 17029 - DNA, 1470 bp, Dichelobacter nodosus VCS1703A
  CDS (1)..(1470): transl_table=11
atgagttgttcacaagaaccttttgatttattgatttttggcggcaccggcgatttagccatgcgcaaattattaccttctttatttcaagcgcatcatgccggcgcgttgcatgaaaatggtcacatttgggggatttcgcggcgggcgttgagttgcgaagattaccgttctttggtgaagaaaaatctgcaaatatttgttcccgaaattgcggcgttgccggaagcggcgattcattcttttttgcaacgtttaaattttatttcatgcgatgcttttcagcaggaagatttccgattactcgctgatgcgattcatttttcgccggaaaaagtcttaattgcttatttggcgacttcaccgcatattttcgagcacatttgcttaaatttagcggcggtgggactcaatcatcagcgcgcgcgcattgttttagaaaaacctttgggcgtagatttggcgtcaaatcaggcgattaatcaatcggttgcgaagttttttgatgaatcgcaaatttatcgcattgatcattatcaaggtaaagaatcggtgcaaaatttgctgatgatgcgttttgccaacgttttgtttgaaccgcaatggcggcgtgaatggattgatcatgtgcaaattacgattgccgaaagtgttggcgttggcgcgcgtggtgcgttttatgatgatatcggcgcgttgcgcgatatggtgcaaaaccatttattgcaattgttatgcatgattgcgatggaaccgccggcttctttgtcgccgctcgccgtgcgtaatgaaaaattaaaagtattgcaagcgctaaaaccgtttaccgccgaaagtgttgccacagatgtggtgcgcggacaatatgccggcggcgttatcgacggcgaagcggtatgtggttttcatgaagaattggatattgccaaacacagtcaaacggaaacatttgtggcgctgcgcacggaaattcaaaattggcgttgggcgggcgtgcctttttttctgcggacgggaaaacgtatggcaaaacgttccgcggcaattgtaattcaatttcgtaatgtgccgcatcatttatatccgaattctgtgcataaaatgagcggtaatcgtttggtgattcatttgcagccggaagatagcgtgcggcttcatttatatgcgaaatgccctggaaatacggtgacgctcaaacccgtttctttggatttggattttgatcggcattttaatgagcgccgcgctgatgcgtatgaacggttgttattggacgtgattcaaggcgatcaaacgttattcgtgcgccgcgatgagcaggaagaagcttggcgctgggtggcgccgattattgaggcgtgggaaaaagatccgttaccgccaaaatcttatgctgcgggttcttgggggcctgatgctgctgatgaattgttggcgcgcgatggtttacgttggtatggagaggaataa

SEQ ID NO: 17030 - protein, 489 aa, Dichelobacter nodosus VCS1703A
MSCSQEPFDLLIFGGTGDLAMRKLLPSLFQAHHAGALHENGHIWGISRRALSCEDYRSLVKKNLQIFVPEIAALPEAAIHSFLQRLNFISCDAFQQEDFRLLADAIHFSPEKVLIAYLATSPHIFEHICLNLAAVGLNHQRARIVLEKPLGVDLASNQAINQSVAKFFDESQIYRIDHYQGKESVQNLLMMRFANVLFEPQWRREWIDHVQITIAESVGVGARGAFYDDIGALRDMVQNHLLQLLCMIAMEPPASLSPLAVRNEKLKVLQALKPFTAESVATDVVRGQYAGGVIDGEAVCGFHEELDIAKHSQTETFVALRTEIQNWRWAGVPFFLRTGKRMAKRSAAIVIQFRNVPHHLYPNSVHKMSGNRLVIHLQPEDSVRLHLYAKCPGNTVTLKPVSLDLDFDRHFNERRADAYERLLLDVIQGDQTLFVRRDEQEEAWRWVAPIIEAWEKDPLPPKSYAAGSWGPDAADELLARDGLRWYGEE

SEQ ID NO: 17031 - DNA, 1551 bp, Candidatus Protochlamydia amoebophila UWE25
  CDS (1)..(1551): transl_table=11
atgcataactcgcattattttgttaatcctttgaacgaaccgaatcggcccataaaaattccagaatcttgtattttagtcatttttggagcgaccggtgatttaacagctcgtaaactaattccagctttgtataacttagcgagagacggccaacttcctggtcattttgcctgtgtaggctttgctagaagggcaaaaacacatgatgagtttcgggaagaaatgttagaagcagttaacaaattttcaagatcgaaaccagttgaacaaggactctggaaacgctttcgtgaacaattgttttatcatcaatcagaatttgatgatgatgaagggtataaaagcttaaaccaatttttagaaaaactcgacacacaaatgggaactaaaggtaaccgagttttttatttatctatccagcctagctattttcctctcgttgttgaaaagcttagccaacaccaattgacatatccagttaaacaagtcaaagacaaatggagtcgtgtcattatagaaaagccttttggaagagatattgaatcagcaaaacaacttcaacaagatcttgtgcaacacctagatgaaagtcaaatttatcgaattgatcattatttgggaaaagaaactgtacaaaatttattagtttttagatttggtaatcccatctttgaatcagtttggaataaccatcatattgataatattcaaattactgttggtgaagaaattggaattggttctcgcggtcgattttgggaagaagcaggaatgttgcgagatattgtccaaaatcatgtgatgcaactcctttctcttgttgcgatggaacccccgacgagtctccaagccaactcagtccgcggcgaaaaagttaaagtcattgaagctattagacctatccccttcgattcaatggaacaatgcgttatccggggccaatatggatctggattcattaacggggaacccgttaaaggatatcgagacgaggaaaatgtagactctaaatcttttgttgaaacctacgttgccttgcaactttctatcgataactggcgttgggctggagttcccttctatttacgtgctggtaaacgcctacccaaacgagctactgaaattgcgattactttcaaaaaagcccccggatatctatttgaaggaacttcagctttgattgactcaaacgttttagtgattcgtattcaaccggatgaaggaatttcattgagaattaattgcaaagtccctgcattaaacacagtcattcaaccggtgaaaatggattttcgttacggatcttactttggtgccattcctcccgaagcttatgaaagattaatttgtgattgcatggccggggataatactttatttgctagagatgacgaagtcattatgtcttggaagttgctcacacctattttagaacattggcaagaaacatccccgacagattttccaaattatgccgcgggaacttgggggccagaccgagccgaagaaatgctaaaacgccaaggacgtcattggagacttatttaa

SEQ ID NO: 17032 - protein, 516 aa, Candidatus Protochlamydia amoebophila UWE25
MHNSHYFVNPLNEPNRPIKIPESCILVIFGATGDLTARKLIPALYNLARDGQLPGHFACVGFARRAKTHDEFREEMLEAVNKFSRSKPVEQGLWKRFREQLFYHQSEFDDDEGYKSLNQFLEKLDTQMGTKGNRVFYLSIQPSYFPLVVEKLSQHQLTYPVKQVKDKWSRVIIEKPFGRDIESAKQLQQDLVQHLDESQIYRIDHYLGKETVQNLLVFRFGNPIFESVWNNHHIDNIQITVGEEIGIGSRGRFWEEAGMLRDIVQNHVMQLLSLVAMEPPTSLQANSVRGEKVKVIEAIRPIPFDSMEQCVIRGQYGSGFINGEPVKGYRDEENVDSKSFVETYVALQLSIDNWRWAGVPFYLRAGKRLPKRATEIAITFKKAPGYLFEGTSALIDSNVLVIRIQPDEGISLRINCKVPALNTVIQPVKMDFRYGSYFGAIPPEAYERLICDCMAGDNTLFARDDEVIMSWKLLTPILEHWQETSPTDFPNYAAGTWGPDRAEEMLKRQGRHWRLI

SEQ ID NO: 17033 - DNA, 1476 bp, Erwinia carotovora subsp. atroseptica SCRI1043
  CDS (1)..(1476): transl_table=11
atggcggtaacttcaacagcccaagcgtgcgatctggttattttcggtgccaagggcgatctggcgcgccgtaaattgctgccttccctgtaccagttggaaaaagcaggtcacatccatgcggacaccaaaattattggggtgggccgtgcggattgggataaagcggagtatacccgcgtcgtgcgcgaagcgcttgacacctttatgaaagaagccatcgacgataagttgtgggaaacgctaagcagtcggctggatttctgcaatcttgatgtggaagacacgaaagctttcaacaagctgggcaagatgcttgaccagaaaaatcgtaccacgatcaactattttgcgatgccacccagcacattcggagcgatctgcaaagggttgggaaccgcagggctgaataaagagcctgcacgcgtggtgatggagaaaccgctgggtaccgatctggcgtcttcccgtgccattaatgatcaggtcgcggaattcttcaacgagtgtcaagtttaccgtatcgaccactatctgggtaaagaaaccgttctgaacctgctggcgctgcgttttgccaactcgctgttctcctcaaattgggacaacaggacgatcgatcatgtacagatcacggtagccgaagaagtcggaattgaaggacgctggggctattttgataaagccggccagatgcgtgacatgatccagaaccacctgttacagattctgacgatgattgcaatgtcgccgccgtctgatttgacgaccgaccgcatccgtgatgaaaaagtaaaagtgttgcgctcgctgcgtcgtatcaatcgctccaatgtgcatgaaacgacggtgcgtggccaatactcttctggctttgttcagggacataaagtgccgggctacctggaagaagagggtgcgaacaaaagcagcagcacggaaacctttgtcgcaattcgtgtcgacattgatgactggcgctggtctggcgtgccgttctatctgcgtaccggtaaacgtctgccaacgaaatgttcagaagtggtggtgtactttaaaaatccagcactgaacctgttccatgattcttaccagcagttaccgcaaaacaaactgatcatccgtttgcagccggatgaaggcgtggaaatccagattctgaataaaatcccaggattagagcacaagcaccgtctgcaaacggtgaagctggacctgagcttctcggaaacctttaatcagcagcacttggcggatgcctatgagcgtctgttgctggaaaccatgcgtgggattcaggcgttgttcgttcgccgtgatgaagttgaagaagcctggaaatgggtggattccatcatggaagcctgggcgatggataatgatgcgccgaagccgtatcaggcaggaagctggggtccggtagcatccgtcgcgatgattacccgcgatggccgttcctggaatgagtttgagtga

SEQ ID NO: 17034 - protein, 491 aa, Erwinia carotovora subsp. atroseptica SCRI1043
MAVTSTAQACDLVIFGAKGDLARRKLLPSLYQLEKAGHIHADTKIIGVGRADWDKAEYTRVVREALDTFMKEAIDDKLWETLSSRLDFCNLDVEDTKAFNKLGKMLDQKNRTTINYFAMPPSTFGAICKGLGTAGLNKEPARVVMEKPLGTDLASSRAINDQVAEFFNECQVYRIDHYLGKETVLNLLALRFANSLFSSNWDNRTIDHVQITVAEEVGIEGRWGYFDKAGQMRDMIQNHLLQILTMIAMSPPSDLTTDRIRDEKVKVLRSLRRINRSNVHETTVRGQYSSGFVQGHKVPGYLEEEGANKSSSTETFVAIRVDIDDWRWSGVPFYLRTGKRLPTKCSEVVVYFKNPALNLFHDSYQQLPQNKLIIRLQPDEGVEIQILNKIPGLEHKHRLQTVKLDLSFSETFNQQHLADAYERLLLETMRGIQALFVRRDEVEEAWKWVDSIMEAWAMDNDAPKPYQAGSWGPVASVAMITRDGRSWNEFE

SEQ ID NO: 17035 - DNA, 1542 bp, Leifsonia xyli subsp. xyli str. CTCB07
  CDS (1)..(1542): transl_table=11
ttgccaccggtggacatcaccccagagttcaatccgctccggctcccctccgatcgacggctgaaccgcatcgccggtccgagcagtctcatcatcttcggcgtcacaggcgacctgtcgcgcaagaagctgatgccggccgtgtacgacctcgcgaaccgcggtctgctgcctcccgggttctccttcgtcggcttcgcccggcgcgactgggaggatcaggacttcgagaaggtcgtccacgacgcggtcaagcagtacgcgagaacgccgttcgacgacgacgtctggaagcagctcacccagggcatccgcttcgtccccggcgagttcgacgacgccgaggcgttccggcgcctcaaggagaccgtcgaatcgctggacgaagagcgtggcacgatgggcaaccacgcgttctacctctcgatcccaccgaaggcgttcccgctcgtcaccgagcagttgcgcacatcgggtctcgccgaccagtccggcacgggatggcgtcgcgtcgtcatcgagaagccgttcggctccgacctgacgaccgcgcgcgaactgaaccacgttgtcgagtccgtcttcccgccggactcggtgttccgcatcgaccactacctcggcaaagagacggttcagaacatcctggcgctacggttcgcgaacgagctgtacgagccgatctggaacgccaactacgtcgaccacgttcagatcacgatggcggaggacatcggcgtcggcggccgggccggctactacgacggcattggagcggccagggacgtcatccagaaccacctgttgcagctcctcgcgctcaccgcgatggaagagcccatctcgttcgacgcgacggacctccgcaccgagaaagagaaggtcctcgccgcagtccgcctgccggaggacttggggaaggcgaccgctcgcgggcagtactccagcggctggcaggggggtgagaaggtcgtcggattcctggaggaggatgggatgaacccgcgctccgccaccgagacctacgcagccatcaagctcgacatcggcacccggcgctgggcgggcgtcccgttctacctgcgcgccgggaaacgactcggccgccgtgtcaccgagatcgcggtcgtgttcaaacgcgctccgcagcagctcttcgcggagtctcagaccagcgcgctcggccagaacgcactcgtgatccgcgtccagccgaacgagggcgtcacgatccgcttcggctccaaagtgcccggcgccgggatgcaggtgcgcgatgtcagcatggacttcggctacggccacgccttcaccgaagcgagccccgaggcctacgaacggctcatcctcgatgtgctgctcggcgatccgccgctcttcccccgccacgaggaggtcgagctgtcctggaagatcctggacccgatcgaggagttctgggccacgcagggccagcccgagcagtaccgccccggaacctggggcccgaagtcggccgacgagctgctcgctcgcgacggccgcgtttggagacgcccgtga

SEQ ID NO: 17036 - protein, 513 aa, Leifsonia xyli subsp. xyli str. CTCB07
MPPVDITPEFNPLRLPSDRRLNRIAGPSSLIIFGVTGDLSRKKLMPAVYDLANRGLLPPGFSFVGFARRDWEDQDFEKVVHDAVKQYARTPFDDDVWKQLTQGIRFVPGEFDDAEAFRRLKETVESLDEERGTMGNHAFYLSIPPKAFPLVTEQLRTSGLADQSGTGWRRVVIEKPFGSDLTTARELNHVVESVFPPDSVFRIDHYLGKETVQNILALRFANELYEPIWNANYVDHVQITMAEDIGVGGRAGYYDGIGAARDVIQNHLLQLLALTAMEEPISFDATDLRTEKEKVLAAVRLPEDLGKATARGQYSSGWQGGEKVVGFLEEDGMNPRSATETYAAIKLDIGTRRWAGVPFYLRAGKRLGRRVTEIAVVFKRAPQQLFAESQTSALGQNALVIRVQPNEGVTIRFGSKVPGAGMQVRDVSMDFGYGHAFTEASPEAYERLILDVLLGDPPLFPRHEEVELSWKILDPIEEFWATQGQPEQYRPGTWGPKSADELLARDGRVWRRP

SEQ ID NO: 17037 - DNA, 1485 bp, Bacillus cereus E33L
  CDS (1)..(1485): transl_table=11
ttggaatcaatgacctttgttttatttggagcgacaggtgacttagcgaaacgcaaaatttaccccgcactatataacttatatagagatcaaaagcttccaaagaaaatatccgttatcgggcttgggagacgtgaagtatctcatgtagattttcaaaaaagaataaaagaatcaatagagacgttttctcgtcatagagaagaaggtactccagaactcgaaggttttttagataattttcgctattgtccattagatgtgagtaagccggaagactatgagagattattacaagtcgttcgtgaaagggaagaagagctacatataaaagggaatagaatgttctatctttccgttgctcctgaattttttgagacaatcgctttaaatattaaggaaagtggacttgataaaacggatggatggaaacgcctaatgattgagaaaccgttcgggcacgaccttatatctgctcgtgagctgaatgataagcttagtcgcacgtttgaagaagacgagatataccgtattgatcattatttaggtaagccgatgattcaaaaccttgaagcactagagtttgcaaatcctgttttacaatcgatttggaataaagaacatatagcgaatgtacaaatcacagcgagtgaaacagttggggttgaagaaagggcaggatattatgatcaggcaggagccattcgagatatggttcaaaatcatatgttacaaatattaatgatgactgctatgaatttgccggaaaaggttaatgcatgtgaaattcgagaggaaaagcgaaaggtaatggaggcgcttcgtaaagtgaaaaaagaagacgttcaaaaccatatcattcgcggacaatatggtgcaggtgagataaatggcggacaagttgtagcatataaagaggagccaggagtaaatccttcttctaatatagacacatttgttgctgctcgcttgtggatcgataatccattttggactggcgttcccttttatatacgaacaggaaaacgaatgaaagaaaagtctactcgtattgtaatcgaatttaaaaatacgttaaaacagcaatatcaagatagtaatccaaatgcagcacctaacttgttaataattgaaattagcccaggtgagaacgtttcattacagttaaatagtaaaaatccattgaaaaatggagaaattgaaccgatccgtattaactttacttgtgagcaagcggatgtgggagtacctgaagcgtatgaaagactcattcatgatgctgtgagtggagacgctacattctttgcacattggagagaagttgaattgtcatgggaatgggtacaaccaattcttgaagcattcgaagaaaacttattaccacttcatgaatataagtctggttcatatggtccagagccatctaatgaattattgcaagaaagtggatttaaatggtggttagatcaagaaacgaaaaaataa

SEQ ID NO: 17038 - protein, 494 aa, Bacillus cereus E33L
MESMTFVLFGATGDLAKRKIYPALYNLYRDQKLPKKISVIGLGRREVSHVDFQKRIKESIETFSRHREEGTPELEGFLDNFRYCPLDVSKPEDYERLLQVVREREEELHIKGNRMFYLSVAPEFFETIALNIKESGLDKTDGWKRLMIEKPFGHDLISARELNDKLSRTFEEDEIYRIDHYLGKPMIQNLEALEFANPVLQSIWNKEHIANVQITASETVGVEERAGYYDQAGAIRDMVQNHMLQILMMTAMNLPEKVNACEIREEKRKVMEALRKVKKEDVQNHIIRGQYGAGEINGGQVVAYKEEPGVNPSSNIDTFVAARLWIDNPFWTGVPFYIRTGKRMKEKSTRIVIEFKNTLKQQYQDSNPNAAPNLLIIEISPGENVSLQLNSKNPLKNGEIEPIRINFTCEQADVGVPEAYERLIHDAVSGDATFFAHWREVELSWEWVQPILEAFEENLLPLHEYKSGSYGPEPSNELLQESGFKWWLDQETKK

SEQ ID NO: 17039 - DNA, 1485 bp, Mannheimia succiniciproducens MBEL55E
  CDS (1)..(1485): transl_table=11
atgaaagcagaaaataactgtatcgtgattttcggtgcctcaggcgacttgacccaccgaaaactcattccggctctgtacaatctctataaaatcggtcgtttaagtgaaaacttctcagttttaggtgttgcccgcacagaattaagcaatgaaaaatttcgtgaaaaaatgcgcagcgccttaattgaacatgaaaaagccgacggcgacgaattaaataatttctgctcgcatctttattaccaagcagttaacacatcggatgcggcggattacgtgaaactcatccctcgcctagacgagttacatgataaatacaaaacctgtggtaatacgctttactacctttccaccccgccaagcctgtacggcgtaatccccgaatgtctggcggcgcacggattaaataccgaagaattcggctggaaacgcattatcgtggaaaaacctttcggctatgatatgaaaacggcaaaagaattagacgtgcaaattcaccgattctttgacgaacaccaaatttaccgtatcgatcattatttaggcaaagaaaccgtacaaaacctgttagtacttcgcttctccaacggtttattcgagccgctttggaaccgtaactatattgattacattgaaatcaccggcgcggaagaattaggcgttgaacaacgcggcggctattacgacggttccggcgccatgcgcgatatgttccaaaaccatttattacaagtgctggcgatggtagcaatggaaccgccggcaattattaatgcggattccatgcgtgacgaagtggcaaaagtgctttattgcctacatccgttagaaccgaatgatttacaacataatctggttttaggtcaatacgccgccacacaactaaacggtgagcgggtgaaaggttatttagaagaaaaaggcgttccgccggattcaaacaccgaaacctacatggcattacgttgcaaaatagacaactggcgttgggctggcgtgcctttttatgtacgcacgggtaaacggctggcggcacgggttacagaagtggttattcacttcaagaaaacaccacatccggtattcagtcaggaagcgcctgaaaataaattaattctacgcattcagcctgacgaaggtatttctatgcgcttcggtttgaaaaaacccggcgccggctttgaagcgaaggaggtctccatggacttccgctattcggatttaaacggcgcaagcttactcaccgcttacgaacgtttattattagacgccatgaaaggtgatgccaccctgtttgcacgtaccgatgccgtgcatgcttgctggaaattcgtgcaacctattctcgactataaagcgaacggcggacgggtttatgaatatgaagccggttcatgggggccggtggaagccgacaaattaatcgcccaacacggtcgcgtatggcgcaaaccttccggtcaaatgaagaaaaaggtttaa

SEQ ID NO: 17040 - protein, 494 aa, Mannheimia succiniciproducens MBEL55E
MKAENNCIVIFGASGDLTHRKLIPALYNLYKIGRLSENFSVLGVARTELSNEKFREKMRSALIEHEKADGDELNNFCSHLYYQAVNTSDAADYVKLIPRLDELHDKYKTCGNTLYYLSTPPSLYGVIPECLAAHGLNTEEFGWKRIIVEKPFGYDMKTAKELDVQIHRFFDEHQIYRIDHYLGKETVQNLLVLRFSNGLFEPLWNRNYIDYIEITGAEELGVEQRGGYYDGSGAMRDMFQNHLLQVLAMVAMEPPAIINADSMRDEVAKVLYCLHPLEPNDLQHNLVLGQYAATQLNGERVKGYLEEKGVPPDSNTETYMALRCKIDNWRWAGVPFYVRTGKRLAARVTEVVIHFKKTPHPVFSQEAPENKLILRIQPDEGISMRFGLKKPGAGFEAKEVSMDFRYSDLNGASLLTAYERLLLDAMKGDATLFARTDAVHACWKFVQPILDYKANGGRVYEYEAGSWGPVEADKLIAQHGRVWRKPSGQMKKKV

SEQ ID NO: 17041 - DNA, 1488 bp, Methylococcus capsulatus str. Bath
  CDS (1)..(1488): transl_table=11
atgtcagcggtgagtcagctcccatttcccgaatctttcaacatggtgttcttcggcggcgccggcgacctggtcacgcgcaagctgttgccggcaatgtatcagtgccacaagaacggcctgctggtcgaagccggccatattctctgcgtcgaccggcaggatctgagcgaggaggctttcctcgaactggcggatgaaaaggcgtgccagttcatccccaccgccgactgggatgccgcggtgtgggccggattccgccaacgcctggcctatctgcgcatcgacgccacccagcccgaacagtacgcgccgctgaaggagcggctgaaaaaagcgccggcggccgtcaccgtattctacctgtccacggcaccgtccctgttcgcgacgatctgcgcccatctgacccgccaaggcctcaacggcccccacagccgggtggtgctggaaaagcccctggggcacgacctggcctccgccaatgcgatcaccgccgacgtggaccgctatttccacgagaaccaggtgtaccggatcgaccattacctgggcaaggaatcggtgcagaacctgatggccttgcgtttcggcaacgcgctgttcgagccgttgtggcggcggatgtggatccgcgacgtccagatcaccatcgccgaggacgtcggcatcggcagccgcgctggcttctatgacaaggccggcgccttgcgcgacatggtgcagaaccatctgctgcagctgctgtgcttcgtggcgatggaaccgccggccagcctggattccaacgccatccgcaacgagaaactcaaggtgctggagtcgctggtgccgttcaccgaagaagacgtgcatcaaaaaaccgtgcgcggccagtaccgcgccggcatctgcggcggcaaagcggtgccggggtatctggaagaggagggcattccgccgggcagccacaccgagaccttcgtcgccatcaaggcggagatcgccaactggcgctgggcgggggtaccgttctacctcttcaccggcaagcggctgccggaacgcctggcggaaatcgtcatccacttccacgacgtcccccacccgatcttcccgctgcccaagagcggcgcctgcgcgccggccaagctggtgatccgcctgcagccagacgagttcatccgcctctacctgtatgccaagcagccgggcgattcgatggaactgcagccagtgtcgctggacctgaattttgccgagcaattcaaggtacgccgcgccgaaggcggctatgagcgcctgttgctcgatgccatccgcggcaaccaggcactgttcgtcaggcatgacgaacaggagcaggcctggcgctgggtcgagcccatactcaacacctgggccaacgatccgaagggcccggaaccctatgccgcgggtacctgggggccggccgcatccctggatctgttgagacgcgacggcatctgctggcacgaggggaaatga

SEQ ID NO: 17042 - protein, 495 aa, Methylococcus capsulatus str. Bath
MSAVSQLPFPESFNMVFFGGAGDLVTRKLLPAMYQCHKNGLLVEAGHILCVDRQDLSEEAFLELADEKACQFIPTADWDAAVWAGFRQRLAYLRIDATQPEQYAPLKERLKKAPAAVTVFYLSTAPSLFATICAHLTRQGLNGPHSRVVLEKPLGHDLASANAITADVDRYFHENQVYRIDHYLGKESVQNLMALRFGNALFEPLWRRMWIRDVQITIAEDVGIGSRAGFYDKAGALRDMVQNHLLQLLCFVAMEPPASLDSNAIRNEKLKVLESLVPFTEEDVHQKTVRGQYRAGICGGKAVPGYLEEEGIPPGSHTETFVAIKAEIANWRWAGVPFYLFTGKRLPERLAEIVIHFHDVPHPIFPLPKSGACAPAKLVIRLQPDEFIRLYLYAKQPGDSMELQPVSLDLNFAEQFKVRRAEGGYERLLLDAIRGNQALFVRHDEQEQAWRWVEPILNTWANDPKGPEPYAAGTWGPAASLDLLRRDGICWHEGK

SEQ ID NO: 17043 - DNA, 1452 bp, Silicibacter pomeroyi DSS-3
  CDS (1)..(1452): transl_table=11
atggtatcgcgcgtcattccggtcaacgctttcgatctggtcctgttcggggccaccggcgatctggctcgccgcaagattttgccgggcctcttccatcgctacgaggttgggcagatgccggaagaggcgcggatcatcggctcggcccggactgagttgagcaccgaggccttccgcgctgacgtgcgtcaggcgatcgaggagttcacgcccgaaaccccgacccgtgctgcggtgctggagcggttcctgctaaagcttgactatgtcgcggtggatgcacgcggagacgcgggctggcaggcgctggccgcaatgttgcgcccggatgtggtgcgcgccttttacctgtcggtcggaccgtcgctgtttgccggtatagcccgccagctggactgccacggcatggccacgcccgaggcgcggatcgtggtcgaaaaaccctttggccgcgatctggaaaccgcacgcgccctgaatgccggtctgcgcgcctgtttcgaagagcaccagatctatcggatcgaccattatctgggcaaggagacggtgcagaacctgatggcgctgcgctttgccaattcgctgttcgaaccgctgtggaacgcgacccatatcgaccacgtgcagattaccgtggccgaaagcctggggatcgaggggcgcgaggcctattacgaccagtccggcgccatgcgggacatggttcagaaccatctggtgcagctcctttgtctgaccgcgatggagccaccatcgaaattcactccgaacgcggtgcgcgacgaaaaggtcaaggtgatcgaggcgcttgacccggttccgcccggcgacatcgcccggggacagtatcgcgccgacaagggtggcgatggttatctggatcatgtgggtgacgcccagagccgtaccgaaagcttcatcgcgctcaaggttcacgtggccaactggcgctgggccggggtgccgttctatctgcgtacgggcaagaggctgcgggcgcgggtgtcggaaatcgtggtgcagttccgcgatccgccacattcgatctttcccaatgtgggaccgatccatggcaacaagctgattatccggctgcaaccggacgagggcatcaccctgcgcaccacgatcaaggatccgggcccgggcggcttccggctggccgaggtgccgctggacatgagctttgccgaggcgctgggcggcgatgtccggcctcaggatgcctatgagcggctggtgatggatgtgatccggggcgaccagaccctgttcatgcgcggagacgaggccgaggccgcctgggcctgggttgatccgatcatcgccgaatgggaaaagaaccgcgaccggccctatccttatgatcagggcagttcgggaccggaagaggcactgatgctgctgcatcgtgacggccgccgctggcggcagatcggaggatga

SEQ ID NO: 17044 - protein, 483 aa, Silicibacter pomeroyi DSS-3
MVSRVIPVNAFDLVLFGATGDLARRKILPGLFHRYEVGQMPEEARIIGSARTELSTEAFRADVRQAIEEFTPETPTRAAVLERFLLKLDYVAVDARGDAGWQALAAMLRPDVVRAFYLSVGPSLFAGIARQLDCHGMATPEARIVVEKPFGRDLETARALNAGLRACFEEHQIYRIDHYLGKETVQNLMALRFANSLFEPLWNATHIDHVQITVAESLGIEGREAYYDQSGAMRDMVQNHLVQLLCLTAMEPPSKFTPNAVRDEKVKVIEALDPVPPGDIARGQYRADKGGDGYLDHVGDAQSRTESFIALKVHVANWRWAGVPFYLRTGKRLRARVSEIVVQFRDPPHSIFPNVGPIHGNKLIIRLQPDEGITLRTTIKDPGPGGFRLAEVPLDMSFAEALGGDVRPQDAYERLVMDVIRGDQTLFMRGDEAEAAWAWVDPIIAEWEKNRDRPYPYDQGSSGPEEALMLLHRDGRRWRQIGG

SEQ ID NO: 17045 - DNA, 1488 bp, Bacillus clausii KSM-K16
  CDS (1)..(1488): transl_table=11
atgaaccagatcgaacaagcggaagcggtttttgttatttttggctctacaggtgatttagcaaaacgaaaattgtttccttctatatacaatttatacagaaaaggcaatttgaacgaacattttgctgtagtaggtttagggcgccgtgaatgggatgatgaaaaactaagaacagtcgtgatggaatcgatccaagaagaacttggcgagcaacgtcctgaagtgactgaatcatttttaaagcatttttcctatctatcatttgatgtcaccaacaaagattcctatagcgagctcaatgacaagttgcatattttggatgagacattccaaattcctgggaaccgtattttttatatggcaatggcacctgaattttttgggcaaattgcacagtcaatacataacgaagggctaaaggacacgcaaggatggacgcgtcttgtgattgagaaaccgtttggcacagacttgcaatcggctatccgtttaaatgacgaaatacgccaggcattttcagaagatgaaatttatcggatcgaccactatttaggcaaagaaatggtgcaaaacattcaagtgatccgttttgccaatgccatatttggttcattgtggaacaaccggcatatcgctaatatccaagtgacttccagtgagcagctcggtgtcgaaggacggggcggctattatgaaaaatcaggagcccttcgtgatatggtacaaaaccatatgctgcaaatggtgtctctcttggcaatggatgtacctcttcgtttgtccaccgatgatatacgtagcgaaaaaattaaagtgctacgcgcattgcgcccgattgtcggcgagagcatcaaggaaaatgtggtacgcgggcaatatggccgaggggaaatcaatgggcaagaagtgattggctatttagaagaagaaaatgtgagtgattcgtcaaaaacagagacttacgttgcggcaaagttaatgattgacaatcatgtttgggcaggcgtccctttttatatccgcactggaaagcggatggcggtgaagtcaacgaaaatcgttgttgaatttaaggaattacctttaaatctgtatagcaaggaaaacaaacagactgggccgaatttgttgatcatccatatccagcctgatgaaggcatgacgattgttttgaacggcaaaaagattggctccgcagatacaacgcctgtccatttgcaatacaggcatgatagcgaagaccggtttaacacgcctgaggcatatgagcggctcctctttgattgcatgatgggcgatgccacaaactttgcccattgggatgaagttagtttgtcatggtcgcttgttgatgcgatctccaaagcgtggtcagaaagcggagaaaaactgccaacctatcgagctgggtcgatggggccgaaagaagcggatgagcttcttgaagcagacggcttttcatggtggcctgttgaagaaatgtaa

SEQ ID NO: 17046 - protein, 495 aa, Bacillus clausii KSM-K16
MNQIEQAEAVFVIFGSTGDLAKRKLFPSIYNLYRKGNLNEHFAVVGLGRREWDDEKLRTVVMESIQEELGEQRPEVTESFLKHFSYLSFDVTNKDSYSELNDKLHILDETFQIPGNRIFYMAMAPEFFGQIAQSIHNEGLKDTQGWTRLVIEKPFGTDLQSAIRLNDEIRQAFSEDEIYRIDHYLGKEMVQNIQVIRFANAIFGSLWNNRHIANIQVTSSEQLGVEGRGGYYEKSGALRDMVQNHMLQMVSLLAMDVPLRLSTDDIRSEKIKVLRALRPIVGESIKENVVRGQYGRGEINGQEVIGYLEEENVSDSSKTETYVAAKLMIDNHVWAGVPFYIRTGKRMAVKSTKIVVEFKELPLNLYSKENKQTGPNLLIIHIQPDEGMTIVLNGKKIGSADTTPVHLQYRHDSEDRFNTPEAYERLLFDCMMGDATNFAHWDEVSLSWSLVDAISKAWSESGEKLPTYRAGSMGPKEADELLEADGFSWWPVEEM

SEQ ID NO: 17047 - DNA, 1446 bp, Neisseria gonorrhoeae FA 1090
  CDS (1)..(1446): transl_table=11
atgagtacacagacaaattttgatttggtgttgttcggtgcgaccggcgatttggcaatgcgcaaacttttgccctgcctgtatcaggcgcatgttgccggtctgcttcatcccgaagggcgtattttgggggtcagccgcagcgagttggataccgaaggttttctggcgaaggtggaaaccagttccaaaatccatgtgaaagaaaatttttccggtgaggcgtgggcttcgtttgttgaacgtctcgcatatctcaaagtcgatgttacgcagccggacgattttgccgctttgggcgatttggtcaaagcacgcaaagaaaccgacaacgtcgtcatctatctgtccaccgcgccgaaattcttcgcgcaagcctgcgaaaaccttgctgcgatcggtttgaatgccgacaatgtgcgcgtggttttggaaaaaccgctgggtacggatttggcttcttcccaacaaatcaataccgatgtggcgcgttatttcaaagaagggcaaatttaccgcatcgaccactaccttggcaaagaaagcctgcaaaacctgcttgcgctgcgttttgccaatgtaatgttcgagccgctgtggaacaataaatacatcgaaagcgtgcagctgaccatcgccgaacagctcggtgtggaagagcgcggcgagttttacgacattaccggcgcgttgcgcgatatggtgcaaaaccatttgatgcagatgctgtgcatgactgcgatggaagcccccgccggcttggatgccgacgcggtgcgcgatgaaaaagtcaaagtcatcaagtcattgaagccgctgaccatcgaatctgtcaatgaaaatgtcgtgcgcggacaatataccgctgccaaaggcatgaacggctatcttgaagaaatcaacgttccgcaagacagctttaccgaaacctacgtcgccattaaagccgaaatcgaaaacgaacgctggaagggcgttcccttctacctgcgtaccggcaaacgcatggcgggcaaagtggcggaaatcgttttgaacttccgcccgctgcaaaaccatattttcgacaacagccaaaccgcgccgaaccgtttggttatcgagcttcaaccgaatgaatccgtccgcctttacacgcaggtgaaaaccccgggtgcgggcaacaaagtggaagtaacgcctttgggcgtggatttgggcaaggccgttgaaggccgccgcgccgaggcttacgaacgcctgctgttggatgtgattaacggcaaactcgctttgttcaaccgccgcgacgaactcgaagccgcgtgggaatatgtgatgccgattttggaaaactgggcaaataacaccacgccgccgcacggttacggcgcacactcttggggtcctgaagccgcccgcgaactgttggcgcgcgacggcaacaagtggcacgaagaacagtaa

SEQ ID NO: 17048 - protein, 481 aa, Neisseria gonorrhoeae FA 1090
MSTQTNFDLVLFGATGDLAMRKLLPCLYQAHVAGLLHPEGRILGVSRSELDTEGFLAKVETSSKIHVKENFSGEAWASFVERLAYLKVDVTQPDDFAALGDLVKARKETDNVVIYLSTAPKFFAQACENLAAIGLNADNVRVVLEKPLGTDLASSQQINTDVARYFKEGQIYRIDHYLGKESLQNLLALRFANVMFEPLWNNKYIESVQLTIAEQLGVEERGEFYDITGALRDMVQNHLMQMLCMTAMEAPAGLDADAVRDEKVKVIKSLKPLTIESVNENVVRGQYTAAKGMNGYLEEINVPQDSFTETYVAIKAEIENERWKGVPFYLRTGKRMAGKVAEIVLNFRPLQNHIFDNSQTAPNRLVIELQPNESVRLYTQVKTPGAGNKVEVTPLGVDLGKAVEGRRAEAYERLLLDVINGKLALFNRRDELEAAWEYVMPILENWANNTTPPHGYGAHSWGPEAARELLARDGNKWHEEQ

SEQ ID NO: 17049 - DNA, 1497 bp, Bacteroides fragilis NCTC 9343
  CDS (1)..(1497): transl_table=11
atgagtaaatttgtaatgactatctttggtgcttcgggtgacttgacgaagcgtaagttgatgccggcattgtattcgttgtatgtagccaagcgtcttccggaagaatttgaaattctcggggtgggacgtacggtttatgaagatgcggactatcggacttacatttataatgagatggagaaatttgtgaagtcggaagagcagaataaggagaagatggacgctttcgttggacatcttcactatctggcaatagacccggcattggaaagcggatacggacagcttcgcctgcgcattgaagaactgagcggagatagccggccggatgacctgctgttttacctcgctacgcctccatcattgtatggtgtgattccgttgcacctgaagtcggtgcatctgaataaaggccgtgcacgaattatcgttgaaaagccattcgggtatgatctggaatcggctgagaaactgaataaaatttatgcttctgtattcgacgaacatcagatttaccgaatcgatcatttcttaggtaaagaaacggctcagaacctgttagcttttcgttttgccaatggtatttttgagcctttatggaaccgtaattatatagattatgtggaagtgaccgccgtggagaatctcggaatcgagcaacgcggcggtttttatgatactacgggtgcactgagggatatggtacagaatcatctgatccagctcgtggcattgactgctatggaacctcccgctgtgtttaatgcggataatttccgtaatgaagtggtgaaggtatacgagtctctgactcctttgaccgaaacggatttgagtgaacatattgtccgggggcaatatacggcagggggaaataaaagggggtatcgggaagagaagaatatttcacccgactcacgtaccgagacttatattgcaatgaaactgggtatcagtaactggcggtggagtggagtacctttttatatcaggaccggaaaacagatgccgacaaaagtgactgagatagtggtgcatttccgtgaaactcctcatcagatgttccattgcgcgggtggtaattgtccgagagccaataagctgatattgcgtttgcagcccaatgaaggtattgtgttgaaatttggtatgaaagtgccgggacccggatttgaggtcaaacaggtaacgatggatttcagttatgatcagttgggaggcgtccccggcggagatgcctatgcccgtctgatagaagactgtattctgggcgaccagaccctctttacacggagtgatgcagtagaagcatcctggcatttcttcgatccgattctgcgttattggaatgaacatcccgaggcgccgttgtatggttatcctgctggaacttggggacctttggagagtgaggctatgatgcatgagcatggtgccgaatggaccaatccatgcaagaacttaacaaacacagatcaatattgcgagctatga

SEQ ID NO: 17050 - protein, 498 aa, Bacteroides fragilis NCTC 9343
MSKFVMTIFGASGDLTKRKLMPALYSLYVAKRLPEEFEILGVGRTVYEDADYRTYIYNEMEKFVKSEEQNKEKMDAFVGHLHYLAIDPALESGYGQLRLRIEELSGDSRPDDLLFYLATPPSLYGVIPLHLKSVHLNKGRARIIVEKPFGYDLESAEKLNKIYASVFDEHQIYRIDHFLGKETAQNLLAFRFANGIFEPLWNRNYIDYVEVTAVENLGIEQRGGFYDTTGALRDMVQNHLIQLVALTAMEPPAVFNADNFRNEVVKVYESLTPLTETDLSEHIVRGQYTAGGNKRGYREEKNISPDSRTETYIAMKLGISNWRWSGVPFYIRTGKQMPTKVTEIVVHFRETPHQMFHCAGGNCPRANKLILRLQPNEGIVLKFGMKVPGPGFEVKQVTMDFSYDQLGGVPGGDAYARLIEDCILGDQTLFTRSDAVEASWHFFDPILRYWNEHPEAPLYGYPAGTWGPLESEAMMHEHGAEWTNPCKNLTNTDQYCEL

SEQ ID NO: 17051 - DNA, 1566 bp, Chlamydophila abortus S26/3
  CDS (1)..(1566): transl_table=11
atgtcacgaggtctcaaaagtacgatggaaatgacaagtaatgaaaatcaagacagtgggagaactttacccccatgccccccctgtgtgatggtaattttcggtgccaccggtgatctcacagcgcgcaagttatttccagcattataccatctgatcaaagaaggcaggctatctaacaactttgtttgtgtaggctttgcaagaagaaaaaagagtcacgaagaatttcgtgaagaaatgaaacaggctatacagaatttttcacgtgctcaagaactcgatatccgtatctgggaggaatttgaatcacgtatattttatcacgaatcgaacttttcttcttcggaaggctacgcttcattgaaggaaagacttgaggaaattgataagcaagacggcactcaagggaaccggctattttatttatctacacccccagattatttccccgaaattattgaaaatatcaataagcacaaactgttctatcatgatcaaggagaaggcaaaccttggtcacgcgtgattatagaaaaaccttttggtgtagatttgcaaagcgccaaggagttgcaaaaatacatagatgacaatttagatgaaggctctgtctatcgtattgaccattatttaggaaaagaaactgtacaaaacatcctcacgatacgttttgccaataccctatttgagtcttgttggaattctcaatatattgatcacgtacaaattagcgttagcgaatccataggcataggcactcgaggaaatttctttgagaaatcagggatgcttcgcgatatggtgcaaaaccatatgatgcagcttttgtgtttacttactatggaacccccttccgtcttcaattctgaagagataaaaaaagaaaaaatccatgtcctcaagaaaatacgtccattttctcaagacgatgtagtccgtggtcagtatggcactggagaagtccaaggagtttctgttcttggctatcgcgaagaggaaaatgtcaatcctcattctatggtagagacttacgtagctttgaagatgttcatagataaccctcgttggttaggagtgcctttctatctacgcgcaggaaaacgcctagctaaacgctctacagatatttctattatttttaaaaagtcctatgcgactttatttgaacccgaatcttgtcgtatttgtcctatagaaaatgatctcctcattattcgtatacaaccggatgaaggcgtagctttgcaatttaactgtaaagttcctgggatgaataatgtcgtgcgtcctgtgaaaatggattttcgctacgatacttattttaaaacaacagcccctgaagcctacgaaagattgctttgtgactgcattttaggtgataggatcctgtttacatctagtgatgaagtcatggcttcttgggagctgttcacacccattctacagcagtgggaacaagattcttcagatgtgtgcttccctaattatgttgccggctctgtaggacctaaagaggcagatcaattactacaagccgatggaagaagttggcgtcctttgtaa

SEQ ID NO: 17052 - protein, 521 aa, Chlamydophila abortus S26/3
MSRGLKSTMEMTSNENQDSGRTLPPCPPCVMVIFGATGDLTARKLFPALYHLIKEGRLSNNFVCVGFARRKKSHEEFREEMKQAIQNFSRAQELDIRIWEEFESRIFYHESNFSSSEGYASLKERLEEIDKQDGTQGNRLFYLSTPPDYFPEIIENINKHKLFYHDQGEGKPWSRVIIEKPFGVDLQSAKELQKYIDDNLDEGSVYRIDHYLGKETVQNILTIRFANTLFESCWNSQYIDHVQISVSESIGIGTRGNFFEKSGMLRDMVQNHMMQLLCLLTMEPPSVFNSEEIKKEKIHVLKKIRPFSQDDVVRGQYGTGEVQGVSVLGYREEENVNPHSMVETYVALKMFIDNPRWLGVPFYLRAGKRLAKRSTDISIIFKKSYATLFEPESCRICPIENDLLIIRIQPDEGVALQFNCKVPGMNNVVRPVKMDFRYDTYFKTTAPEAYERLLCDCILGDRILFTSSDEVMASWELFTPILQQWEQDSSDVCFPNYVAGSVGPKEADQLLQADGRSWRPL

SEQ ID NO: 17053 - DNA, 1485 bp, Haemophilus influenzae 86-028NP
  CDS (1)..(1485): transl_table=11
atgcaaactgataataattgtatcgtcatttttggcgcgtctggtgacttaactcatcgtaaactcattccagccctttataatctctacaaaatcgggcgtttgagtgaaaacttttccgttcttggtgttgcacgttctgacttgaacgatgaaactttccgcaaaaaaatgcgtgaggcgttaattcataatgaagaaacaacacctgacactttagatgctttctgctctcatctttattaccaagcagtgaatacttcggatgctcaagattacggcaaacttgttccacgtttagacgaacttcacgataaatatcaaacctgtggtaacaccctttactatatgtccactccgccaagtctttatggcgtgattcctgagtgtttggctgcacatggtttaaatacggaagaatatggctggaaacgtattatcgttgaaaaaccttttggttacgatgaaaaaacagcgcaagcattagacgtacaaatccaccgtttctttgaagaacaccaaatttatcgtatcgaccattatttaggtaaagaaaccgttcaaaacttgctcgtattacgtttttcaaatggttggtttgaaccgctttggaaccgtaatttcattgattatgtagaaattactggtgcagaatctattggcgtggaagagcgcgggggctattatgatggttctggcgcaatgcgagatatgttccaaaaccatttattacaagtccttgctatggttgcaatggagccgccagcgattattaacgcgaattcaatgcgtgatgaagtggcaaaagtgatgcatagtttgcgtccattaacttcggaggatatggagaataaccttgttttgggtcaatacactgcggctgaaattaacggcaaaatggaaaaaggctatctagaagaaaaaggtgtgcctgcagattctcgtactgaaacctacatctcattgcgttgtgaaattgaaaactggcgttgggctggcgtgccgttctatgttcgtacgggtaaacgcttaccagctcgtgtgactgaaattgtgatccattttaaaactacgccacatcctgtattcagccaaaatgcaccagagaataaattgattattcgtattcaacctgatgaagctatttcaatgcgttttggtttgaaaaaaccaggtgcaggttttgaggcgaaagaagtatcaatggatttccgttatgcagatttagcaggcacgcaagtattaaccgcttatgaacgtttattgttggatgcgatgaaaggcgatgcaaccttgtttgcgcgtactgatgctgttcacgctgcatggaaatttgttcagccgattttagattacaaagcgaatggtggtcgtattcacgaatatgaagccggcacttgggggcctgtggcagccgataaattaatcgcaaaacaaggcaaggtttggcgtaaaccaagtggattgatgaagaaaaaagtgtaa

SEQ ID NO: 17054 - protein, 494 aa, Haemophilus influenzae 86-028NP
MQTDNNCIVIFGASGDLTHRKLIPALYNLYKIGRLSENFSVLGVARSDLNDETFRKKMREALIHNEETTPDTLDAFCSHLYYQAVNTSDAQDYGKLVPRLDELHDKYQTCGNTLYYMSTPPSLYGVIPECLAAHGLNTEEYGWKRIIVEKPFGYDEKTAQALDVQIHRFFEEHQIYRIDHYLGKETVQNLLVLRFSNGWFEPLWNRNFIDYVEITGAESIGVEERGGYYDGSGAMRDMFQNHLLQVLAMVAMEPPAIINANSMRDEVAKVMHSLRPLTSEDMENNLVLGQYTAAEINGKMEKGYLEEKGVPADSRTETYISLRCEIENWRWAGVPFYVRTGKRLPARVTEIVIHFKTTPHPVFSQNAPENKLIIRIQPDEAISMRFGLKKPGAGFEAKEVSMDFRYADLAGTQVLTAYERLLLDAMKGDATLFARTDAVHAAWKFVQPILDYKANGGRIHEYEAGTWGPVAADKLIAKQGKVWRKPSGLMKKKV

SEQ ID NO: 17055 - DNA, 1470 bp, Colwellia psychrerythraea 34H
  CDS (1)..(1470): transl_table=11
atgagtaatttagattgtcaatcagcaagtgaaattgttatttttggtgctatgggtgacttatcttgccgtaagctactacctgcattatatcaattagaagtatgcggtttaatcaataaagatagtcgaattgttggcgcagcaagacaagaccatacacttgaagaatttaaaagtgttgttgtagaaaacttaaataagtatgttaaagaaacgatcgatgaagctgtgcttacacgttttattaatcgcttggtttatcaagcactagaattcaaagatagcagttcatttaataaattaaatgacgcgctagccggtggaaacgatacccgtgtttattacttttcgacaccacctgctatatatggagatatttgcaagggtttacaccacgcgaacttaattactgatgctgatcgtgttgtgatggagaaacctattggtcactcactagagtcttctattgaaatcaacaatcaagtttctgaatattttaaagaaaatcaaacttaccgcatagatcactatttaggtaaagaaacagtcttaaacctattagtattacgctttgccaactcattgttcacgaataactgggatcgaaatagtatcgatcatgtgcaaatcacggtagcagaaagtgttggtattgaaggacgttggggcttttatgacgaagcaggccaacttcgcgatatggtacagaatcatctattgcaaatactatctcttttggccatggaaccaccagcggacctaagcgctgagagtgttcgtgcagaaaagctgaaagttgttaaagcattaaaagcgataaatcgagaaaatattaaagataaagcaattcgcggacaatatagcgacggtttcttaaatggtgtttcagtacccggatatttaaatgaggaaggtgctaacgcaaatagtaataccgaaacatttgtcgcgataaaagcagagatagataactggcgctggaaaggcgtaccattttaccttcgtaccggtaaacgtatgccgaagaagcatagtgaaatagtggtacattttaagcagcagccacataatattttcaaagacagctatagcgatttacccgctaataaactaaccattcgcttacaacctgatgaaggggttgaattgcaaatgatgaataaaatacccggtattgcttcacagatgcgtattcaagaaaataaattagatttaagtttttctgatacttataacgatgagcgtgttgttgatgcttatgagcgcttaatgttagaagtgttaaatggcaatcaatcattatttgttagtcgagacgaagttgaagcggcttggatctgggctgatagcattattgaagcttggaagacaacaaatgaagcacctaaaccttatgctgcaggttcatggggaccagtctcttctatatcgttaattgcgcgtgatgatcgccagtgggtagaatag

SEQ ID NO: 17056 - protein, 489 aa, Colwellia psychrerythraea 34H
MSNLDCQSASEIVIFGAMGDLSCRKLLPALYQLEVCGLINKDSRIVGAARQDHTLEEFKSVVVENLNKYVKETIDEAVLTRFINRLVYQALEFKDSSSFNKLNDALAGGNDTRVYYFSTPPAIYGDICKGLHHANLITDADRVVMEKPIGHSLESSIEINNQVSEYFKENQTYRIDHYLGKETVLNLLVLRFANSLFTNNWDRNSIDHVQITVAESVGIEGRWGFYDEAGQLRDMVQNHLLQILSLLAMEPPADLSAESVRAEKLKVVKALKAINRENIKDKAIRGQYSDGFLNGVSVPGYLNEEGANANSNTETFVAIKAEIDNWRWKGVPFYLRTGKRMPKKHSEIVVHFKQQPHNIFKDSYSDLPANKLTIRLQPDEGVELQMMNKIPGIASQMRIQENKLDLSFSDTYNDERVVDAYERLMLEVLNGNQSLFVSRDEVEAAWIWADSIIEAWKTTNEAPKPYAAGSWGPVSSISLIARDDRQWVE

SEQ ID NO: 17057 - DNA, 1464 bp, Dechloromonas aromatica RCB
  CDS (1)..(1464): transl_table=11
atgagttgcgccaccgagtcgcatgcctatgtgatcttcggggcgacgggtaatctggccatggccaagctcctgcccgccttgtaccagctgcaccgcctcgggcagctggcgccggatgtccgcattctcggctgcggccgcacgcctcatacgcgggatggctggcgcagcgaggttcggcagcgcctggaaacaagcgatccagcactgctcgaccgctttctccagcgcctcgactatctcgccggcgaccttgaagatgccgccttctatcaggcgctggacagctggatcggggccagcgactgcggcaacaacgtgattttctacctctcggtcagtcccgagttctacgcgccgatcaccatcaggctggcccaggccggtttgctggcggagcgcgctggctggcgacggatggtgattgaaaagcccttcggccacgacctgcaatcggcccgcgacttgcagcacgaactcaatacgcacctcaaggaagagcagatttaccggatcgatcattacgtcggcaaggaatccgtccagaacctgctggtcctgcgtttcgccaacatgatcctcgaacccctgtggaaccggcattacatcgaccaggtacagatcacccatgccgaaacggtcggcctggatgggcgggccaattattacgaccggcatggcggcgcaacgcgcgacatgatccagagccacctgttgcaggttcttgccttgctggccatggagccgccggtttcgttggaagccgagtcgctgcgtgatgaaaaggtcaaggtgctgcgctcgatccgcccgctagagttgccgcaactggccagccatacggtgcgcgcccagtatgccggctatcagcaggaagcaggagtcgccgccggcagccataccgagacttatgccgcgctgaagctgtatgtggacaactggcgctggcgcgatgtgccgttctatctgcgtaccggcaagcgcctcaaggaacgccgttcgatggttgccgtgcgtttccgcgaaccgccaatgcagcttttccaaggaacaggtgcctccgccgttcatccgaactggctgctgatcggtattcagccggacgatgtggtgcagatggaaatatcggccaaggtgcccggccaggaaacgcgcacccgtcagatatcgatggatgcctcggttggcaatcccggcgaacgcaaggcggatgcttacgaagacttgctgatggacgtcattcaaggcgatcgatccctcttcctgcgttatgacgaggtgaaggcggcatggaatgtggtcgatcctgtcatgcgcggctgggctgacgatgaacgcccgccattgcagtatccggtcggcagttgggggccgaaagcagccgaccagatatttggccaggcggatcgggcatggcggcagactttgagctgcaatggcaaatccgaaggggaaacctga

SEQ ID NO: 17058 - protein, 487 aa, Dechloromonas aromatica RCB
MSCATESHAYVIFGATGNLAMAKLLPALYQLHRLGQLAPDVRILGCGRTPHTRDGWRSEVRQRLETSDPALLDRFLQRLDYLAGDLEDAAFYQALDSWIGASDCGNNVIFYLSVSPEFYAPITIRLAQAGLLAERAGWRRMVIEKPFGHDLQSARDLQHELNTHLKEEQIYRIDHYVGKESVQNLLVLRFANMILEPLWNRHYIDQVQITHAETVGLDGRANYYDRHGGATRDMIQSHLLQVLALLAMEPPVSLEAESLRDEKVKVLRSIRPLELPQLASHTVRAQYAGYQQEAGVAAGSHTETYAALKLYVDNWRWRDVPFYLRTGKRLKERRSMVAVRFREPPMQLFQGTGASAVHPNWLLIGIQPDDVVQMEISAKVPGQETRTRQISMDASVGNPGERKADAYEDLLMDVIQGDRSLFLRYDEVKAAWNVVDPVMRGWADDERPPLQYPVGSWGPKAADQIFGQADRAWRQTLSCNGKSEGET

SEQ ID NO: 17059 - DNA, 1605 bp, Thermobifida fusca YX
  CDS (1)..(1605): transl_table=11
gtgcccggcacgctcagccggaccagccacgaccgcgattcacccagggaggacgccgacgtgaaagaaccggtgatgccgggagcggtccccaacccgctgcgcagtgtgctggaccggcggttaccgcggattgccggcccgtgtgtgctcgtcctcttcggggtcacgggcgacctgtcccgcaagaagctgcttcccgctatttacgacctggcgaaccgagggctgctaccgcccggtttcggactcgtgggattcgcccgccgggactgggccgaccaggacttcacccaggtcgcctatgacgcggtccgtacgcatgcgcgcaccccgttccgggaagacgtgtggcgccagttgagcgagggggtgcggttcgtccccggcgaggcgcatgacgacgccgcgtttgatgcgctggtgcgcaccgtgcgggaactggacgagagccggggcaccggcggcaattacgcgttctacctttcgcttcccccgaaactgttccccacggtgctcacccagttgaagcggagcggcctggcggagagctcgggggactcgtggcggcgggtggtgatcgagaagccgttcggccacgacctggccagcgcccaggagctcaacgccctcgtcgacgacgtgttcccaccgcactccgtgttccgtatcgaccactacttggggaaggaaaccgtccagaacctgctggcgctgcgtttctccaacaccctgttcgagccgatctggaaccgctcgtatatcgaccacgtccagatcaccatggccgaggacatcggggtggggggacgcgccgggtactacgacggtatcggggcggcgcgcgacgtcatccagaaccacctgctgcagctcctcgccctggtcgcgatggaggaaccgctgtccttcaccgcggacgcgatccgcgcggagaaggtcaaagcgttgtccgcggtccaactccccgacgatcttgcgaccgggaccgcgcgcggccagtacaccgcgggctggcagggcggcgcctgggttcccggctacttggaggaagaaggcatccccccgaactccaccacggagacgtacgcggccatgcggctgggggtgaacacgcggcgctgggcgggcgtcccgttctacctgcgcacggggaaacgcctggggcggcgggtcaccgaggtcgcactggtgttccaccgcaccgccaaccaggtgttcgaccatgttgccaccgccaaccagggcgccaactccttggtgatccggatccagccggatgagggggtgacgttgcggttcggctccaaagtccccgggaccgccatggaggtgcgcgatgtcagcatggacttcagctacggcgcgtccttcaccgaaaccagtccggaagcctacgagcggctgatcctcgacgtgctcatcggcgatcctccgctcttcccccaccaggaagaagtagagctgtcgtggcggatcctcgacccggtcgaggagttctgggccaagaacggccgccccgaaccctacccggcgggtagctggggcccgcccagcggccacgagctgctggcccgcgacaaccgtacgtggcgcagaccatga

SEQ ID NO: 17060 - protein, 534 aa, Thermobifida fusca YX
MPGTLSRTSHDRDSPREDADVKEPVMPGAVPNPLRSVLDRRLPRIAGPCVLVLFGVTGDLSRKKLLPAIYDLANRGLLPPGFGLVGFARRDWADQDFTQVAYDAVRTHARTPFREDVWRQLSEGVRFVPGEAHDDAAFDALVRTVRELDESRGTGGNYAFYLSLPPKLFPTVLTQLKRSGLAESSGDSWRRVVIEKPFGHDLASAQELNALVDDVFPPHSVFRIDHYLGKETVQNLLALRFSNTLFEPIWNRSYIDHVQITMAEDIGVGGRAGYYDGIGAARDVIQNHLLQLLALVAMEEPLSFTADAIRAEKVKALSAVQLPDDLATGTARGQYTAGWQGGAWVPGYLEEEGIPPNSTTETYAAMRLGVNTRRWAGVPFYLRTGKRLGRRVTEVALVFHRTANQVFDHVATANQGANSLVIRIQPDEGVTLRFGSKVPGTAMEVRDVSMDFSYGASFTETSPEAYERLILDVLIGDPPLFPHQEEVELSWRILDPVEEFWAKNGRPEPYPAGSWGPPSGHELLARDNRTWRRP

SEQ ID NO: 17061 - DNA, 1482 bp, Ralstonia eutropha JMP134
  CDS (1)..(1482): transl_table=11
atggatagctccaagaccggcgcgcaggccccggatttcgacttcgtattgttcggcgccacgggcgacctcgcgcgccgcaagctcctgcccgccttgttcgatgcgcatgcggcaggcgcgctgcatccgcgtggacggatcctcgcgctgggcagccagccgctctcccacgaggcctatctggccatgctcaacgacgaggtactgcccgcgctggccggcaacgccgtggcctcgtcctggcccagcttcgtggagcgaatcgtctacctgcaggtggacgccaacgccgagccgggcttcgatgcgttggcggagctggtgaatgcccgggccgcgccggtggtcgtgtactacctggccaccgcccctcacctcttcgtcagaatctgcgagcagttgtcgcgtgtcggcctgaccgaccaacgcagccgcatcgtcctggaaaagccgttgggccatgacctggaatcgtccgaggaaatcaattcggccgtggccagattcttcgccgaagaccagatctatcggatcgatcactacctgggcaaggagtccgtacagaacctgatggcagtgcgtttcggcaacgtactgttcgagcccctgtggcggcgcgagtgggtgaaggaggtccagatcacgatcgccgaggaattgggcgtggagcggcgcggcaatttctacgacggcatcggggccctgcgggacatggtgcagaaccatttgctgcagctactgtgcatggtcgccatggaaccgcccacgagcttgtccgaagacgccatccgcgacgagaagctgaaaatcctcaaggcgctcaagccgatccggcccgagacagtggcggagacggtagtgcgcggccagtactgccgcggcgcggctggcggcgacccggtgccgggatacgtgagcgagccaggcatcccggccgacagccggaccgagacctttgtggccatcaaggccgagatcgcgaactggcgttgggccggcgtgcccttctacctgcgcaccggaaaacgcatgcagtcgcgcgtggcggagatcgtcatccacttccacgatgtaccctgcgcgctgttcgatcggccgctgggcacgccggcagggaaccggctggtcatcacgctgcagccggaggagagcatccggctttatttcctgaccaagcaacccggagacacgcaggccctggtgccggcctcgctggatctccagcgcccagggacaggcacgcgcgtgcgccgcatgggcgcgtacgagcgcctgctgctcgatgtcatccgcggcaggctcggcctcttcgtgcggcgcgatgaacaggtccaggcctggcgctgggtcgcaccgattctcaagacgtggcagagcaccaacacgccgcccaagctgtacaccgccggcacatgggggccggcggcctccagcgccctgttgtcgcgcgacggcatggcgtggcatgaagaaatgtag

SEQ ID NO: 17062 - protein, 493 aa, Ralstonia eutropha JMP134
MDSSKTGAQAPDFDFVLFGATGDLARRKLLPALFDAHAAGALHPRGRILALGSQPLSHEAYLAMLNDEVLPALAGNAVASSWPSFVERIVYLQVDANAEPGFDALAELVNARAAPVVVYYLATAPHLFVRICEQLSRVGLTDQRSRIVLEKPLGHDLESSEEINSAVARFFAEDQIYRIDHYLGKESVQNLMAVRFGNVLFEPLWRREWVKEVQITIAEELGVERRGNFYDGIGALRDMVQNHLLQLLCMVAMEPPTSLSEDAIRDEKLKILKALKPIRPETVAETVVRGQYCRGAAGGDPVPGYVSEPGIPADSRTETFVAIKAEIANWRWAGVPFYLRTGKRMQSRVAEIVIHFHDVPCALFDRPLGTPAGNRLVITLQPEESIRLYFLTKQPGDTQALVPASLDLQRPGTGTRVRRMGAYERLLLDVIRGRLGLFVRRDEQVQAWRWVAPILKTWQSTNTPPKLYTAGTWGPAASSALLSRDGMAWHEEM

SEQ ID NO: 17063 - DNA, 1491 bp, Thiobacillus denitrificans ATCC 25259
  CDS (1)..(1491): transl_table=11
atgacggtcaccaaggacgccagcgtcgaaaacatgccgtgctcgttcgtcattttcggcgccaccggtaatctcgcgtcgaacaagctcctgcctgcgctctatcatctcgaggcggctgcgcggctcgccgaatccctgagcatcatcgcgttttcgcgtcgcgactgggacaccgcgagctggcgcgaacacatgcgcgaggtcctccgcgacaagatcaagggcccgctcgacacgccgaccttcgaccgctttctcgcgcgcttcgcctaccacaaaggcgacctcaacgatccccacgcctaccacgcgctcgccgagcgtctgccgccggaaagctcatgttcggcgacggtgttctacctcgcgatcaagcctgcggaattcggcgcggtgatccagaatctcgaggccgctgggctgaacaagccgcgcggactcaaccgcgtggtgatcgaaaagcctttcggcgaggatctcgagtcggcgcagacgctcaaccgcctgctccaccagcatttcgaggagcaacaggtctaccgcatcgaccatttcctcggcaaggagacggtgcagaacctactcgtgttccgctttgccaacacgctgatcgaaccgctgtggaaccgcaatttcatcgaccacgtgcagatcacggtcgcggagtccggaggcatcgacaagcgcgccgactattacgatcgtgccggggccttgcgcgacatgctgcagaaccacctcatgcagctgatgacggtggtcgcaatggagccgccgcccgcgctcgaggccgacgcgctgcgcgacgagaaggtcaaggttttgcgctcggtccgtccgatctcgaagcgcgcggtgcacgcccatgcggtgcgcgcgcaatattcgcgcggcagcgtcgaggggcagatcgcgcgcgcgtaccagcaggaagacaacgtcgaggacaactcgacgaccgagactttcgtcgccgccaagttctacatcgacaactggcgctggcgcggcgtgccgttttatctgcggaccggcaagcgcatgccgcggcagacgcagatcatcgcgatccgcttccggcagccgccacagcagctgttccgcgagacgcccttcgaatcggttgcgccgaactgggtgctgctcagcatccagcccgaggagtccatgcatatggagatccacgtcaagcagccggggctcgacatggggacgcgcgtcatgcagatgaatgcgagcttcctcaagaccgacgagcagacgctcgatgcctacgagacgctgctgctcgacgtcatcgagggcgaccgctcgctgttcatccgtttcgacgaggtcgaatgggcgtggcgggtggtcgaccccatcctcaagaattgggcggtcgaacgcgagttcatcccgacctaccccgcgggcagctgggggccggccgaggccaaccgcctgttcgacagcgacgatcagacctggcgcaacgaactgtga

SEQ ID NO: 17064 - protein, 496 aa, Thiobacillus denitrificans ATCC 25259
MTVTKDASVENMPCSFVIFGATGNLASNKLLPALYHLEAAARLAESLSIIAFSRRDWDTASWREHMREVLRDKIKGPLDTPTFDRFLARFAYHKGDLNDPHAYHALAERLPPESSCSATVFYLAIKPAEFGAVIQNLEAAGLNKPRGLNRVVIEKPFGEDLESAQTLNRLLHQHFEEQQVYRIDHFLGKETVQNLLVFRFANTLIEPLWNRNFIDHVQITVAESGGIDKRADYYDRAGALRDMLQNHLMQLMTVVAMEPPPALEADALRDEKVKVLRSVRPISKRAVHAHAVRAQYSRGSVEGQIARAYQQEDNVEDNSTTETFVAAKFYIDNWRWRGVPFYLRTGKRMPRQTQIIAIRFRQPPQQLFRETPFESVAPNWVLLSIQPEESMHMEIHVKQPGLDMGTRVMQMNASFLKTDEQTLDAYETLLLDVIEGDRSLFIRFDEVEWAWRVVDPILKNWAVEREFIPTYPAGSWGPAEANRLFDSDDQTWRNEL

SEQ ID NO: 17065 - DNA, 1530 bp, Anabaena variabilis ATCC 29413
  CDS (1)..(1530): transl_table=11
atggttagtctcctggaaaatcccttgcgcgttggtctgcaacaacaagggatgcccgaaccccaaattatagtcatctttggcgcttctggtgatcttacctggcgcaaactcgtccccgcactttacaaattgcgccgggaacgacgcattcccccagaaactaccattgttggtgtagcccgtcgggaatggagccacgaatacttccgcgaacaaatgcaaaaaggcatggaagaggctcatagcagtgtcgaacttggagaactatggcaagatttctctcaaggtctgttctactgccctggagatatagataacccggaaagttatcaaaaactcaagaatttgttaagcgaattagacgagaaacgaggtacacggggaaaccggatgttttacctctccgtcgcccctaacttcttccctgaagccatcaggcaactagggggagcaggaatgctagacgacccctacaaacatcgtctagtaattgaaaaaccctttggtcgagatttggcatcagcccaaagcctcaatgcagttgtgcagaagtattgcaaagaaaaccaagtctaccgcattgaccactacttgggtaaagaaacagttcaaaacttgttggtattccgcttcgccaatgccatttttgaacccttgtggaatcgtcactttgttgaccacgtacaaattaccgtcgcagaaaccgtaggcgtggaagaccgagctggttattacgaaaaagccggtgcactgcgggatatgttgcagaaccacttgatgcagctttattgcctcacagcaatggaagcaccaaactcaatggatgccgatagtatccgtacagaaaaagtcaaagtgttacaagctacccgtctagctgatgtacacaacctgtcacgttcagctatacgtggacaatacagcgctggctggatgaaaggtcaacaagttcctgggtatcggacagaaccaggagttgatcccaattcctccacacctacttatgtaggtatgaagtttttagttgacaactggcgttggcaaggtgttcctttttacctgcgtactggcaaacggatgccgaaaaaagtcagtgagatttctatccacttccgcgatgtaccttctcggatgttccaatcagccgcgcaacaaagaaacgcgaacattttagccatgcggattcagccaaacgaaggtatttccttgcgttttgatgtgaaaatgccaggagcagaattccgcacccgttccgtagatatggatttcagctatggttcctttgggattgaagctacttctgacgcttacgatcgcctattcttagattgtatgatgggcgaccaaacattattcaccagagccgacgaagtagaagcagcttggcaagtagtcacccccgccctttctgtttgggacttacccacagacccagccaccattccccagtacgaagccggaacctgggaaccagcagaagcagaatttctgattaaccaagatggtcgtcgctggcgcagactttaa

SEQ ID NO: 17066 - protein, 509 aa, Anabaena variabilis ATCC 29413
MVSLLENPLRVGLQQQGMPEPQIIVIFGASGDLTWRKLVPALYKLRRERRIPPETTIVGVARREWSHEYFREQMQKGMEEAHSSVELGELWQDFSQGLFYCPGDIDNPESYQKLKNLLSELDEKRGTRGNRMFYLSVAPNFFPEAIRQLGGAGMLDDPYKHRLVIEKPFGRDLASAQSLNAVVQKYCKENQVYRIDHYLGKETVQNLLVFRFANAIFEPLWNRHFVDHVQITVAETVGVEDRAGYYEKAGALRDMLQNHLMQLYCLTAMEAPNSMDADSIRTEKVKVLQATRLADVHNLSRSAIRGQYSAGWMKGQQVPGYRTEPGVDPNSSTPTYVGMKFLVDNWRWQGVPFYLRTGKRMPKKVSEISIHFRDVPSRMFQSAAQQRNANILAMRIQPNEGISLRFDVKMPGAEFRTRSVDMDFSYGSFGIEATSDAYDRLFLDCMMGDQTLFTRADEVEAAWQVVTPALSVWDLPTDPATIPQYEAGTWEPAEAEFLINQDGRRWRRL

SEQ ID NO: 17067 - DNA, 1452 bp, Rhodobacter sphaeroides 2.4.1
  CDS (1)..(1452): transl_table=11
atggtttcgagagtcattccggtggacacgttcgatctggtcatcttcggcggcacgggcgatctggcacgccggaagatcctgcccggcctctatcggcgcttcaccggcgggcagatgccgcccgacagccgcatcatcgctgccgcccgctcggagatggacgacgcggcctatcgcgcccaagtgcgggccgcgctcgaggaattcgtgcccgcgggcaagcgcgacgagggcgggatctcggcgttcctcgagcggatccactatgtcgccatcgacgcgaccggaacctcgggatgggcggacctcaagaagatgatgcgccccgacgtggtccgggccttctatttctccgtggccccctcgctcttcggggcgctggccgagcggctgcacgagaacggcatcgccgggccgcagagccgcatcgtggtcgagaagcccttcgggcgcgatctggaatccgcgcgggccttgaaccgcgtgctggcgctccatttcgccgaggagcagatctaccggatcgatcactatctcggcaaggagacggtccagaacctgatggcggtgcgcttcgccaacatcctcttcgagccgctctggaaggctcagtatatcgaccatgtgcagatcaccgtagccgagaccgtgggcgtaggcgggcgcggcgcctattacgacacgtcgggcgcgatgcgggacatggtgcagaaccacctgatgcagcttctctgcctgatcgcgatggagccgccctatcacttcgatccgaacgcggtgcgcgacgagaagctgaaggtgatccgtgcgctcgatccggtcccgcccgaggatatcgtgcgcggccagtatctcgcgggcggcgggcaggagagctatgtcgatcacgccggcaacccccgcagccgcaccgagagctacatcgcgctgaaggtccatatcgccaactggcgctggaagggcacgcccttctatctgcgcaccggcaagcggctgcgcgcccgcgcctccgagatcgccatcaccttccgcgagccgccgcattcgatcttcgacgatgccgaggactggcgcgagaacgtgctcgtgatccggctgcagcccgacgaggggatcaatctcaaggtgatgatcaaggagccgggcccgggcggcatgcgcctcacgcaggtgccgctcgacatgtccttcgccgaggcgctggggccggacggcgaggacattcccgacgcgtatgagcggctcatcatggatgtgatccgcggcaaccagacgctcttcatgcgcggcgacgaggtcgaggccgcctgggcctgggccgatccgatcatcgccgcctgggagcggcgcggcgacaggcccaagacctacgagccgggaacttccggccccgaggatgcgctgatgctcatgcaccgtgacggccgccgctggcgcgagatccgctga

SEQ ID NO: 17068 - protein, 483 aa, Rhodobacter sphaeroides 2.4.1
MVSRVIPVDTFDLVIFGGTGDLARRKILPGLYRRFTGGQMPPDSRIIAAARSEMDDAAYRAQVRAALEEFVPAGKRDEGGISAFLERIHYVAIDATGTSGWADLKKMMRPDVVRAFYFSVAPSLFGALAERLHENGIAGPQSRIVVEKPFGRDLESARALNRVLALHFAEEQIYRIDHYLGKETVQNLMAVRFANILFEPLWKAQYIDHVQITVAETVGVGGRGAYYDTSGAMRDMVQNHLMQLLCLIAMEPPYHFDPNAVRDEKLKVIRALDPVPPEDIVRGQYLAGGGQESYVDHAGNPRSRTESYIALKVHIANWRWKGTPFYLRTGKRLRARASEIAITFREPPHSIFDDAEDWRENVLVIRLQPDEGINLKVMIKEPGPGGMRLTQVPLDMSFAEALGPDGEDIPDAYERLIMDVIRGNQTLFMRGDEVEAAWAWADPIIAAWERRGDRPKTYEPGTSGPEDALMLMHRDGRRWREIR

SEQ ID NO: 17069 - DNA, 1476 bp, Burkholderia sp. 383
  CDS (1)..(1476): transl_table=11
atgacgaatcagcctacccagaccggagccgaccggcccgtcgacatgatcatcttcggcggcggcggcgacctggccgcccgcaagctgttgcccgcgctgtacatggcgcacctgcactgcaacctgccgcctgaaacgcgcatcatcgcagtcggccgccgcgactggggcatcgatggttatcgcaagttcatggacgagcagtcgcgcccgttcatcgacgaaaaggcgttcgatcccgccgcctggagccgtttcctcgacctgttcaagtacgtgctgatcgacgtgaacgcgccggacgactacctgcggctcgcggaagcggcgcgcggcgacgcgatccgcgtgttctacctgtcgacgtcgccggagctgttcaccaccatttgcgacaacctgtcggccgcgcatctcgtcgacaagcactcgcgcgtcgtcctcgaaaagccgctcggccacgatctcgcgtcggcgaaggcgatcaacgatgcggtcggcaagcacttcgaagaatcgcagatctatcggatcgaccactatctcggcaaggaaaccgtgcagaacctgatggtgctgcgcttcggcaacccgatcttcgggccgctgtggcaggcgccgagcatccgcagcgtgcagatcacggtggcggagtcggtcggggtcggcagccgcgcgggcttctacgaccataccggcgcgctgcgcgacatggtgcagaaccacctgctgcagctgctgtgcatcgtcgcgatggaaccgccggtgtcgctcgacccggacgcggtgcgcgacgagaaactgaaggtgctgcgctccctgcggccgatggcagtggcggacgtcgcgcgcgacacggtgcgcggccagtacacggccggcgcggtcgacggccagccggtgaagggctatctcgaggaagacaacgtgccggcagacagccgcgcggaaaccttcgtcgcgctgcgcgcgcacatcaacaactggcgctgggcgaacgtgccgttcttcctgcgcaccggcaagcggctgcagcgccgccagtcggaaatcgtgatcgagttcgcggacatgccgttctcgatcatcccgaccggcccgcgccactacagcaaccgcctcgtgatccagctccagccggaagagtcgatccagctgcagatgctcgcgaaggaaccgggcagcggcatgaacatggtgcccgtgagcctgaacctcgacctgcagcaggcgattccggagcggcgcgcggaagcgtacgagcgtttgctgatcgacgtgatccgcggccgcctcacgcacttcatgcgtcgcgacgagctcgaagccgcgtggtcgtgggtcgagccgatcctcgacggctggaagcagctcggcgaccggccgcgcctgtacacggccggcacgttcgggcccgcggcttcgtcggcgctgctcgcgcgcgacgggatgtcctggtcggaagaagcgtaa

SEQ ID NO: 17070 - protein, 491 aa, Burkholderia sp. 383
MTNQPTQTGADRPVDMIIFGGGGDLAARKLLPALYMAHLHCNLPPETRIIAVGRRDWGIDGYRKFMDEQSRPFIDEKAFDPAAWSRFLDLFKYVLIDVNAPDDYLRLAEAARGDAIRVFYLSTSPELFTTICDNLSAAHLVDKHSRVVLEKPLGHDLASAKAINDAVGKHFEESQIYRIDHYLGKETVQNLMVLRFGNPIFGPLWQAPSIRSVQITVAESVGVGSRAGFYDHTGALRDMVQNHLLQLLCIVAMEPPVSLDPDAVRDEKLKVLRSLRPMAVADVARDTVRGQYTAGAVDGQPVKGYLEEDNVPADSRAETFVALRAHINNWRWANVPFFLRTGKRLQRRQSEIVIEFADMPFSIIPTGPRHYSNRLVIQLQPEESIQLQMLAKEPGSGMNMVPVSLNLDLQQAIPERRAEAYERLLIDVIRGRLTHFMRRDELEAAWSWVEPILDGWKQLGDRPRLYTAGTFGPAASSALLARDGMSWSEEA

SEQ ID NO: 17071 - DNA, 1539 bp, Geobacter metallireducens GS-15
  CDS (1)..(1539): transl_table=11
atggatacaacgatgaattctcggatggaaccgaccgtgatggtggtcttcggcgccgcaggtgatctcacgtggcgcaagcttgtgccggccctctacaacctctaccttgacggtcgtctccccgagcggttcgccatcgtcggggtcgcccggcaagagatggatgatgcgggattccgccgaaaactcagggagggggtggacctccactcacggcgcagcgtgacggacgagtcaacgtggagtggcttcgccgaccggctgtcgtaccttgccggggacttcaccacggcggaaaccggggcactcctcagccggagactcgaagggctggaccgggagtggaacggccgtgcggttcgggtcttctacttcgccattcctcccggtcttatggaagcggcggcccgccagttggagagcctcggcgtttgcagggactgctcccgggaccggctcgtggttgagaaaccctttggccgcgacctcgcttcggcccggcagttgaacgggcttctcacctccctgttcgccgagacgcagatctatcggatcgaccactacctgggcaaggagacggtgcagaacatcctcgctttccgtttcgccaactctctgttcgagccggtctggaaccggcgctacatcgaccacgtgcagatcaccgtcgccgaagcggtgggggtggggaagaggggaggctactacgatacatccggcgccttgcgtgacatggtgcagaatcacctcctccagatcctctgcctgattgccatggagccgccggtgtcgttttccgccgacgaagtgcgcaacaagaaggtggatgtcttgcgggccattcgtcccattcgccccgaagaagtccaccgggtggcggtccgcggccagtacggcagggggatggtggcctgcgagggagtgacgggataccgggaagagcagggggtgccacctgactccgtcaccgagacctttgccgccctcaagctgtggatcgacaattggcgctggcaaggggtgccgttctatcttcgcaccggtaaacgcctgcgcgccaaggtctccgaggtggccatcctcttccgcccggctccgcaccagctcttcccctccgcggccgtggagagctggcagccgaaccggctcgtccttcgcatccagcccgaggaggggattgcctcccgcatccaggtcaaacagccgggaacgcgcctgctgctgggagcggtggacatgggattccgttaccatgacgccttccacgccgcctctccggaagcctacgagactctgctcctggacgtcatctgcggcgacgctaccctcttcatgcgggccgaccaggtggagagcgcctggggagtcatttcaccgatcctcgatacctgggaatcggtgccgccggccgatttccccaactaccaggccggcggctgggggccggaaactgctgatctcctcatcgccaaggaggggcacagctgggtccaacccgaccttccgacggaagagggagagacggaggctccatga

SEQ ID NO: 17072 - protein, 512 aa, Geobacter metallireducens GS-15
MDTTMNSRMEPTVMVVFGAAGDLTWRKLVPALYNLYLDGRLPERFAIVGVARQEMDDAGFRRKLREGVDLHSRRSVTDESTWSGFADRLSYLAGDFTTAETGALLSRRLEGLDREWNGRAVRVFYFAIPPGLMEAAARQLESLGVCRDCSRDRLVVEKPFGRDLASARQLNGLLTSLFAETQIYRIDHYLGKETVQNILAFRFANSLFEPVWNRRYIDHVQITVAEAVGVGKRGGYYDTSGALRDMVQNHLLQILCLIAMEPPVSFSADEVRNKKVDVLRAIRPIRPEEVHRVAVRGQYGRGMVACEGVTGYREEQGVPPDSVTETFAALKLWIDNWRWQGVPFYLRTGKRLRAKVSEVAILFRPAPHQLFPSAAVESWQPNRLVLRIQPEEGIASRIQVKQPGTRLLLGAVDMGFRYHDAFHAASPEAYETLLLDVICGDATLFMRADQVESAWGVISPILDTWESVPPADFPNYQAGGWGPETADLLIAKEGHSWVQPDLPTEEGETEAP

SEQ ID NO: 17073 - DNA, 1542 bp, Desulfovibrio desulfuricans G20
  CDS (1)..(1542): transl_table=11
atgagtcccgcagacacccgcgtgaccataggcagagccatgtgcgaggaaacaccgccggaaccgtgcggtatggtcatattcggcgcatccggcgatctggtggcgcgcaaactgctgccggcgctgttcgggctgttccgccgcgggctgctgcccgaacgctttttcatgctgggttttgcccgcacccccatgacggatgacgacttccgcggcagagtaagcgaatccatccttgccgcgcacccgcagggcgccggccagctggacgattttctggcgctgtgccgttacacctacggcgactacgacgaccccgcggcctataccaaccttgcgctgtgttcttcggaatgcgtcatggactaccacgccgcggaaaacctgctgttttatctggctctgccgccgcacctgcacgccggagtggtgcgtcatctgcacggcgccggtcttacggcggaaggtgaaaacggcagcccgtggcgcagagttgtttttgaaaaacccttcggtcacgatcttgcctcggcgctggaacttgacagcaggctgtgctccgtgctgcggcaggaacagattttccgcatggaccactatctgggcaaggaaacagtgcagtccatactgatgttccgctttgccaatgccattttcgaaccgctgtggaacaggggctatgtggaccatgtacagataaccgtggccgaatcgctgggcatagaacacaggggggcatactacgacagtgccggctgtctgcgtgacatgttccagaaccatatgatgcagatgctggcgctggtggccatggaaccgcccacaagtttcgacccggaacgggtacgcgacgagcgggtcaaactgctgcactccatccggccgtggacagcggacgacatgcgccactgggtcgtgcgcggccagtatacacagggagttaccgccgaaggcgcatcgctggcaggttaccgccacgaaccccgtgtggccgaaggcagcaccacggaaacctatgtggcagcgcggcttttcatcgacaactggcgctggcagggcgttcctttttttctgcgcagcggcaaacgcatgccccgcaaggtcagcgaaattgccgtcaccttccggcgggtgccccactccatgttcggcatgcactcaaaatccgaaatgccggccaatgtactggtactcaaaatccagccggaagaaggcatcgacctgcatattcaggccaagcagcccggcccgaaatcatgcatggcaaccatggctctggcattcaagtacagagaaattttcggcatcaaccctccggacgcctacgagcggcttttgctggactgcatgctgggcgacaggaccctgttctggagccgcgaaggtgtggaagcttcgtggcggctgataaccccggtgctggatacatggtgcgacaacccgcagacttcgccgctgcatcagtacacagccggcacatgggggccggaagccgcgcagcggatgatcagtgccgcagggcgtcagtggcggcgctga

SEQ ID NO: 17074 - protein, 513 aa, Desulfovibrio desulfuricans G20
MSPADTRVTIGRAMCEETPPEPCGMVIFGASGDLVARKLLPALFGLFRRGLLPERFFMLGFARTPMTDDDFRGRVSESILAAHPQGAGQLDDFLALCRYTYGDYDDPAAYTNLALCSSECVMDYHAAENLLFYLALPPHLHAGVVRHLHGAGLTAEGENGSPWRRVVFEKPFGHDLASALELDSRLCSVLRQEQIFRMDHYLGKETVQSILMFRFANAIFEPLWNRGYVDHVQITVAESLGIEHRGAYYDSAGCLRDMFQNHMMQMLALVAMEPPTSFDPERVRDERVKLLHSIRPWTADDMRHWVVRGQYTQGVTAEGASLAGYRHEPRVAEGSTTETYVAARLFIDNWRWQGVPFFLRSGKRMPRKVSEIAVTFRRVPHSMFGMHSKSEMPANVLVLKIQPEEGIDLHIQAKQPGPKSCMATMALAFKYREIFGINPPDAYERLLLDCMLGDRTLFWSREGVEASWRLITPVLDTWCDNPQTSPLHQYTAGTWGPEAAQRMISAAGRQWRR

SEQ ID NO: 17075 - DNA, 1524 bp, Prochlorococcus marinus str. MIT 9312
  CDS (1)..(1524): transl_table=11
atgccttcaactttaagtaatcctctaagattaggtttacggcaggaaagagttatatctccacaatgcttagtaatatttggtgctagtggagaccttactcatagaaaattaataccagccttatttgaactctatttgcaaagaagaattcctagtgaatttggaatagttggttgtgcgagaagaccttggactgataatgaatttagagaaaagatgaaagtaaagctatccactcaaatttctggtaaggaaaaggagtgggaacaattttccaattatcttttttatgaaccagttgacttacaacaaagcgatcatgtcgtaaggctttctaaaagattaaataaaattgataaaagacaagctactcatggaaatagaacattttatttatcagtatctccaaatttctatgcaagtggatgtaaagctcttaaaatagctggccttttagatgaccctaagaaaagtcgtttagtgattgaaaaaccttttggaagagattattcaagtgcaaaaaaattgaacaagatcgttcaaagttgtgctgaagaaagtcagatttataggattgatcattatttaggtaaagagacagttcaaaacattcttgttatgaggtttgctaatactatttttgaaccaatctggaacagaaattatatatcaagtgttcaaattacttcatctgaaacagtaggtgttgaagatagagcaggttattacgaaagctctggtgctttaagagatatgcttcaaaatcatatgactcaaatgctcgctgttactgctatggaacctcctgggaaatttgaaccagaagctataagaaatgaaaaagctaaggttcttcaagcttcaaaacttgctgacgaaaatgaaccgtggaattgttgtataagaggtcaatatggggagggaggaaatatctcaaatcttctcaaaggatataggcaggaagatggtgttaattgtaatagcacaacagaaacttatattgcgacaaaagttttcgttgataactggcgttggcaaggggtacctttttatttaagaactgggaaaagactacctaaaagacttggagaaatagtcttgacttttaaagacgttcctgttcatttatttgaatcaacaataataaatcctgctccaaatcaacttatcctaagaattcagccaaatgaaggtgctacttttaactttgaggtaaaatcccctggttctgggatgaaatccagacctgttgagatggaattttcttatgatgaatcatttggagaaccctcagatgaaggctatgtaagattactagctgatgcaatgctttctgatccaaccttatttacacgaagtgatgaagtagaggcagcttggaaactttatacgccattaatagaattgatggataattctccttggaagttacctatttataattatgaatctatgacgtggggacctcctgagtctgatcaattactttcaaaagataatattttctggcgcagaccttaa

SEQ ID NO: 17076 - protein, 507 aa, Prochlorococcus marinus str. MIT 9312
MPSTLSNPLRLGLRQERVISPQCLVIFGASGDLTHRKLIPALFELYLQRRIPSEFGIVGCARRPWTDNEFREKMKVKLSTQISGKEKEWEQFSNYLFYEPVDLQQSDHVVRLSKRLNKIDKRQATHGNRTFYLSVSPNFYASGCKALKIAGLLDDPKKSRLVIEKPFGRDYSSAKKLNKIVQSCAEESQIYRIDHYLGKETVQNILVMRFANTIFEPIWNRNYISSVQITSSETVGVEDRAGYYESSGALRDMLQNHMTQMLAVTAMEPPGKFEPEAIRNEKAKVLQASKLADENEPWNCCIRGQYGEGGNISNLLKGYRQEDGVNCNSTTETYIATKVFVDNWRWQGVPFYLRTGKRLPKRLGEIVLTFKDVPVHLFESTIINPAPNQLILRIQPNEGATFNFEVKSPGSGMKSRPVEMEFSYDESFGEPSDEGYVRLLADAMLSDPTLFTRSDEVEAAWKLYTPLIELMDNSPWKLPIYNYESMTWGPPESDQLLSKDNIFWRRP

SEQ ID NO: 17077 - DNA, 1515 bp, Moorella thermoacetica ATCC 39073
  CDS (1)..(1515): transl_table=11
atggccccggatcggttggacaacagcttgctggtgatctttggcggcacgggggacctcgcccggcgcaagctttacccggctttattcaacctttttgtcgatggtttcctgccgccggctcttggggtaatagctgtgggccggtgcggttttacccgggatagcttccggcaggagatattactgccgtccctggagaccttttcccgccgcgccgcttccctggacgcctattttgagccctttgccacccgtttgcactatttccgaaccgacatttatgacccggagggatatacccgcctgggacagttcctggtggaactggaggaggcggcgggctcccggggcaaccgcattttttacctggccgtggccccggaacactttggccccgtaatccggagcttaaaggaaacaggcctggtaccagcgcggggctggcagcgggtcgttattgagaaacccttcggccatgacctgccttcggcgacagaattaaaccgccagctgcgggaggctttcagcgaagaagagatttaccgcattgaccattacctggggaaagaaatgatccagaacatcatggtcatccgctttgccaatactttttttgaaccggtctggaataataaatatatcgaccacgtccaaattacttcggcggaaacggtgggtgtggagaaccggggcggctactacgaccgcgccggggcgctgcgggacatggtccagaaccacctcctgcaactggtgactttggtggccatggaaccaccggccagcctggccactgaagctattcgcgatgaaaaggtaaaggtgctacgttctttgaaacccctggatgcggcggcagtcagcaagaacgccatccgcggccagtacggtgccggggagatagatgggcagatggtgccgccttaccgccaggaaaaggaagtggcccctgattccacgacggaaacgtttgtcgctttaaagcttttcatagataacttccgctgggccggcgtgcccttttacctgcgtacgggcaagcgcctgccgcttaaagtgacggaaattatcctccagtttaaatccctgccggatatcctgtattttaaggaatacggtgaattacgccccaatctcctggtcatccgcgtccagcccctggaaggcgtctacgttcagctcaatgccaagcggccggggaataataattacatcgtacccatccgcctggatttttgccagaattgtgaggtgggggttaattcccccgaggcctatgagcgcctgctttatgatgtaatgcggggggaccctacccttttcacccgctgggatgaggtggaggcggcctggaagtttgtcgatcccatatcggccgcgtgggcggctcaggggcagccgcaatttcccaattacgccgccggccagtgggggccgccagcggcccagagactattaatttgcgatgctcgccgctggtgggaggaaaatggagcagaatcgatttcttaa

SEQ ID NO: 17078 - protein, 504 aa, Moorella thermoacetica ATCC 39073
MAPDRLDNSLLVIFGGTGDLARRKLYPALFNLFVDGFLPPALGVIAVGRCGFTRDSFRQEILLPSLETFSRRAASLDAYFEPFATRLHYFRTDIYDPEGYTRLGQFLVELEEAAGSRGNRIFYLAVAPEHFGPVIRSLKETGLVPARGWQRVVIEKPFGHDLPSATELNRQLREAFSEEEIYRIDHYLGKEMIQNIMVIRFANTFFEPVWNNKYIDHVQITSAETVGVENRGGYYDRAGALRDMVQNHLLQLVTLVAMEPPASLATEAIRDEKVKVLRSLKPLDAAAVSKNAIRGQYGAGEIDGQMVPPYRQEKEVAPDSTTETFVALKLFIDNFRWAGVPFYLRTGKRLPLKVTEIILQFKSLPDILYFKEYGELRPNLLVIRVQPLEGVYVQLNAKRPGNNNYIVPIRLDFCQNCEVGVNSPEAYERLLYDVMRGDPTLFTRWDEVEAAWKFVDPISAAWAAQGQPQFPNYAAGQWGPPAAQRLLICDARRWWEENGAESIS

SEQ ID NO: 17079 - DNA, 1533 bp, Frankia sp. CcI3
  CDS (1)..(1533): transl_table=11
gtggcgcccacggtgagtaccaacccgctgcgggacccacgtgaccgcagactgccgcgcctgccggacgcgagcgccctggtggtgttcggcgctaccggcgacctggcccgcaagaagctgatccccgccgtctacgacctggcccaccgcggcctgctgccgccgggtttcgtcctgctcgggttcgcccgccgggactggcccgacgaggacttcgccgagttcgcccggcaggccgccgagaagggcgcccgcacccccttccgtgcagaggtctgggaccggctggcgggctccgtgcggttcctgccagggtccttcgacgacgacgccgcgttcgaccggctcgcccgcacgctggagagcctggagcactcccacggtatccgtggcaacgcggcgttctacctgtcgatcccgccgtcggccttcccggtcgtgctcaagcagatgcagcgcaccgggctctcctcggccgcgggttcgggcggctggcgccgggtcgtcgtcgagaaaccgttcggtcacgacctggagtcggcccggcagctcaacgcgctcgtcgacgacgtcttcaccccgtccggggtgttccgcatcgaccactacctgggcaaggagacggtccagaacctcttcgcgctgcgcttcgccaacacgctgttcgaaccgatctggaactcccagttcgtcgattcggtgcagatcaccatggccgaggacgtcgggatcggcacccgggccggcttctacgacgagacgggcgccgctcgggacgtgctccagaaccacctgttgcagctgctcgccctgaccgcgatggaggagccggtcagcttcggcgcggagaccatccgcaccgagaagctgaaggtgctccgcgcggtgtcgctgcccatggacctcactcgctacgcggtaagggggcagtacgagcagggctggctcgccggggagcgggtcccgggctacctcgacgaacaggacatccctgcgcagtcgcggacggagaccttctcggcggtgcgcctcggcatcgagacgcgccggtgggccggggtgccgttctacctgcggaccggcaagcggctgccacggcgggtcaccgaggtcgccatcttcttcaagaaggcgccgcacctgccattcgacgagaccgccaccaccgagctcggcaacaaccagctggtcatccgggtgcagcccgacgagggggtcacgctcaagttcggctccaaggtccccggctcggcgatggaggtccgggacgtcgcgatggacttcctgttcggtgaggcgttcaccgaggcgctgccggaggcctacgaacggctgatcctcgacgtgctgctcggcgacgcgacgctgttcccgaacaacgcggaggtcgaggagtcctggcggatcgtcgatccgctggagcggcactgggcgggcaccaccccgcaccgctaccgggccggcacctggggtccggctgccgccgacgagatgctcgcccacgacggtcgccggtggcggcggccatga

SEQ ID NO: 17080 - protein, 510 aa, Frankia sp. CcI3
MAPTVSTNPLRDPRDRRLPRLPDASALVVFGATGDLARKKLIPAVYDLAHRGLLPPGFVLLGFARRDWPDEDFAEFARQAAEKGARTPFRAEVWDRLAGSVRFLPGSFDDDAAFDRLARTLESLEHSHGIRGNAAFYLSIPPSAFPVVLKQMQRTGLSSAAGSGGWRRVVVEKPFGHDLESARQLNALVDDVFTPSGVFRIDHYLGKETVQNLFALRFANTLFEPIWNSQFVDSVQITMAEDVGIGTRAGFYDETGAARDVLQNHLLQLLALTAMEEPVSFGAETIRTEKLKVLRAVSLPMDLTRYAVRGQYEQGWLAGERVPGYLDEQDIPAQSRTETFSAVRLGIETRRWAGVPFYLRTGKRLPRRVTEVAIFFKKAPHLPFDETATTELGNNQLVIRVQPDEGVTLKFGSKVPGSAMEVRDVAMDFLFGEAFTEALPEAYERLILDVLLGDATLFPNNAEVEESWRIVDPLERHWAGTTPHRYRAGTWGPAAADEMLAHDGRRWRRP

SEQ ID NO: 17081 - DNA, 1476 bp, Saccharophagus degradans 2-40
  CDS (1)..(1476): transl_table=11
atgaatacagacatgctgattgttgggggtgatggtgacttagcactgcgcaagctctacccgtctctttactatttagaactcaataactgtatgccagaaaatactcgcattatcggtatggctcgcacagggcaaacacgcgaagagtttctagtaaaagtaaaagaatggttaaaagctaacgtagcagcagagttattttctgaagagaagtgggaaagctactctcaaaaaatcttttttgctcaaggtgatgccactaacgcagaatcgttaggcaaagttcgcgaagagtttcttggtgaaggcaaccagttggttgtgtatttagctattccaccactcatttttggtaaagtttgcaacgcgctagagggatgtggtttagcaaaagaaaccacgcgtttagttgtagaaaaaccacttggtgatagccgtgaatctttcattgctattaacaatgagttggctcgcaccttcccagaaaaacaactattccgcattgatcactatcttggtaaagagacagtgcaaaacttaattgcgctgcgttttgctaacgatattttcgaaccgctttggaactcacggtatgttgattccattcaaattaccgtttctgaagaagtaggtgttggcaaccgctggagtttttacgatcagaccggtgcaacccgcgacatggttcaaaaccacttgttacaagtgttgtgcttaacctgtatggagccgccagcagtgttagacgcagactccgtgcgcgcagaaaaattaaaagtacttaactctctaaaaatgattgagggagaagaagtgctaaaagataccgttcgcggtcaatatgagcgcggcgtggtaggtggcaaagaagtgccgggctacttagaagaagagtctgataaatacgaaattgaccccaatagtcaaacagaaacgtttgtagctattaaagcagagattcaaaactggcgttggtccggcgtgcctatttatcttcgtacgggtaagcgcttgcgtggccgtcactctgaaattgttgttcactttaagcaaagtaaacataaaattttccaagaaaaccacgaaaatcacgcatcaaaccgtttgattattcgtttgcagccagatgaaggtattcgtttgcgcgtaatgaataaggttgcaggtttagagcctggtattccgttggagtctggttgtttgaacctttggttctctgataaaaaagaaattaaaacacacgatgcatactcgcgcttattgtttgatgtgttgcgtaacgatcaaacgttgtttgtaagtgctgcggaagtagaagctgcgtggaaatgggtagacactattttcgctggctggaaatccacgggtatgaaagctcagggctatcctgctggcagtattgggccggttgcggcaaatgagctgctaagcagagacggtcgtgagtggcacgaaatagaacctcgcgattaa

SEQ ID NO: 17082 - protein, 491 aa, Saccharophagus degradans 2-40
MNTDMLIVGGDGDLALRKLYPSLYYLELNNCMPENTRIIGMARTGQTREEFLVKVKEWLKANVAAELFSEEKWESYSQKIFFAQGDATNAESLGKVREEFLGEGNQLVVYLAIPPLIFGKVCNALEGCGLAKETTRLVVEKPLGDSRESFIAINNELARTFPEKQLFRIDHYLGKETVQNLIALRFANDIFEPLWNSRYVDSIQITVSEEVGVGNRWSFYDQTGATRDMVQNHLLQVLCLTCMEPPAVLDADSVRAEKLKVLNSLKMIEGEEVLKDTVRGQYERGVVGGKEVPGYLEEESDKYEIDPNSQTETFVAIKAEIQNWRWSGVPIYLRTGKRLRGRHSEIVVHFKQSKHKIFQENHENHASNRLIIRLQPDEGIRLRVMNKVAGLEPGIPLESGCLNLWFSDKKEIKTHDAYSRLLFDVLRNDQTLFVSAAEVEAAWKWVDTIFAGWKSTGMKAQGYPAGSIGPVAANELLSRDGREWHEIEPRD

SEQ ID NO: 17083 - DNA, 1488 bp, Burkholderia xenovorans LB400
  CDS (1)..(1488): transl_table=11
atgacgacccaccacgcttctgccactcccgacctgccgctcgacatgatcattttcggcggcaccggcgacctgtcgtttcgcaagctgctgcccgcgctctatatggcgcatctgcactgcaacctgccgccggacacccgcattctcacaatcggccgcaagccctggtcgcgtgaggagtacatcaacgaattcatggagcagaaggcaaagcccttcattgaaaagaaagcgttcgatgccgccgcctgggacaagtttctggcgctgttcgaatacgtgcgcatggacgtggattcagtcgaggactatcaacggctgaaggaggcgtcgcgcgagggcgtgcgccgcgtgttctatctcgcgacgtcgccggacctgttcacgaacatctgcgataacctcgcggcggcgggattggtcgacggcaactcgcgggtggtgctcgaaaagccgctgggccacgatctggcgtccgcgcaggaaatcaacacggcggtcggcaagcatttcagcgaagcgcagatctaccggatcgaccactacctcggcaaggaaaccgtgcagaacctgatggtgctgcgtttcggcaatccgattttcggcccgttgtggcaggcgccgtatatcaagagcgtgcagatcacggtggcggagacggtcggcgtgggcagccgcgcgggcttctatgacaagaccggcgcgctgcgcgacatggtgcagaaccacttgctgcaactgctgtgcattgtcgcgatggagccgcccgtgtcgctcgacccggacgcggttcgcgacgaaaagctcaaggtgctgcgctcattgcggcccatgacgccggaagacatcgcgcgcgacaccgtgcgcggccagtacaccgccggcgcggtggacggcgaggcggtgaagggttatctcgaggaagacaacgtgccggcaggcagccgcgccgaaaccttcgtcgcgttgcgcgcgcatatcaacaactggcgctgggcgcatgtgccgttcttcctgcgcaccggcaagcggatgcagaagaaagtatcggagatcgtcatcgagttttccgaactgcctttctcgatcatcccgaacgggaatagcgggcgcaactacggcaaccggctcgtgatccagttgcagcctgaggagtcgatccagttgcaggtgctcgccaaggaaccgggcagcggcatgcatatgctgccggtgaatctgaatctggatttgcagcaggcttttaccgagcgtcgcgcggaagcgtacgagcgtttgctgatcgacgtgattcgcggacgcctcacgcacttcatgcgtcgcgacgaactcgaagcagcatgggcgtgggccgagccgattctggcaggctggagcaagtcgggcgagaagccgcgtggctatacggcgggcacgttcgggccggctgcatccaccgcgctgatggcgcgggaaaatgcagtgtgggcggaagagtcgcaataa

SEQ ID NO: 17084 - protein, 495 aa, Burkholderia xenovorans LB400
MTTHHASATPDLPLDMIIFGGTGDLSFRKLLPALYMAHLHCNLPPDTRILTIGRKPWSREEYINEFMEQKAKPFIEKKAFDAAAWDKFLALFEYVRMDVDSVEDYQRLKEASREGVRRVFYLATSPDLFTNICDNLAAAGLVDGNSRVVLEKPLGHDLASAQEINTAVGKHFSEAQIYRIDHYLGKETVQNLMVLRFGNPIFGPLWQAPYIKSVQITVAETVGVGSRAGFYDKTGALRDMVQNHLLQLLCIVAMEPPVSLDPDAVRDEKLKVLRSLRPMTPEDIARDTVRGQYTAGAVDGEAVKGYLEEDNVPAGSRAETFVALRAHINNWRWAHVPFFLRTGKRMQKKVSEIVIEFSELPFSIIPNGNSGRNYGNRLVIQLQPEESIQLQVLAKEPGSGMHMLPVNLNLDLQQAFTERRAEAYERLLIDVIRGRLTHFMRRDELEAAWAWAEPILAGWSKSGEKPRGYTAGTFGPAASTALMARENAVWAEESQ

SEQ ID NO: 17085 - DNA, 1545 bp, Acidobacteria bacterium Ellin345
  CDS (1)..(1545): transl_table=11
atgagcaccgttgttcaagcgactcctacgcgcagcattgcgatcccgcccatgcccaaggccgagccgtgcaccatcgtcatcttcggcgcatccggcgacctcacgaagcgcaaattgatacccgcgctctatgacctggcctgcatcggctgcatctctgggcagcagttcgatgttctcggcaccggccgcaccgagatgaccaccgacgaattccgcaaggcgatgcgcgacgccgcttcgacttcgaaggacgcgcgcaagttcagcgactggaactgggaagagttcgagaagcgcctgcattacttccccggcgatatcaacaacgatggcttctatcacgcgctcaaagaccagctcagcgagatcgaaaagaatggcggcagttccaaccacctgttctatgtgtcgacgcaggcatctctggcgccgccgatcgtccaaggcctgggcaagtgcggactctcgaagaatgagaagggctggacacgcatcgtgctggagaagccgttcgggcgcgacctcgagtcagcaaaggcgctgaaccgcgaagtgcttcaggtcttcgacgaaaaggacgtctatcggatcgatcactatctcggcaaggagacggtgcagaacattctggtcttccgctttggcaactccctcttcgagccgatctggaaccgcaactacatcaactccgtcgagatcactgcggccgagaccctcggcgtggaacagcgcgcggcgttctacgaagagaccggcgctctccgagacatggtcgccaaccacctgctgcaactggttacgctcacggcgatggagccacccgtggcgttcgatgccgacagtgtccgcgaacagaaggtccaggtgctgcgggcaattcaccacatgacgccggagcaagtgtgcgagcggacggtgcgcgggcaatacgggcccgggaagatcaacgggaaggacgtgccggggtatcgcgaagagccgggcgtgaaaccggactcgcgcacggagacgtacgtcgcggtggagttccgcatcgacaactggcgctgggctggagttcccttctacgtgcgcagcggcaagcgactggcgaagtcggagaccgagatcaagatccacttcaagcgcactccacaggcgctgttcgccaagacatcggacgacgatatcgaggcaaacgtgatcacgttgcgggtgcagccgaatgaaggcatcaccatgtcgttcgcagcgaagcagccgggcgcacagatgaaggccgttccggtgaagatggacttcagctaccaaacggcgtttggcggacaagcacctgtcgcttacgagacgcttctcctcgacgcgatgcgcggcgatccgacgttgttcacccgcggtgacgaagctgagaaccagtggcgcatcatcacgccgatcgaagatgcctggctgcagttgccggtgccgaagttccccaactacgcggcaggaagcgatggtccggaggaggcgaacacgctgatcgcggaagagtgcaagaagtggtcgccgattgggtag

SEQ ID NO: 17086 - protein, 514 aa, Acidobacteria bacterium Ellin345
MSTVVQATPTRSIAIPPMPKAEPCTIVIFGASGDLTKRKLIPALYDLACIGCISGQQFDVLGTGRTEMTTDEFRKAMRDAASTSKDARKFSDWNWEEFEKRLHYFPGDINNDGFYHALKDQLSEIEKNGGSSNHLFYVSTQASLAPPIVQGLGKCGLSKNEKGWTRIVLEKPFGRDLESAKALNREVLQVFDEKDVYRIDHYLGKETVQNILVFRFGNSLFEPIWNRNYINSVEITAAETLGVEQRAAFYEETGALRDMVANHLLQLVTLTAMEPPVAFDADSVREQKVQVLRAIHHMTPEQVCERTVRGQYGPGKINGKDVPGYREEPGVKPDSRTETYVAVEFRIDNWRWAGVPFYVRSGKRLAKSETEIKIHFKRTPQALFAKTSDDDIEANVITLRVQPNEGITMSFAAKQPGAQMKAVPVKMDFSYQTAFGGQAPVAYETLLLDAMRGDPTLFTRGDEAENQWRIITPIEDAWLQLPVPKFPNYAAGSDGPEEANTLIAEECKKWSPIG

SEQ ID NO: 17087 - DNA, 1452 bp, Silicibacter sp. TM1040
  CDS (1)..(1452): transl_table=11
atggtatcccgcgtcatccccgtcgacagtttcgacttcgtcttgttcggcgccaccggcgaccttgcccgacgcaagatcctgccaagcctgttccaccgctttcagatcggccagttcgacgacaacagccgcatcatcggggcctcgcgttccaagatggatcagggtgagtttcagaccctcgtgggcgatgcgctcaaggaattcggcgacatccccgccgatgcagaaccagatgtggagcggtttctgtcgcttctggattacgcatcggtagatgccaagggcgatggcggctggtcggatctgggcagcaagctgcgcgatggcgtagtgcgggcgttttatctctcggtcgcgccttcgctctttggcgacatcgccgggcggctcaaatccacgggtatcgcggacgaccagagccgcatcgtggtggaaaaacccttcggtcacgatctggcctcggcacaggcgttgaatgcggccctgcgcgagcactttgaggaaagccagatctaccggatcgaccactaccttggcaaagagacggtgcagaacctgatggcgctgcgctttgccaattcgctttttgagccgcagtggaattcgcatcacatcgaccatgtgcagatcaccgtctccgagagcatctcggttgcgggtcggggcgagtattacgacaaatccggcgccatgcgggatatggtgcagaaccacctgatgcagcttctgtgcctcaccgcgatggagcctccctccacctttgaacccaatgcggtgcgcaatgaaaaactcaaggtaatcgagagcctcgtacccgtggccgcagatgacatcgtgcgcggccagtatcgcgccaaatctgggaacgacagctaccttgaccacgcaggtgacccgcagtcgcgcaccgagagctttgtcgcgatgaaggtcgaggtggcaaactggcgctgggcagggacaccgttctacctgcgcaccggcaaatgcttgcgcgagcgcgtgtcggagattgcggtgtattttcgcaaaccgccgcacaatatttttggcgaggacaatgcgattgatggcaatatgctggtcattcgcctgcaacccgacgaaggcatcacgctcaagaccacgatcaaggatcccggccccggaggcatgcgcctgacgtctgcggacctcgatatgacctttgctgacagcctgcccgaagcgggtcgcccgcaggacgcctatgagcgcctcatcatggatgtgatccggggcaatcagaccctgttcatgcgcggcgatgaggtcgaagctgcctggacctgggccgacccgatcatcaacgcgtgggacacatccacccgcgcgccgcaaccctatgaccaaggtggctccggccccgaggatgcgcttttgctgctgcaccgggatggccgccgctggcgctccatcggtgcctga

SEQ ID NO: 17088 - protein, 483 aa, Silicibacter sp. TM1040
MVSRVIPVDSFDFVLFGATGDLARRKILPSLFHRFQIGQFDDNSRIIGASRSKMDQGEFQTLVGDALKEFGDIPADAEPDVERFLSLLDYASVDAKGDGGWSDLGSKLRDGVVRAFYLSVAPSLFGDIAGRLKSTGIADDQSRIVVEKPFGHDLASAQALNAALREHFEESQIYRIDHYLGKETVQNLMALRFANSLFEPQWNSHHIDHVQITVSESISVAGRGEYYDKSGAMRDMVQNHLMQLLCLTAMEPPSTFEPNAVRNEKLKVIESLVPVAADDIVRGQYRAKSGNDSYLDHAGDPQSRTESFVAMKVEVANWRWAGTPFYLRTGKCLRERVSEIAVYFRKPPHNIFGEDNAIDGNMLVIRLQPDEGITLKTTIKDPGPGGMRLTSADLDMTFADSLPEAGRPQDAYERLIMDVIRGNQTLFMRGDEVEAAWTWADPIINAWDTSTRAPQPYDQGGSGPEDALLLLHRDGRRWRSIGA

SEQ ID NO: 17089 - DNA, 1545 bp, Myxococcus xanthus DK 1622
  CDS (1)..(1545): transl_table=11
atggacgcgcatcagggcctgcacatcgagacccatccccgagaaggagacccgctggttcgcgcccggcggcccgacccgtgcgcgctggtgttgttcggcgccaccggagacctggcccagcgcaagctgttcccggccctcttcgagttggcgcgagcccacctgctgccgaagaacttcgccgtcgtcgccttcagccgctccgaaggagacagcgaggccttccgcgagcatgtgaaggcgtccctgctgaagttcgcccgcacccagcccctggacgaggccgtctggaacgacttcgccccgcgcctggagctcatctccggcggctatgacgacccgaagtccttcgtgcgcctgcgcgaggagctcgaccgggtcgcccagaagttcggcacccagggcaaccagttctattacctggccactccggcctccaccttcccccaaatcctccagggcctgtcggagtcggggctgctgaagcgccaggaacaggccgacccgcgcccgtggcagcggctcatcatcgagaagcccttcggccacgatttggagagcgcccgcgcgctcaaccgtgagctggcggcggtgctggacgagcggcagatattccgcatcgaccactacctgggcaaggagacggtccagaacatcctcgtcttccgcttcgccaatgccatcttcgagccgctgtggaaccggcagcacatcgaccacgtggaaatcaccgcggcggagacgctgggggtggaggggcgcggcggcttctacgacgagacgggcgtcatccgggacatggtgcagaaccacctgctccaggtgctcgcgctgtgtgcaatggaaccgcccgtgtccttcggcgccgaggacatccgcgacgaaaagaccaaggtcttccgcgcgctgcgcccgctggagggccgcgaggtgtcccgcgcggtggtggccggccagtacgagggttacctccaggagaagggcgtgaaggccggctcgcgcacgccgacctatgtcgccatgaagatgaacatcgacaactggcgctgggcgggcgtgcccttctatctgcgcgcgggcaagaagctgaagcggcgcgtgacggaggtgtccatccacttcaaatcggtgcccatcagcctcttctccggggaaggcgccacctgccagcggctgcagcccaacgtgctcacgctgcgcatccagccccaggaaggcatcgcgctctccttcgaatccaaggtgccgggcgaggatgtcaacatcgcgggcgtcaccatggacttcaactatcaggagaccttccagcggccggtccccgaggcctacgagcgcctgctgctggactgcatgcgcggcaacgccaccctctacgcgcggcaggacagcgtggagcaggcgtggaccttcgtgacgcccatcctccaagccctggagtccggcgagggcggaccggcgcacggctaccccggtggcagcgcgggcccggatgccgcggccgcgctgctggcccgcgatggccgccggtggaccggcctatga

SEQ ID NO: 17090 - protein, 514 aa, Myxococcus xanthus DK 1622
MDAHQGLHIETHPREGDPLVRARRPDPCALVLFGATGDLAQRKLFPALFELARAHLLPKNFAVVAFSRSEGDSEAFREHVKASLLKFARTQPLDEAVWNDFAPRLELISGGYDDPKSFVRLREELDRVAQKFGTQGNQFYYLATPASTFPQILQGLSESGLLKRQEQADPRPWQRLIIEKPFGHDLESARALNRELAAVLDERQIFRIDHYLGKETVQNILVFRFANAIFEPLWNRQHIDHVEITAAETLGVEGRGGFYDETGVIRDMVQNHLLQVLALCAMEPPVSFGAEDIRDEKTKVFRALRPLEGREVSRAVVAGQYEGYLQEKGVKAGSRTPTYVAMKMNIDNWRWAGVPFYLRAGKKLKRRVTEVSIHFKSVPISLFSGEGATCQRLQPNVLTLRIQPQEGIALSFESKVPGEDVNIAGVTMDFNYQETFQRPVPEAYERLLLDCMRGNATLYARQDSVEQAWTFVTPILQALESGEGGPAHGYPGGSAGPDAAAALLARDGRRWTGL

SEQ ID NO: 17091 - DNA, 1572 bp, Mycobacterium sp. MCS
  CDS (1)..(1572): transl_table=11
atggtggcggtgaaccggccggtccccggagtgccgactcccgccccggcgggttggcggaatccgctgcgtgacaaacgcgataaacgcatgccccggatcgccgggccgtgcggtgtggtcatcttcggggtcaccggcgatctgtcccgcaagaagctgatgccggcgatctacgacctggccaaccgggggctgctgcccgcgtcgttctcgctcgtcgggttcgcccgaagggactgggccgacgaggatttcgggcaggtcgtctatgaggcggtcaagaagcacgcccgcaccccgttccgccaggaggtgtgggaccggctggccgagggaatccggttcgtccagggcacattcgacgatgaagccgccttcgccactctcgccgaaaccctggagaagctcgacgtcgaacgcggcaccggcggcaatcacgcgttctacctgtcgatcccgccgaaggcgttcccggtggtctgcgaacagctgcgtagatccgggctggcgcgtccccaggagggccgctggagccgggtggtgatcgagaagccgttcggccacgacctcgagagcgcggtcgaactcaactcggtggtgaacagcgtgttccccgaggagtcggtgttccgcatcgaccactacctcggcaaggagaccgtgcagaacatcctggcgctgcggttcgccaatgaactgtacgagccggtctggaacaacaactacgtcgaccacgtccagatcacgatggccgaggacatcggattgggcgggcgcgcaggctattacgacggcatcggcgccgcccgcgacgtgatccagaaccacctgctgcaactgttggcgctgacggcgatggaggaaccggtcagcttccatccccacgagctgcaggccgagaagatcaaggtgctctccgcggtgcggttggctcaacccctcgaccagaccacctcccgcggtcagtacaccggcgggtggcagggcggtgagaaggtggtcggcctgcacgacgaggaggggttctccaagacgtcgacgaccgagacgttcgccgcgatcaccctcgacatcgacacccgccgctgggccggggtgccgttctatctgcgcaccggaaaacggctgggccgcagggtcaccgagatcgcgctggtgttccgccgggcgccgcacctgccgttcgacgcgacgatgaccgaggaactgggccagaacgcgctggtgatccgggtgcagcccgacgagggcatcacgctgcggttcggctccaaggtgccgggcagcgcgatggaggtccgcgacgtcaacatggacttctcctacgggtcggcgttcgccgaggattcccccgaggcctacgagcggttgatcctcgacgtgctgctcggtgaaccgtcgctgttcccggtcaacgccgaggtcgaactgtcctggaacatcctggatccggtgctggactactgggcttcgcacggcaagccggatccgtacgagtcgggcacgtgggggccggagtcggcgttcgagatgctgcggcgagacggccgcgaatggaggcggccgtga

SEQ ID NO: 17092 - protein, 523 aa, Mycobacterium sp. MCS
MVAVNRPVPGVPTPAPAGWRNPLRDKRDKRMPRIAGPCGVVIFGVTGDLSRKKLMPAIYDLANRGLLPASFSLVGFARRDWADEDFGQVVYEAVKKHARTPFRQEVWDRLAEGIRFVQGTFDDEAAFATLAETLEKLDVERGTGGNHAFYLSIPPKAFPVVCEQLRRSGLARPQEGRWSRVVIEKPFGHDLESAVELNSVVNSVFPEESVFRIDHYLGKETVQNILALRFANELYEPVWNNNYVDHVQITMAEDIGLGGRAGYYDGIGAARDVIQNHLLQLLALTAMEEPVSFHPHELQAEKIKVLSAVRLAQPLDQTTSRGQYTGGWQGGEKVVGLHDEEGFSKTSTTETFAAITLDIDTRRWAGVPFYLRTGKRLGRRVTEIALVFRRAPHLPFDATMTEELGQNALVIRVQPDEGITLRFGSKVPGSAMEVRDVNMDFSYGSAFAEDSPEAYERLILDVLLGEPSLFPVNAEVELSWNILDPVLDYWASHGKPDPYESGTWGPESAFEMLRRDGREWRRP

SEQ ID NO: 17093 - DNA, 1533 bp, Rubrobacter xylanophilus DSM 9941
  CDS (1)..(1533): transl_table=11
atgagcggcgtccgggaagagctgcgggacgcgctggccgacgagcggcgcatcccgcgcccgcccgagccggccgcgatggtcatcttcggggcctcgggggatctgacggcccgcaagctggtcccggccctctacgacctggcggcggcccggaggctgcccatgggcttcgcggtggtgggcgtctcccgcacgaagatgagccacgagcagttccggcagcggctgcgcggctcgctcgagcgccaccgcgcggggggcttcagcgaggaggtgtgggagagcttctcccgcagcatcttctacctccccggcgactcccggcggcccgagacctacggggagctccgggggctcctcgagcggctcgacgccgggcgggggaccggcggcaaccgcatcttctacctggcctcctcgccctccctcttctccccgaccgtcgagcggctcggggaggccgggatgagccgcgagggcgggggctcctacgtccggctcgtggttgagaagcccttcgggcgcgacctcgagagcgcccggcggctcaacgccgacctgctgcggcacttccgggaggaccagatctaccggatcgaccactacctgggcaaggagaccgtgcagaacatcctggccctgcgcttcgcaaacgggatcttcgagcccgtgtggaaccagcactacgtggaccacgtccagatcacggtggccgaggacatcgggatagaggggcggggggccttctacgaggaggccggcgccctgagggacatcgtgcagaaccacatgatgcagctgctgtgcctcaccgccatggagccgccggtggccttcgacgccgagccggtgcgcgacgagaaggtgaaggtgctcagcgccgtccggcccatcccggaggagcgggtggaggaggtggcggtgcgggggcagtacgggtccggctggatctggggtgaggaggtgagggcctaccgggaggaggagggggtcgctcccgactccgccaccgagacctacgcggccctcaagctctacgtagacaactggcggtgggccggggtgcccttctacgtgcgcaccggaaagcggctccccaagaaggtcaccgagatcgccatccgcttcaagcccacccctcacacccccttcgcccgcgccgcgggcgccgagcccaacgtgctcgtgatccgcatccagcccgaggagggggtctcgctcaagatcggggccaagatcccgggctccggtttcgaggtcggctcggtgaacatggacctgctctacggtacggcctttctggaggaggttcccgaggcctaccagcgcctgctgctggacctgatgctcggcgacgcgacgctgtttatccgggcggacgaggcggaggcggcctggtccatcctggaccccgtgctgcgcgcctggtcgggggcggaggacgtcccggtctacccggcgggctcctgggggcccgcggaggccgacgacctgctccggcgcgacgggagggggtggcggaggccgtga

SEQ ID NO: 17094 - protein, 510 aa, Rubrobacter xylanophilus DSM 9941
MSGVREELRDALADERRIPRPPEPAAMVIFGASGDLTARKLVPALYDLAAARRLPMGFAVVGVSRTKMSHEQFRQRLRGSLERHRAGGFSEEVWESFSRSIFYLPGDSRRPETYGELRGLLERLDAGRGTGGNRIFYLASSPSLFSPTVERLGEAGMSREGGGSYVRLVVEKPFGRDLESARRLNADLLRHFREDQIYRIDHYLGKETVQNILALRFANGIFEPVWNQHYVDHVQITVAEDIGIEGRGAFYEEAGALRDIVQNHMMQLLCLTAMEPPVAFDAEPVRDEKVKVLSAVRPIPEERVEEVAVRGQYGSGWIWGEEVRAYREEEGVAPDSATETYAALKLYVDNWRWAGVPFYVRTGKRLPKKVTEIAIRFKPTPHTPFARAAGAEPNVLVIRIQPEEGVSLKIGAKIPGSGFEVGSVNMDLLYGTAFLEEVPEAYQRLLLDLMLGDATLFIRADEAEAAWSILDPVLRAWSGAEDVPVYPAGSWGPAEADDLLRRDGRGWRRP

SEQ ID NO: 17095 - DNA, 1473 bp, Mesorhizobium sp. BNC1
  CDS (1)..(1473): transl_table=11
atgacgagccaaacgataccggtagagccttttgatctcgtggtcttcggggcaacaggtgacctttgcgaacgaaagctgctgcccgccctctaccagcgccagcgtgccggccaattcagcgagccgacacgcattatcggctcttcccgctcagagttgagcgacgaccaataccgctctttcgcactggatgcgatcaaagcgcatgtggccaaggccgaaatcgacaatcgtgagctcgaccggtttcttacccgagtttcctacgtgtcggcggacgccaccacgggccgaggctttaaagagctgaaggcggcaatcggagatagcgcgaatgtccgcgcattctatctcgccgttgctccttccctgttcggcagcatcgtcgcccaaatcgatgctcaccatatcgcgacgccgacctcgcgcgtcatcgttgaaaagccgatcggacgaagcctggaaactgcgcgggaggtcaacgattcgataggccgggttttcgatgaggcccggattttccgcatagaccattatctcggcaaggagacggtccagaacctgatggcgctgcgctttgccaacgcgctttatgagccgctctggaattcggcccatgtggatcacgtacagatcaccgtcgccgaatccgtcggcctggaaggcagagccggctactacgacaaagccggcgccctgcgcgatatggtgcagaaccatatgctgcagctcctctgcctcgtcgctatggaagtgcctgcctctctggatgccgatgccgtccgcgacgaaaagctgaaagtgctgcgtgccttgaggccgatcaatcagctcaattcggagcgcgtgacggtgcgcgggcaatatcgggcaggtgcttcgaatggcggcgcggtgaaaggctatttggaagagcttgggaatggcgggagcgacacggaaacctttgtcgcagtgaaggcggagatcggcaattggcgctgggcagacgtgcccttttatctgcgcaccggcaaacgcatggccacgcgcgtttccgaaatcgtcatccagttcaagcccattccccactcgatcttcggcgatgcggcaggccgaatctttgccaaccagctcgtcattcgcctgcagccggatgaaggtgtcaaacagtggatcatgatcaaggatcccggtccgggcggcatgcggctgcggcagatcccgctggacatgagctttgcggaatcctttcacgagcgcaatccggatgcctatgagaggctgatcatggatgtaatccgcgggaaccagacactcttcatgcgccgcgacgaggtggaagctgcctggcggtggatcgacccaatccatgcggcatgggaggagcgtagccagtcggtgcagccctataccgcaggcacttggggcccctcagcgtcgatcgccctcatcgaacgtgacggtcgcacctggcatgagagcttctga

SEQ ID NO: 17096 - protein, 490 aa, Mesorhizobium sp. BNC1
MTSQTIPVEPFDLVVFGATGDLCERKLLPALYQRQRAGQFSEPTRIIGSSRSELSDDQYRSFALDAIKAHVAKAEIDNRELDRFLTRVSYVSADATTGRGFKELKAAIGDSANVRAFYLAVAPSLFGSIVAQIDAHHIATPTSRVIVEKPIGRSLETAREVNDSIGRVFDEARIFRIDHYLGKETVQNLMALRFANALYEPLWNSAHVDHVQITVAESVGLEGRAGYYDKAGALRDMVQNHMLQLLCLVAMEVPASLDADAVRDEKLKVLRALRPINQLNSERVTVRGQYRAGASNGGAVKGYLEELGNGGSDTETFVAVKAEIGNWRWADVPFYLRTGKRMATRVSEIVIQFKPIPHSIFGDAAGRIFANQLVIRLQPDEGVKQWIMIKDPGPGGMRLRQIPLDMSFAESFHERNPDAYERLIMDVIRGNQTLFMRRDEVEAAWRWIDPIHAAWEERSQSVQPYTAGTWGPSASIALIERDGRTWHESF

SEQ ID NO: 17097 - DNA, 1479 bp, Rhodococcus sp. RHA1
  CDS (1)..(1479): transl_table=11
atgtcaccagcgaccaccgtggaaccgtgcgatttcgtcgtgttcggcgggaccggcgacctggcggttcgtaagctgcttcctgcgctctacctgcgcgacagggacggccagctgcccgcagaaacccgcgtgatcggtgcctcgcgagccggtctcgacaccgacggctaccgcgacaaggtgcgaggagaactcgcgcggttcgtctccggcgatcagctggattcggacacctgtgagcgatttctcaatcgcctcgaatacgtctccgtcgacgccggggaccccgagaactgggcgggcctcagcgagtgcctcgccgcgcgggaaggggcgatccgggtcttctatctggcctgcgctcccggactgttcgggccgatctgtgacaacctcgccctgaacggtctcgccgacgcacagtcccgcgtcgtgctggagaagccgatcggacacgacctcgcctcggcccgcgccgtcaacgacgcagtcggcgccgtgttcgaggaatcgcagatcttccgcatcgaccactatctcggcaaggagagcgtccagaaccttctggtcacgcgattcgccaacacgttcctcgaaccgctgtggaactcctcgtcgatcgaccacgtgcagatcaacgtcgccgagtcgctcggagtcggcagtcgcggcggctactacgagtcggcgggtgccctgcgcgacatgctgcagaaccacctcctgcagatgctctgcctcgtcgcgatggaaccgcccacctacgtcgaccgcgagaccgtgcgagacgagaagctcaaggtcctccaggccctcaagccgatgagcccgcaggacgtcgaacgctgcaccgtcgcaggccagtacggccccggcctggccgacgggatcgccgtccccggataccaggaggacgtcgagaacccggcgagcaccaccgagacgttcatcgccgtcaaggccgagatccagaactggcgttgggccggcgtgccgttctacctgcgcaccggcaagcgcatggaccggcgctgctcggagatcgtggtgcagttcaagcccgttccgcaccccatgttccccggcagcgagggccacagcgaacccaaccgcctggtgatccagttgcagcctcacgagggcatgcggttgcacatgacggcgaaggaacccggccccggcggtatccggctcaagcccgtgtcgttggacctcaactacatcgaaacgttcaagcgtccgtcgcccgacgcctacgagcggctgctgatggacgtggtccggggtaacccgaccctgttcatgcgccgcgacgaggtcgaggccgcctgggagtgggtcgagcagatcctcgtcggctgggagaagtccgagcgcgccccgcgccgctacccggcgggcaccaacggacccaccgacgcgaccaccctgatcgagcgcgacggccgcgcctggcacgaaggagtcaccgcatga

SEQ ID NO: 17098 - protein, 492 aa, Rhodococcus sp. RHA1
MSPATTVEPCDFVVFGGTGDLAVRKLLPALYLRDRDGQLPAETRVIGASRAGLDTDGYRDKVRGELARFVSGDQLDSDTCERFLNRLEYVSVDAGDPENWAGLSECLAAREGAIRVFYLACAPGLFGPICDNLALNGLADAQSRVVLEKPIGHDLASARAVNDAVGAVFEESQIFRIDHYLGKESVQNLLVTRFANTFLEPLWNSSSIDHVQINVAESLGVGSRGGYYESAGALRDMLQNHLLQMLCLVAMEPPTYVDRETVRDEKLKVLQALKPMSPQDVERCTVAGQYGPGLADGIAVPGYQEDVENPASTTETFIAVKAEIQNWRWAGVPFYLRTGKRMDRRCSEIVVQFKPVPHPMFPGSEGHSEPNRLVIQLQPHEGMRLHMTAKEPGPGGIRLKPVSLDLNYIETFKRPSPDAYERLLMDVVRGNPTLFMRRDEVEAAWEWVEQILVGWEKSERAPRRYPAGTNGPTDATTLIERDGRAWHEGVTA

SEQ ID NO: 17099 - DNA, 1545 bp, Rhodococcus sp. RHA1
  CDS (1)..(1545): transl_table=11
gtgagcgaacccgcagcgtcagacgattgggtcaatccactccgcgacggtagggacaagcgcctaccacgcatcgccgggccgtgtgcgctggtgatcttcggtgtcaccggcgacctggcccggcgcaagttgatgcccgccatctacgatctggccaatcgtggtcttctgccgcccgggttcgctctcgtcgggttcgcccgcagggattggtcggacgaggacttcggcaagatcgtccacgatgccgtccgcgaccattcccgcaccccgttccgggaggacgtctgggagcgactgtcggagggcctgcgtttcgtcaagggcagcttcgacgacccggcggccttccaggaactggcccacactctcgggacactggaacgcgaacgcgggaccggcggcaatcacgggttctatctcgcgattccgccggacgcgttcccggtcgtcctgaagcagctgtccgaggccggtctcgcgcagtcgaacgacgaccagtggcgtcgggtagtcatcgagaagccgttcggtcacgacctcgcgagtgcacgtgagctcaacgcggtcgtgaacgaggtcttccctgaggacacggtcttccggatcgaccactacctcggcaaggaaaccgtccagaacatcctggcgttgcgcttcgcgaaccagttgttcgatccgatctggaacgcccactacgtggatcacgtccagatcaccatggccgaggacatcggtctcggtggacgcgccgggtactacgacggcatcggggcggcgcgcgacgtcatccagaatcacctgctgcaactcctcgcgttcaccgcgatggaggagccgatcagcttcgaaccgtccgagttgcaggcggagaagatcaaggtgctctccgccaccaggctcgcccagccgctcgacgagaccaccgcgcgcggccagtacgcgggcggctggcagggcggtacccgggtggtcggactgctggaggaggaagggttctcgaaggactccaccacggaaacgttcgcggccatcaccctcgaggtcgacacccgccgctgggcgggggtgccgttctacctccgcaccgggaagcggctcggccgtcgggtcaccgagatcgccgtgatcttcaagcgcgcaccgcatctgccgttcgatcagaccatgaccgaggaactggggcagaacgccctcgtcatccgggtgcagccggacgagggtgtgaccatgcggttcgggtccaaggtcccggggtcgagcatggaagtccgcgacgtcaacatggacttcagctacggtcaggcgttcacggagtcgtcgcccgaggcgtacgagcgcctcatcctcgacgtgctcctcggtgagccctcgctgttccccgtgaacgccgaggtggaactgtcctgggaaatcctcgaccccgtgctcgagcactgggccgcggacggcaggccggaaccgtacgaggccggcacgtggggcccgccgtcggcagacgaaatgatgcaccgcaccggtcgcgaatggagaaggccgtag

SEQ ID NO: 17100 - protein, 514 aa, Rhodococcus sp. RHA1
MSEPAASDDWVNPLRDGRDKRLPRIAGPCALVIFGVTGDLARRKLMPAIYDLANRGLLPPGFALVGFARRDWSDEDFGKIVHDAVRDHSRTPFREDVWERLSEGLRFVKGSFDDPAAFQELAHTLGTLERERGTGGNHGFYLAIPPDAFPVVLKQLSEAGLAQSNDDQWRRVVIEKPFGHDLASARELNAVVNEVFPEDTVFRIDHYLGKETVQNILALRFANQLFDPIWNAHYVDHVQITMAEDIGLGGRAGYYDGIGAARDVIQNHLLQLLAFTAMEEPISFEPSELQAEKIKVLSATRLAQPLDETTARGQYAGGWQGGTRVVGLLEEEGFSKDSTTETFAAITLEVDTRRWAGVPFYLRTGKRLGRRVTEIAVIFKRAPHLPFDQTMTEELGQNALVIRVQPDEGVTMRFGSKVPGSSMEVRDVNMDFSYGQAFTESSPEAYERLILDVLLGEPSLFPVNAEVELSWEILDPVLEHWAADGRPEPYEAGTWGPPSADEMMHRTGREWRRP

SEQ ID NO: 17101 - DNA, 1530 bp, Trichodesmium erythraeum IMS101
  CDS (1)..(1530): transl_table=11
atggtagcagtattagaaaatcctctgcgagttggactacaacaagaccgggttccagaaccacaaattatgattatttttggtgcatccggtgatctaacccagagaaaacttgttccagcattatatcaaatgaagctagaacggagacttcctcctgaactaacaatagtgggagttgctcgcagagaatggagccatgattacttccgcgaacaaatgaagataggtgtagaagaatttggtggtggcttacaatctgaagaactgtggaatgattttgctaaggggattttttactgccctggtaatatagatcaaccagaagattatcaaagactcaaaaaacttttgagtcaattggacgaagagagaggtacgcgaggtaatcgcgtattttacttgtctgtagctccccgatactttggagaagcaacccaacagttaggggcagcaggaatgttagttgatcctaaaaagcaaagattagtaattgaaaaaccctttggtagagacctcagttcagctcaggtactcaataaaattgtgcgtcaagtttgccccgaagagcaaatataccgtattgaccattatctagggaaagaaactgttcaaaacttaatggtatttagatttgcaaatgctatttttgaacctctgtggaaccgtcaatttgttgataatgtccaaatcactgttgcagaaacggtagggttagaaggacgtgctggatattatgaaacatcaggtgcattgcgggacatggtacaaaaccacctgatgcagctattctccctgacagcaatggaacctcctaattctttagatgctgacagtattcgcaatgaaaaagtaaaagtagttcaggcaacccgcctagcaaatttagagcgtttagaatattcagcaattcgtggtcagtatacacagggttggatgaaaggtaaaagtgtaccagcttatcgggaagagggaggagcaaatcctaactctacaacacctacgtatgcagcactgaaactcaatattgataattggcgctggaaaggggtaccattttatttgcggactggcaagcgaatgccaaaaaaagtctcagaaattgctattcagtttaaagaagtaccgtttctgatgtttcagtcagcggcaaaacaagcgaatcctaatgtcttggctttacgcatccagcctaatgaaggggtatcaatgcgttttgaagtcaaaacaccaggtagttccctgcgaactcgctcagtagatatggattttcgttacgatactgcttttggtaagcctagtacagatgcttacagtcgtttgttggttgactgtatgttaggagaccaaaccttatttactcgtggcgatgaagtagaagcatcttggcgagcattaacaccaatacttagcatctgggatgctcctgctccaccagaagtcatacctttgtatgaagcaggcacctgggggccagttgaggctgaactgttgctcaaccaagatggtcgtcgttggcgccgactttga

SEQ ID NO: 17102 - protein, 509 aa, Trichodesmium erythraeum IMS101
MVAVLENPLRVGLQQDRVPEPQIMIIFGASGDLTQRKLVPALYQMKLERRLPPELTIVGVARREWSHDYFREQMKIGVEEFGGGLQSEELWNDFAKGIFYCPGNIDQPEDYQRLKKLLSQLDEERGTRGNRVFYLSVAPRYFGEATQQLGAAGMLVDPKKQRLVIEKPFGRDLSSAQVLNKIVRQVCPEEQIYRIDHYLGKETVQNLMVFRFANAIFEPLWNRQFVDNVQITVAETVGLEGRAGYYETSGALRDMVQNHLMQLFSLTAMEPPNSLDADSIRNEKVKVVQATRLANLERLEYSAIRGQYTQGWMKGKSVPAYREEGGANPNSTTPTYAALKLNIDNWRWKGVPFYLRTGKRMPKKVSEIAIQFKEVPFLMFQSAAKQANPNVLALRIQPNEGVSMRFEVKTPGSSLRTRSVDMDFRYDTAFGKPSTDAYSRLLVDCMLGDQTLFTRGDEVEASWRALTPILSIWDAPAPPEVIPLYEAGTWGPVEAELLLNQDGRRWRRL

SEQ ID NO: 17103 - DNA, 1524 bp, Synechococcus sp. CC9311
  CDS (1)..(1524): transl_table=11
atgaccgcaacgatcacgaacccactgagggttgggctgcgacaggaacgagtcatcgctccgcagtgcctggtgatttttggagcgagcggcgacctcacccatcgcaagctggttccagccctcttcgagttatttcagcaacgacgacttcccagcgaatttgccatcctgggttgcgccagaaggccttggagcgacgacgaattccgcagcaaaatggcggaggccatgggagacaaggttcgcgaccatcccgaggcatgggagcaatttgcagccgggatgttttatgagccggtggatcttcagaaaccggaagacgtcgtgaagctcgggggtcgcctgcaggagatcgaccgtctgagagccacacgaagcaaccgcaccttttacctctcggtgtcaccgaagttttatgcgagcggctgccgagccctcgccgatgcagacctcttaaaagatccccaacgaagtcgcgttgtcattgaaaaaccattcggacgggactacggcagcgcccaatccctgaacagagtggttcaaggctgcggccaagagaaccaaatctttcgcatcgaccactacctcgggaaggaaacggtccaaaacatcatggtgatgcggttcgccaacgcgattttcgaaccaatctggaatcgcaactacatctcaagtgtgcaaattactgcctctgaaaccgttggggttgaggaacgggccgggtactacgaaacctcgggtgcactgcgcgacatggtgcaaaaccacctgacccaaatgttggcgattaccgccatggaaacccctgggcgctttgatcccgaggccatccgcagtgagaaagccaaggttcttcaagctgcacgcctggccgatgaacttgaaccctggaactgctgcgttcgcggacaatacgggcctggaggcagcgacggttcacctctcagtggctaccggcaagaaccaggcgtcgatccgcagagcaccacggaaacttacgtgtcgatgaagctgttcatcgacaactggcgctggcagggcgttcctttctatgtgcgcaccggcaagcgccttgccaagcgtctaagcgaagtggttttgactttccgtgaagcacccgtccacctcttcgatgctgcaggtggcagtccaacagccaatcagctcatcctgcgaattcagcccgatgaaggagctgaattcaaatttgaagtgaagtctccaggctccggtatgcgcagccggcctgtcgagatggaattttcctatgacgaatccttcggggagccatcagatgagggctatgtgcgccttctggccgacgccatgttgggcgatccaacgctcttcactaggagtgatgaagtggaggcagcttggaggctttacaccccgctgctggaactgatcgaagacagtccctggaaactgcccatccatccctacgagtcacgcacttggggacctgccgctgccgatgcgctgctagcccgagacggcctgctctggcgtcgcccctaa

SEQ ID NO: 17104 - protein, 507 aa, Synechococcus sp. CC9311
MTATITNPLRVGLRQERVIAPQCLVIFGASGDLTHRKLVPALFELFQQRRLPSEFAILGCARRPWSDDEFRSKMAEAMGDKVRDHPEAWEQFAAGMFYEPVDLQKPEDVVKLGGRLQEIDRLRATRSNRTFYLSVSPKFYASGCRALADADLLKDPQRSRVVIEKPFGRDYGSAQSLNRVVQGCGQENQIFRIDHYLGKETVQNIMVMRFANAIFEPIWNRNYISSVQITASETVGVEERAGYYETSGALRDMVQNHLTQMLAITAMETPGRFDPEAIRSEKAKVLQAARLADELEPWNCCVRGQYGPGGSDGSPLSGYRQEPGVDPQSTTETYVSMKLFIDNWRWQGVPFYVRTGKRLAKRLSEVVLTFREAPVHLFDAAGGSPTANQLILRIQPDEGAEFKFEVKSPGSGMRSRPVEMEFSYDESFGEPSDEGYVRLLADAMLGDPTLFTRSDEVEAAWRLYTPLLELIEDSPWKLPIHPYESRTWGPAAADALLARDGLLWRRP

SEQ ID NO: 17105 - DNA, 1473 bp, Shewanella sp. MR-4
  CDS (1)..(1473): transl_table=11
atgggcaaaacaacatcaggcgccaaagcttgtgacttcgtactctttggtactaaaggcgacttggcacgacgcaagttgttaccttctttataccagctagataaagctgaacttctggataaaaacaccaaagtcattggggttgccaaagatgagttcagtcaggatgaatttagagaactcgtcatccttgcgttaaaaaccttcgtaaaagaaccgctctgcgaagagactgtcgaacgtttcttgtcccgctgccattatgtcggcacgaatttcaccgaatctgcaggctacagcgccttccatgaattgctcaaaccagaagagcgcgtcatggtcagttattttgccacccctcctgcgatttttggtgatatctgccgctgtctacacgaacaaaatcttatccatagcgattctcgcgtggtactcgaaaagcccattggctctgatctcgcttcttcccgcgtgattaacgatcaagtttctgcctacttcaaagaaaaccaagtttatcgtatcgaccattacttaggtaaagagacggtccaaaacctgattgcgctgcgttttgctaactcgttattcgcgtctaagtgggacaaccggaccattgaccatgtccagatcaccgttgctgaagaagtgggtatcgaaggccgttggggttacttcgataaagccggtcagatgcgcgatatgatccaaaaccacttactgcaagtgttgacactggttgccatggatcctccggttaacttagatgccgacagtattcgcgatgaaaaagtgaaagtactgaagtcgctgcgcccaattaatgccgacaatgtctatgaaaacactgtccgtggtcagtacagtgccggcttcctcaagggcagtccagttcctgggtatttagaggaagagggcgctaaccttcagtcccacaccgaaacctttgtggcgctgcgtgtcgatatcgacaactggcgttgggcgggcgtgccattttatctgcgtagcggtaaacgcatgccgttcaagagctctgaaattgtggtgtattttaaaaacccaccccacaacttgtatcgctcaagctaccgtaacttgccacctaacaagttaaccatccgtctgcaaccacatgaaggggttgagatccagatgatgaacaaggtgccggggctagagcagaagcaacgtttacaaaccactaaactcgacttgagtttctcggatacctttaaaaatgagcgtatcgccgatgcttacgagcgtctgttgctcgaagccatgctcggtaaccaagcactgttcgttcgccgtgacgaagtagagcaggcttggacttgggtggatggcatcatccaatcatgggaacaaagtaacgagaaaccgaaaccttatcctgcgggcacttggggacctgtagcgtcggtcgcgctgatcaccaaagacggccgttcgtgggatgaatag

SEQ ID NO: 17106 - protein, 490 aa, Shewanella sp. MR-4
MGKTTSGAKACDFVLFGTKGDLARRKLLPSLYQLDKAELLDKNTKVIGVAKDEFSQDEFRELVILALKTFVKEPLCEETVERFLSRCHYVGTNFTESAGYSAFHELLKPEERVMVSYFATPPAIFGDICRCLHEQNLIHSDSRVVLEKPIGSDLASSRVINDQVSAYFKENQVYRIDHYLGKETVQNLIALRFANSLFASKWDNRTIDHVQITVAEEVGIEGRWGYFDKAGQMRDMIQNHLLQVLTLVAMDPPVNLDADSIRDEKVKVLKSLRPINADNVYENTVRGQYSAGFLKGSPVPGYLEEEGANLQSHTETFVALRVDIDNWRWAGVPFYLRSGKRMPFKSSEIVVYFKNPPHNLYRSSYRNLPPNKLTIRLQPHEGVEIQMMNKVPGLEQKQRLQTTKLDLSFSDTFKNERIADAYERLLLEAMLGNQALFVRRDEVEQAWTWVDGIIQSWEQSNEKPKPYPAGTWGPVASVALITKDGRSWDE

SEQ ID NO: 17107 - DNA, 1476 bp, Rhizobium leguminosarum bv. viciae 3841
  CDS (1)..(1476): transl_table=11
atgagcagccaaatcattcccgttgagccctttgattatgtcgtcttcggcggcagcggcgaccttgcagaacgcaagttgctgcccgccctttaccatcgccagatcgaaggccagttcagcgaaccgacccgcgtgatcggcgcctcgcgcagcccgttgacccatgaggaataccgcaaattcgccaaggacgcgctgaacgagcacctgaagaagggtgaatatgacgaggcggaggtgcagaaattctgtgcccgcctctactacgtctcggtcgatgcccgcaccgatgccggctgggatcagctgaagaagctgctcgacgaaggcaaggatcgcgtgcgcgccttctatctggcggtcgcgcccggcattttcggcgacatttcgcagaagatccacgaccacaagctgatcaccaagtcgacccgcatcgtcgtcgagaagccgatcggccgcgacctcgcctcggcgctgcagctcaacgacacgatcggccgcgccttcaaggaagagcagatcttccgcatcgaccattatctcggcaaggagacggtgcagaacctgatggcgctgcgcttcgccaatgcgctctacgagccgctgtggaacgccaactacatcgaccacgtgcagatcaccgtggctgaatcggtcggcctcgaaggccgcgccggctattacgacacggcgggcgcattgcgcgacatggtgcagaaccacatcctgcagctcctctgcctgacggcgatggaagtgccctcgtcgatggattcggaagccgttcgcgacgagaagctgaaggtgctgcgggcgctgaagccgctcaatgcctccaacgtcgagcaggcgacggttcgcggccagtatcgcgccggcgcctcgggcagcggcccggtcaagggctacctcgaagagctcgaaggcggcgtgtcgaataccgagaccttcgttgccatcaaggccgagatcaacaactggcgctgggccggcgttcccttctatatccgcaccggcaagcggctgaccgggcgcatgtccgagatcgtcatcaccttcaagccgatcccgcacgccatcttcgaccaggcggctgggcgcatcaacgccaaccagctgatcatccgcctgcagccggatgagggcgtcaagcagtcgctgatgatcaaggatccaggtccgggcggcatgcgcctgcgcaacgtctcgctcgacatgagcttcgcccaggccttcaacgtccgcaatcccgacgcctacgagcgcctgctgatggacgtgatccgttccaaccagacgctgttcatgcgccgcgacgaagtcgaggctgcatggaaatgggtggatccgatcctcaagggttgggaaacgaccggccagcaggtgcagggctataccgccggcacctggggtccgagccaggccatcgcgctgatcgagcgtgacggccgtacctggcatgacgaaatctag

SEQ ID NO: 17108 - protein, 491 aa, Rhizobium leguminosarum bv. viciae 3841
MSSQIIPVEPFDYVVFGGSGDLAERKLLPALYHRQIEGQFSEPTRVIGASRSPLTHEEYRKFAKDALNEHLKKGEYDEAEVQKFCARLYYVSVDARTDAGWDQLKKLLDEGKDRVRAFYLAVAPGIFGDISQKIHDHKLITKSTRIVVEKPIGRDLASALQLNDTIGRAFKEEQIFRIDHYLGKETVQNLMALRFANALYEPLWNANYIDHVQITVAESVGLEGRAGYYDTAGALRDMVQNHILQLLCLTAMEVPSSMDSEAVRDEKLKVLRALKPLNASNVEQATVRGQYRAGASGSGPVKGYLEELEGGVSNTETFVAIKAEINNWRWAGVPFYIRTGKRLTGRMSEIVITFKPIPHAIFDQAAGRINANQLIIRLQPDEGVKQSLMIKDPGPGGMRLRNVSLDMSFAQAFNVRNPDAYERLLMDVIRSNQTLFMRRDEVEAAWKWVDPILKGWETTGQQVQGYTAGTWGPSQAIALIERDGRTWHDEI

SEQ ID NO: 17109 - DNA, 1467 bp, Pseudomonas aeruginosa UCBPP-PA14
  CDS (1)..(1467): transl_table=11
ttgagtacaccagccactccaacgtcctgcgacatcctggtcttcggcggtaccggcgacctggccctgcacaagctgctgccggcgctctatcgcctgcaccgggaggaccgcctgccggccgatacgcggatcttcgccctcgcccgcagcgcgctggacaacgccgccttcctcgccctcgccgagcgcaacgtccgcgcggtggtggcacgcagcgagttcgccgccgaacaatggaaaggcttcgccgcgcgcctcgactacctggccatggacgcctcgcagagcgccgacttcggccgtctcgcgcggcacctgaagagcagcgagggccgggtgctggtgcactacctggcgacctcgccgagcctgttcgcgccgatcgcgcagaacctctccatcgccggcctcgccgggccgcaagcgcgcatcgtgctggaaaaaccgctgggccattcgctggactcggcgcgggcgatcaaccagtccatcggccgggtgttcgacgagtcgcgggtgttccgcatcgaccactacctgggcaaggaaaccgtgcagaacctgatggccctgcgcttcgccaatgcgttgttcgagccggtctggcgcgcggcgcacatcgaccatgtgcagatcagcgtcaacgagacccttggcgtggagaaccgcggcggctactacgaccacgccggggcgatgcgcgacatggtgcagaaccatctgctccagttgctctgcctggtggcgatggaggcgccggtgcgtttcgacgccgaggctgtgcgcaacgagaagctcaaggtgctgcaggcgctgaagccgatctccgggctcgacgtgcaggacaagacggtacgcggccagtacgccgccggcaggatcggcggccaggaggtgccggcgtactacttcgagaagaacgtcgacaacgacagcgataccgagaccttcgtcgcgctccaggccgaggtcgagaactggcgctgggccggggtgccgttctacctgcgcaccggcaagcgcatggcgcgcaagtgctcggaaatcgtcatccagttcaagccggtgccgcacagcctgatcgacggcggcggcgggccggccaaccgcctgtggataaggttgcagccggaggagcggatcagcgtgcaactgatggccaagaccccgggcaagggcatgcaactggaaccggtggagctggatctcaacctggccgaggccctcagccgcaacaagcggcgctgggacgcctacgaacgcctgctgctggacgtgatcgagggcgactcgacgctgttcatgcgccgcgacgaggtagaggccgcctggggctgggtcgacccgatcctcgccggctggcgcgagcactaccagagcccgcggccctacccggccggcagcaacggcccggaacaggcgcaactgctgctggaactgcagggtcgacgctggctggaatga

SEQ ID NO: 17110 - protein, 488 aa, Pseudomonas aeruginosa UCBPP-PA14
MSTPATPTSCDILVFGGTGDLALHKLLPALYRLHREDRLPADTRIFALARSALDNAAFLALAERNVRAVVARSEFAAEQWKGFAARLDYLAMDASQSADFGRLARHLKSSEGRVLVHYLATSPSLFAPIAQNLSIAGLAGPQARIVLEKPLGHSLDSARAINQSIGRVFDESRVFRIDHYLGKETVQNLMALRFANALFEPVWRAAHIDHVQISVNETLGVENRGGYYDHAGAMRDMVQNHLLQLLCLVAMEAPVRFDAEAVRNEKLKVLQALKPISGLDVQDKTVRGQYAAGRIGGQEVPAYYFEKNVDNDSDTETFVALQAEVENWRWAGVPFYLRTGKRMARKCSEIVIQFKPVPHSLIDGGGGPANRLWIRLQPEERISVQLMAKTPGKGMQLEPVELDLNLAEALSRNKRRWDAYERLLLDVIEGDSTLFMRRDEVEAAWGWVDPILAGWREHYQSPRPYPAGSNGPEQAQLLLELQGRRWLE

SEQ ID NO: 17111 - DNA, 1488 bp, Pediococcus pentosaceus ATCC 25745
  CDS (1)..(1488): transl_table=11
atgaatcaaaaggctttatttattatttttggcggaacaggcgacttagcttatcgaaaattatatccggcgttatttaatttatacgaaaaaggatatttaaaagaggattttgctgtaattggtacagcacgccgtccgtggtctaacgatcactaccatgaagtagttatgagtgcaattgaagacgcaggccgtgattctggtcggactaacgatgacctacctcgcaaatttgcaagccatttctactatcaatcacataatgttgatgatgtcgatcattatgtagctttacgtaaattagcagatgaattggatgaaaagtatgatcttcaaggaaatcgtattttttatttagcaatggcaccaagattctttggaacaattgccggccatctgaaagatcaagctttacttacaaagggaaatggttttaaccgattaattatcgaaaaacccttcggacgtgactatcccagtgctaaagaattgaacgattcaatttcgggttcctttaaagaagaacagatttttagaattgatcattatttaggtaaggaaccgatccagtcaattgctggattacggtttgggaacgcattgttcaactcgctttggaataaagaacatattgataacattcagattaccctatctgaatcacttggtgtcgaagaacgggctggatactatgaaacagctggggcaatgcgggatatggtccaaaatcatattatgcaaattgtttcgttacttacaatggaacggccagatgtttttgattcagaacatttacgtgacaagaaaattgaagctttggaaaatatccaaatgtataccaaagaagaagctaaaaaatatttcattcgtggccaatacggtgcagatgaggctaatacacaacttggataccgagatgaagaaggtacggataatcaatcaactgttgaaactttcgttgccggtaaattaattacacataatccgtcattagatggtgtaccagtttatattcgtactgggaaacgattaactaaaaaatcaactcagattaacattgtatttaaaaatgatgatcaaaacatttttgctaaagacgcgtcagaaaaattaaagaccaatgttttgactatgcatattgaacctgatcaagggtttacactagaatttaatacaaagactggaaaccaaggttacaacctttccccagttcatttacgttatcgtaagacagccactgaaaaggctcaaattccagatgcttacgaaggtttgattcgcgatgctttaatgggaaataagactaattttgcacattggcatgaagttagccaagcatggaagattatggatgtagtccgcgaggcttgggatgaagaagaacccgcatttccaaactatgcaagtggtagtatgggacctgaagcagctatgcaacttctagctgatgatggacgtaaatgggtttttaatccacgcagctaa

SEQ ID NO: 17112 - protein, 495 aa, Pediococcus pentosaceus ATCC 25745
MNQKALFIIFGGTGDLAYRKLYPALFNLYEKGYLKEDFAVIGTARRPWSNDHYHEVVMSAIEDAGRDSGRTNDDLPRKFASHFYYQSHNVDDVDHYVALRKLADELDEKYDLQGNRIFYLAMAPRFFGTIAGHLKDQALLTKGNGFNRLIIEKPFGRDYPSAKELNDSISGSFKEEQIFRIDHYLGKEPIQSIAGLRFGNALFNSLWNKEHIDNIQITLSESLGVEERAGYYETAGAMRDMVQNHIMQIVSLLTMERPDVFDSEHLRDKKIEALENIQMYTKEEAKKYFIRGQYGADEANTQLGYRDEEGTDNQSTVETFVAGKLITHNPSLDGVPVYIRTGKRLTKKSTQINIVFKNDDQNIFAKDASEKLKTNVLTMHIEPDQGFTLEFNTKTGNQGYNLSPVHLRYRKTATEKAQIPDAYEGLIRDALMGNKTNFAHWHEVSQAWKIMDVVREAWDEEEPAFPNYASGSMGPEAAMQLLADDGRKWVFNPRS

SEQ ID NO: 17113 - DNA, 1545 bp, Solibacter usitatus Ellin6076
  CDS (1)..(1545): transl_table=11
atgttggacttaatgcccaacgagaacccctttcaagatccgctccgctttgaacggcaagttcccgagtgtgtcatcgtgatcttcggcgccaatggcgacctgaccaagcgcaaactgctgccggcgctgtatcgactggcatacgaccggcggctggcggcgggctttgcggtagtgggcatctcgcgcacgccgctttccgacgatcaatttcgcgcgaagatgcgcgagagcgtggagcaattttccgaagataccaagctggatgaagaggtttggggggcgttcgcgcgcggcctgtattatgtcgcgggcgacgttgcggatgccggactgtaccagcgtgtcagcgagaaagtggggcagatcgagaccgagcgtcacacgggcggcaacgtgctgttctatctctctactcagccgagccagtacgcggagatcgcgcacggcatcggtgtggcgggaatggggaagggaaatggctggcggaggctggtggtggaaaagccgttcggccacgatctggccagcgcgcgcgaactgagcaaccggctgcacgaggtctttgacgaatccgacgtctaccgcatcgatcactacctgggcaaagagacggtgcagaacattctggccttccgtttcggcaacggtattttcgagccgttatggaaccggcggtatgtgaatcacgtgcagatcacgggtgcggaatcgatcggcgtggaagggcgcggcgcatattaccaagaggccggcgcgctcgacgacatgatccagaaccatctgctccaggtgatggcgacggtggcaatggagccgagcgcgagcttccgcgccaacagcgtgcgcgacgagcgctccaagctgctgcgctcgattcgtccgatgacccgcgacgaagtgctccagaacgcggtggcggggcagtacggaccggcgcgcattggcggcgaggacgtcccgggcttccgtcaggaacagggcgtggatccgaattcgcagaccaacacttacgccgcggtcacgttctttgtggacaactggcgatgggcgggagtgccgttttacgtgcgcacaggcaagcggctggccaagcgggtcagcgaaatcgccattcaattcaactcggcgccgctgcacctgttcaatcaggattcgggcggaccgtcgggtgacccgggtgtgaacctgctgattctgcgcattcagcccgaggaggggatctcgctgaagttcctctcgaaacgtccgggccaggggatgacgctgcgcccggtgtccatggatttcaactacgggtcgagcttcggcgagcggtcgccttcggcatacgagacgctgcttttggacgcgataatcggcgacccgacgctgtatacgaggcaggacatggtggaagcgagctggagcgtagtggagccgattcagaatacgtggcgcgagaccaagttcgattttccgaattatccggcagggagctggggaccgcaagccgcggatgtgatgctggcgcggcgcggccacgtgtggaggaaaccctga

SEQ ID NO: 17114 - protein, 514 aa, Solibacter usitatus Ellin6076
MLDLMPNENPFQDPLRFERQVPECVIVIFGANGDLTKRKLLPALYRLAYDRRLAAGFAVVGISRTPLSDDQFRAKMRESVEQFSEDTKLDEEVWGAFARGLYYVAGDVADAGLYQRVSEKVGQIETERHTGGNVLFYLSTQPSQYAEIAHGIGVAGMGKGNGWRRLVVEKPFGHDLASARELSNRLHEVFDESDVYRIDHYLGKETVQNILAFRFGNGIFEPLWNRRYVNHVQITGAESIGVEGRGAYYQEAGALDDMIQNHLLQVMATVAMEPSASFRANSVRDERSKLLRSIRPMTRDEVLQNAVAGQYGPARIGGEDVPGFRQEQGVDPNSQTNTYAAVTFFVDNWRWAGVPFYVRTGKRLAKRVSEIAIQFNSAPLHLFNQDSGGPSGDPGVNLLILRIQPEEGISLKFLSKRPGQGMTLRPVSMDFNYGSSFGERSPSAYETLLLDAIIGDPTLYTRQDMVEASWSVVEPIQNTWRETKFDFPNYPAGSWGPQAADVMLARRGHVWRKP

SEQ ID NO: 17115 - DNA, 1467 bp, Mycobacterium avium 104
  CDS (1)..(1467): transl_table=11
atggtgatcttcggcgtcaccggcgatctggcccgcaagaaggtcatgcccgccatctacgacctggccaaccgcgggctgctgccgcccagcttctcgctggtcggcttcgcccgaagggattggagcacccaggatttcggcaaggtggtatacgaggccgtcaaggagcactgccgcaccccgttccggcaggagaactgggatcggctggccgagggattccgtttcgtgccaggcgctttcgacgacgacgaggcgttcggccggctcgccgagacgctggacaaactcgacgccgagcggggcaccggcggtaatcacgccttctacctggccatcccgcccaagtccttccccgtcgtgtgcgaacaactgcacaagtccgggctggcccgcccgcagggcgaccgctggagccgagttgtcatcgagaagccgttcggccacgacttggagagcgcgcagagcctgaacaaggccgtcaacgccgtctttcccgaggagtcggtcttccgcatcgaccactacctgggcaaggagacggtccgcaacatcctggcgctgcggttcgccaaccagttgttcgacccgatctggaactcgcactacgtcgaccacgtgcagatcaccatggccgaggacatcggcttgggcgggcgggccggctactacgacggcatcggcgccgcgcgcgacgtcatccagaaccacctgatgcagctgctggcgctgaccgcgatggaagagccggtcagcttcagcccgttggcgctgcaggccgagaagatcaaggtgctctcggccacccacctcgcccacccgctcgacgagaccaccagccgcggccagtacaccgcgggctggcagggcggcgagaaggtggtcgggctgctcgacgaggagggcttcgccaaggactcgatcaccgagacgttcgccgccatcaccctcgaggtggacacccgccgctgggccggggtgccgttctacctgcggaccggaaaacgcttgggccgcagggtgaccgagatagccctggtgttcaaacgcgcgccgcatctgccgttcgacgcgacgatgaccgatgagctgggcgccaacgccatggtgatccgggtgcagcccgacgagggtgtcacgctgcggttcggttccaaggtgccgggcaccgcgatggaggtccgcgacgtcaacatggacttctcctacgggtcggcgttcgccgaggaatcaccggaggcctacgagcagttgatcctcgacgtgctgctgggtgagccgtccctgttcccggtcaacgccgaagtcgaattggcttggcacatcctcgatcccgtgctcgacaactgggcgagcggcggcaggcccgagccctacgaggccggcacctggggcccggattcggcgttcgagatgctgcaccggacgggccgcgaatggcgcggccatgatacgcagcgatga

SEQ ID NO: 17116 - protein, 488 aa, Mycobacterium avium 104
MVIFGVTGDLARKKVMPAIYDLANRGLLPPSFSLVGFARRDWSTQDFGKVVYEAVKEHCRTPFRQENWDRLAEGFRFVPGAFDDDEAFGRLAETLDKLDAERGTGGNHAFYLAIPPKSFPVVCEQLHKSGLARPQGDRWSRVVIEKPFGHDLESAQSLNKAVNAVFPEESVFRIDHYLGKETVRNILALRFANQLFDPIWNSHYVDHVQITMAEDIGLGGRAGYYDGIGAARDVIQNHLMQLLALTAMEEPVSFSPLALQAEKIKVLSATHLAHPLDETTSRGQYTAGWQGGEKVVGLLDEEGFAKDSITETFAAITLEVDTRRWAGVPFYLRTGKRLGRRVTEIALVFKRAPHLPFDATMTDELGANAMVIRVQPDEGVTLRFGSKVPGTAMEVRDVNMDFSYGSAFAEESPEAYEQLILDVLLGEPSLFPVNAEVELAWHILDPVLDNWASGGRPEPYEAGTWGPDSAFEMLHRTGREWRGHDTQR

SEQ ID NO: 17117 - DNA, 1488 bp, Mycobacterium smegmatis str. MC2 155
  CDS (1)..(1488): transl_table=11
atgaaccgaacccccagccccgtcgatccgtgcgatttcgtgatcttcggcggcaccggcgacctcgccgcgcgtaagctcctgcccgccctgtacctgcgggaccgagacggccagctcgcaggcgccacccggatcatcggtgtggccaaggccggcctggacgacgcgggataccgcaacacggtccgtgccggactcgcccggcacgtcgaacccgacctgctggactccgacgtcgtcgaccgtttcctgagccgcctgcggttcgtcagcgtcgatctcaccgaaccgtcggactacgcggccgtcggtgacgtcctgacctcgcccgacggagggtcgggacacgacatccgggtgttctacctggcctgcgctcccgccctgttcgggccgatctgcggcgcgctcggcgcgcagggactggtcaccgagtcctcgcgggtcgtgctggagaagccgatcgggcgggatctggcgtccgcgcaacagatcaacgaggctgttggcgcggtgttcgccgagcaccagatcttccgcatcgaccactacctcggcaaggagagcgtgcagcagctgctggtcacacgcttcggcaacacctggcttgagccgctgtggaactccagccgcatcgaccacgtacagatcaccgcggccgaatcgctcggtgtgggtgcccgcggcgactactacgaccagtcgggtgcactgcgcgacatgctgcagaaccacctgctgcaggtgctctgcctcgtggcgatggaaccgccgacccacgtcaaccgcgaatccgtgcgcgacgagaagcgcaaggtgctcgaagccctcgagccgctgacggccgaacagacccagcgcgacaccgtcaccgggcagtacggtcccggcctcgtcggcgacgaggtggtgggaagttaccgcgaggaggtcgccgacccgcacagccgcaccgagacgttcgtcgcggtcaaggcgcacatcaggaactggcgctgggccggcgtgccgttctacctgcgcaccgggaaaaggatgtcgcagcgcttctccgagatcgtcgtgcagttcaaacccgttccgctgccgatgttcccgggcatcgaaggcacctcggaaccgaaccggctgatcatctcgctgcagcccgacgaggccatccggcttgagatgaccgcgaaggaacccggttccggcggccgtctgcggccggtttcgttggcgctcaactacaccgaggccttccccgagcgctcccccgatgcctacgaacggctgctcatggacgtcgtgcgtggggatcccacattgttcatgcgtcgcgacgaggtcgaggccgcgtgggcctgggccgaaccgatcctgcgccactggcaggacgccgaccgggtgccccggacctacccggcaggcaccgatggacccgttgacgccgccacgctcatcgagcgcgatggccggcgctggcatggaggagcagcatga

SEQ ID NO: 17118 - protein, 495 aa, Mycobacterium smegmatis str. MC2 155
MNRTPSPVDPCDFVIFGGTGDLAARKLLPALYLRDRDGQLAGATRIIGVAKAGLDDAGYRNTVRAGLARHVEPDLLDSDVVDRFLSRLRFVSVDLTEPSDYAAVGDVLTSPDGGSGHDIRVFYLACAPALFGPICGALGAQGLVTESSRVVLEKPIGRDLASAQQINEAVGAVFAEHQIFRIDHYLGKESVQQLLVTRFGNTWLEPLWNSSRIDHVQITAAESLGVGARGDYYDQSGALRDMLQNHLLQVLCLVAMEPPTHVNRESVRDEKRKVLEALEPLTAEQTQRDTVTGQYGPGLVGDEVVGSYREEVADPHSRTETFVAVKAHIRNWRWAGVPFYLRTGKRMSQRFSEIVVQFKPVPLPMFPGIEGTSEPNRLIISLQPDEAIRLEMTAKEPGSGGRLRPVSLALNYTEAFPERSPDAYERLLMDVVRGDPTLFMRRDEVEAAWAWAEPILRHWQDADRVPRTYPAGTDGPVDAATLIERDGRRWHGGAA

SEQ ID NO: 17119 - DNA, 1551 bp, Nocardioides sp. JS614
  CDS (1)..(1551): transl_table=11
gtgacgacgcctccgggctggcacaaccccctccgcgacccgcgcgatcgtcggctgccgcggatcgcggggccgagcgggatggtgctcttcggcgtcaccggcgacctgtcccgcaagaagatcatgccggcgatctacgacctcgcgaaccgcgggctgctgccgccgggcttcagcctgaccggcttcgcgcgccgcgactgggccgaccaggacttcgcgcagatcgtccacgactcggtcaagacgcacgcccggaccgagttccgcgaggaggtgtggcgtcagctcgcggaaggcttccgcttcgtgccgggcaacttcgacgacgacatggccttcgagcggctgcgccggaccatcgaggagctcgacgaggtgcgcggcaccggcggcaaccacgcgttctacctggccatcccgccggggttcttcgccgatgtcgtgggtcagctccaggagcacgggctgaccgagggccgcggcgactcctggcgtcgggtggtcgtggagaagcccttcggtcacgacctggagtccgcgcagcggctcaactcggtgctggccgaggtgttcccctccggctcgatcttccggatcgaccactacctcggcaaggagacggtgcagaacatcctggcgctgcggttcgccaacgagatgttcgagccgatctggaactccaactacgtcgaccacgtccagatcacgatggccgaggacatcggcatcggcgggcgcgccggctactacgacggcatcggcgcggcacgggacgtgatccagaaccacctcctccagctgatggcgctcgtggccatggaggagccgacgtccttcgacgccgagagcctgcgcatcgagaagcagaaggtcctctccagcgtcgtgctgccgcgccggctcgacctgaccaccgcacgcggtcagtacgccgccggctgggcgggcggcgagcaggtgatcggcttcctcgaggaggagggcatcaagcggacctccaccaccgagacctacgccgcggtgaccctccacgtggacacccggcggtgggccggcgtcccgttctacctccgcaccggcaagcggctgggccggcgggtgaccgaagtggccgtggtcttcaggcgggcgccgcacctgccgttcgccgcctcctcgaccgaggagctcacccagaacgccctcgtgatccgggtgcagcccgacgagggcgtgacgatgcgcttcggctcgaaggtgcccggcacccagatggagatccgcgacgtcaacatggacttcgtgtacggcggggccttcaccgagtcctctcccgaggcctacgagcgcctcatcctcgacgtgctcctcggcgacccgccgctcttcccccgccacgaggaggtggagctgtcctggaggatcctcgatccgatcctcgagcactgggcccgccaggacgagcagcacaagagcaggcccgagcagtacgagtccggtggctggggcccggagtccgcgaatgcgatgctcgcccgcgacggacgggtgtggagacgaccatga

SEQ ID NO: 17120 - protein, 516 aa, Nocardioides sp. JS614
MTTPPGWHNPLRDPRDRRLPRIAGPSGMVLFGVTGDLSRKKIMPAIYDLANRGLLPPGFSLTGFARRDWADQDFAQIVHDSVKTHARTEFREEVWRQLAEGFRFVPGNFDDDMAFERLRRTIEELDEVRGTGGNHAFYLAIPPGFFADVVGQLQEHGLTEGRGDSWRRVVVEKPFGHDLESAQRLNSVLAEVFPSGSIFRIDHYLGKETVQNILALRFANEMFEPIWNSNYVDHVQITMAEDIGIGGRAGYYDGIGAARDVIQNHLLQLMALVAMEEPTSFDAESLRIEKQKVLSSVVLPRRLDLTTARGQYAAGWAGGEQVIGFLEEEGIKRTSTTETYAAVTLHVDTRRWAGVPFYLRTGKRLGRRVTEVAVVFRRAPHLPFAASSTEELTQNALVIRVQPDEGVTMRFGSKVPGTQMEIRDVNMDFVYGGAFTESSPEAYERLILDVLLGDPPLFPRHEEVELSWRILDPILEHWARQDEQHKSRPEQYESGGWGPESANAMLARDGRVWRRP

SEQ ID NO: 17121 - DNA, 1476 bp, Acidovorax sp. JS42
  CDS (1)..(1476): transl_table=11
atgagctttgatctggtcctcttcggcggcacgggcgacctcgcctggcgcaagctgctgcctgccttgttccaggcttttcgccacgggtcgctgccgccgcaggggcgcatcatcggcgtggcgcgcgacgcgctgagcgacggcgactaccgcgcgctgattgcccggcgctttgccgatgtggagggagaaaaacgccccagcgacgaagaattcgaacgctttgccgcgctgttgcagtaccagcgcatggatctgtcccagccagaggattacgccctgctggcgcagcgcctgcgcgagcgccacgccgacacggtggtgatgtacctggccaccgcgcccgcgctgttcaccaccgtctgcgagcagctcggcgctgccggcctggcgacgcccgccacccgcgtggtgctggaaaagcccctggggcacgatttggcttccaaccgtgccatcaacgccgcggtgcgcagcgtgttcgacgaacggcagatcttccgcatcgaccactacctgggcaagccctcggtgcagaacctgctggcgctgcgctttggcaacgcgctgttcgaacccctgtggcggcgcgagaccgtcgccagcatcgagatcaccatggccgagcagctgggcgtggagcagcgtggcgccttctacgaccagactggcgcgttgcgcgacatggtgcagaaccacgcgctgcagctgctgtgcgcgatcgccatggagccgcccatcaacgcccatgccgatgccatccgcgatgagaagctcaaggtgctgcgttcgctgagtacgtggactcccgccacgctgctgcgggacgtggtgcgcggccagtattccaccggcaccacggcctgcgagggcgtgcgcgcctatgccgacgaggacggcgtggcgcccggcagcaccaccgaaaccttcgtcgccctgcgcaccgagatcgccaattggcgctgggcgggcgtgccgttctacatccgcaccggcaagcgcctggccgcgcgcgaggcacacatcgccatcaacttccgccccacgccccacgccatctaccgcacgccgctgggcgcggccaaccgcctggtgatccacctgcagccgcgcgacggcgtggcgctgcacctgtttgccgcggggcaggaaaagcgcggcacgcgcatttccgaagcccaggcgctggcgcccgtgcagctggacctggacttcgaccagcgctttggcagccagcgcgtgggcgcgtacgagcggctgctgctggacgtgatcgccgggcgcctgaatctgttcgtgcgcgccgacgaacaggaagccgcctggcattgggtggaacccatcatgcaggcctgggccgagcaggacgcccgtggtgaaggcccacgcccgtatgccgctggcagctggggccccagcgccgccagcgcgctggtggcccgcgaaggacacacctggatggaagaatgctag

SEQ ID NO: 17122 - protein, 491 aa, Acidovorax sp. JS42
MSFDLVLFGGTGDLAWRKLLPALFQAFRHGSLPPQGRIIGVARDALSDGDYRALIARRFADVEGEKRPSDEEFERFAALLQYQRMDLSQPEDYALLAQRLRERHADTVVMYLATAPALFTTVCEQLGAAGLATPATRVVLEKPLGHDLASNRAINAAVRSVFDERQIFRIDHYLGKPSVQNLLALRFGNALFEPLWRRETVASIEITMAEQLGVEQRGAFYDQTGALRDMVQNHALQLLCAIAMEPPINAHADAIRDEKLKVLRSLSTWTPATLLRDVVRGQYSTGTTACEGVRAYADEDGVAPGSTTETFVALRTEIANWRWAGVPFYIRTGKRLAAREAHIAINFRPTPHAIYRTPLGAANRLVIHLQPRDGVALHLFAAGQEKRGTRISEAQALAPVQLDLDFDQRFGSQRVGAYERLLLDVIAGRLNLFVRADEQEAAWHWVEPIMQAWAEQDARGEGPRPYAAGSWGPSAASALVAREGHTWMEEC

SEQ ID NO: 17123 - DNA, 1539 bp, Bifidobacterium longum DJO10A
  CDS (1)..(1539): transl_table=11
atgagtgaatcccccaattggagcaatcccctgcgcgactcgcgcgacctcagactgccccgtatcgccggcccatgcagcctcgtcattttcggtgtcacgggcgatctggcacaaaagaaactgctgccggccgtctacgacctggcgaaccgtggcctactgccgccgagcttcggtctgaccggcttcgcccgccgcgactggacacaggaacggttcatcgaattcgtcaaggccgccgtccaggcgcattgccgtacgccgttcaaggagtcaacttggcgcaatctggccgccggcatccgcttcgtgcagggtacgttcgacgacccggaggccttcgagcgtctgagcgccaccgtgcaggagcttgaccgcgaccgcggcacgcagggtaaccatgccttctacatgtcggtgccgccgcgcgccttcccacaggttgccaagcagttggccgcctccggcctgtcgcgctcgtccgagggcgcatggcgccgcgtgatcatcgagaagccgttcggccatgatctggccagtgccaaggaactcgacagcgtggtatccgaagtgttcgacccgagctccgtgttccgcatcgaccactacctcggcaaggaaaccgtgcagaacctgctggccctgcgtttcgccaacgccatgtacgagccgatctggaacgccaactatgtggaccacgtgcagatcacgatggccgaggacatcggcatcggcggccgcgccggctattacgacggcatcggcgccgcacgcgacgtcatccagaaccacctgcttcagctcatggctctgaccgccatggaggagccggtgagcttcaccgccaaggacctgaccgccgaaaagaccaaggtgctttccgccgtgcgcctgcccaaggacctcgctgccaacaccgcgcgcggccagtacgccaagggctggcagggctcgcacgaagtggtcggctacttggaggaaaaaggcatcgaccccaagagcaccactgaaacgtacgccgccatccgcctcgatatcgacacccgccgctgggctggcgtgccgttctacctgcgttgcggcaagcgcctcggcaagcgtgtaaccgaaatcgccgtggtgttcaagcgcgccccgcatctgccgttcgagcagaccgccgtgcgcgaactcggcaagaacgccatcgtgattcgcgtgcagcccgacgagggcgtcaccatgcgcttcggagccaaggtgccgggcggctccaccatggaggtccgtgacgtgaacatggacttcagctacggccgctccttcaccgagaactcgccggaagcctatgagcgactgattctggacgtgctgctcggtgatccgccgttgttcccgaccaccgaagaggtgaacctcagctgggagatcctcgatccgattgaacaattctggtccacgcttggccagccgcaggcctaccgcgccggtacgtggggtccggcacaggccgacgaaatgctggcgcgcgacggccgccactggaggatgccatga

SEQ ID NO: 17124 - protein, 512 aa, Bifidobacterium longum DJO10A
MSESPNWSNPLRDSRDLRLPRIAGPCSLVIFGVTGDLAQKKLLPAVYDLANRGLLPPSFGLTGFARRDWTQERFIEFVKAAVQAHCRTPFKESTWRNLAAGIRFVQGTFDDPEAFERLSATVQELDRDRGTQGNHAFYMSVPPRAFPQVAKQLAASGLSRSSEGAWRRVIIEKPFGHDLASAKELDSVVSEVFDPSSVFRIDHYLGKETVQNLLALRFANAMYEPIWNANYVDHVQITMAEDIGIGGRAGYYDGIGAARDVIQNHLLQLMALTAMEEPVSFTAKDLTAEKTKVLSAVRLPKDLAANTARGQYAKGWQGSHEVVGYLEEKGIDPKSTTETYAAIRLDIDTRRWAGVPFYLRCGKRLGKRVTEIAVVFKRAPHLPFEQTAVRELGKNAIVIRVQPDEGVTMRFGAKVPGGSTMEVRDVNMDFSYGRSFTENSPEAYERLILDVLLGDPPLFPTTEEVNLSWEILDPIEQFWSTLGQPQAYRAGTWGPAQADEMLARDGRHWRMP

SEQ ID NO: 17125 - DNA, 1563 bp, Haemophilus somnus 2336
  CDS (1)..(1563): transl_table=11
atgagaactattggaaatttagctgatttcagaatattattcacttcttttaatatcggacttaaacaaaatatgaacgtaaatgcagaaaataattgtattgttatttttggagcttcgggagatttaactcaccgaaaattaatccccgcactttataatttatacaaaataggacgtttgacagaaaatttctctgtgttaggtgtttcccgaactgacttaagcgatgaagaatttcgtgaaaaaatgcgtaatgcgttgagaaaaacagaagatataacagaagaacatttggaaaaattttgttctcatctttattatcaggcgattgatacctcgaatgcttctgattatggaaaacttgttcctcgtttagatgagctacatgatacatatcagaccggaggcaatactctttattatatgtccacaccgccaagcctttacggtgtgattcctgaatgccttgccacacacggactaaatacggaagaatgcggttggaaacgtcttattgtagaaaaaccttttggttatgacataaaaaccgcaaaagaacttgatgtgcaaattcatcgtttttttgaagaacatcaaatttatcgtattgaccattatttgggtaaagaaactgttcaaaaccttctcgtattacgtttttccaacggcttatttgaaccgctatggaaccgcaactttattgactatgtagaaattacaggtgctgaagaaatcggtgttgaagaacgtggcggatactataatgattctggtgcaatgcgtgatatgttccaaaaccacttattacaagttttagccatggtagcaatggagccccctgctattattaatgctgattctatgcgtgacgaagtagcaaaagtgttacattgcttacacccgctcagcgaagacgatataaaaaacaatcttgttttaggtcaatacacatcttcaactatagatggtgaagtggtgaatggttatttacaagaaaaaggcgttccagcagactccaatacagaaacctacattgctttacgttgcgaaattgataactggcgttgggctggtgtgccattctatgtgcgtagcggtaaacggttaccaactcgtgttacggaaattgtcatacactttaaaacaaccccccatccagtcttcagtcaaaatgcaccggaaaataaattaattatccgaattcagcctgatgaagggatttcaatgcgtttcggcttgaaaaaaccgggtgcaggctttgaagcaaaagaagtgtcaatggatttccgctacgctgatttagcaacaccaagcctactaagtgcctatgatcgtttattattagatgccataaaaggcgatgcgacactttttgcacggacagatgcagtacatgcctgctggaaatttgtacaacccatcttgaattataaaaaagatcaagggcgtgtttacgaatatgaagccggaacctggggaccaaccgaagcggataaattaattgctaaaacggggagagtatggcgtaaacctagtggaatgatgaagaaaaaagtctaa

SEQ ID NO: 17126 - protein, 520 aa, Haemophilus somnus 2336
MRTIGNLADFRILFTSFNIGLKQNMNVNAENNCIVIFGASGDLTHRKLIPALYNLYKIGRLTENFSVLGVSRTDLSDEEFREKMRNALRKTEDITEEHLEKFCSHLYYQAIDTSNASDYGKLVPRLDELHDTYQTGGNTLYYMSTPPSLYGVIPECLATHGLNTEECGWKRLIVEKPFGYDIKTAKELDVQIHRFFEEHQIYRIDHYLGKETVQNLLVLRFSNGLFEPLWNRNFIDYVEITGAEEIGVEERGGYYNDSGAMRDMFQNHLLQVLAMVAMEPPAIINADSMRDEVAKVLHCLHPLSEDDIKNNLVLGQYTSSTIDGEVVNGYLQEKGVPADSNTETYIALRCEIDNWRWAGVPFYVRSGKRLPTRVTEIVIHFKTTPHPVFSQNAPENKLIIRIQPDEGISMRFGLKKPGAGFEAKEVSMDFRYADLATPSLLSAYDRLLLDAIKGDATLFARTDAVHACWKFVQPILNYKKDQGRVYEYEAGTWGPTEADKLIAKTGRVWRKPSGMMKKKV

SEQ ID NO: 17127 - DNA, 1605 bp, Crocosphaera watsonii WH 8501
  CDS (1)..(1605): transl_table=11
ttgtgtaatgacttaccttctccccataaagttctcggtaaactagagactattgaaggagccaaaaagaagcctatggtaacgctgttagaaaacccattccgcgttggactgcgccaagaaagaaccccagaacccttaatactcgtaatttttggagcatctggtgaccttacccaacgcaaactcgttcccgccctctacaagatgaaacaggaacgtagactgcccccagaattaaccgtggttggggttgcccgtagagattggagccacgactattttagagaaaaaatgcgggagggcatcgaagaattctccgacggcattaaaaatgaagaattatggaatgattttgccgaaggattgtactattgctccggcaatatggacgatactgaaagttatcaaaaattaaaagcctttttagaagaattagacgggaaacgaggcaccagaggcaaccgtgtcttctatctttccgtttctcctcagtttttccccccaggtatcaaacagttaggggccgccggaatgttgagcgatcccctgaaacaccggatcgttatcgagaaaccctttgggaaagacctcagttcggcacaagttcttaaccgtgttgtccagaatgtctgcaaagaagaacaggtttatcgtattgaccactacttaggtaaagaaaccgttcaaaacctgttagtgttccgctttgccaacgctatttttgaacccctctggaaccgtcaatttgtggatcacgtccaaattacggtagcggaaaccgtcggggtagaagatcgtgccggatactacgacacctctggtgccttgcgagatatgttgcaaaaccacttgatgcagctattctgtttaaccgcaatggaaccccccaatgcgttaaatgccgatagtatccgtaacgaaaaagttaaggtattacaagcaacccatctctttgacgttcataacctggaaaaatctgctattcggggacaatataaagcaggatggatgaaaggaaaacccgtcccaggctatttagaagaacccggtgtcggagaaaactcctctactcctacttatgtagccatgaaactgatggtagataactggcggtggaaaggggttcctttctacctgagaacaggaaaacgtctacccaaaaaagtaacagaaatttctatccagtttaaagatgtacccttactcatcttccagtcagcggcacatcaaaccaaccctaacgtcctcagtatgaggatacaacccaacgaaggtattgccctcaagtttgaagcgaaaatgccaggatctgaactaagaacccgttccgtggaaatggactttagctacggttcttcctttggtatggctagtgctgacgcttatcaccgtctcttattagatgccatgttaggggatcaaaccctatttacccgcgccgatgaagtagaagaagcttggcgtgtagttactcctgtgttatctgcctggaatggaccggccgaaccctatagcgtcccccaatacgaagctggaacctgggaacccaccgaggcggaatttttaatgaaccgtgatggccgtcgttggagacgtttataa

SEQ ID NO: 17128 - protein, 534 aa, Crocosphaera watsonii WH 8501
MCNDLPSPHKVLGKLETIEGAKKKPMVTLLENPFRVGLRQERTPEPLILVIFGASGDLTQRKLVPALYKMKQERRLPPELTVVGVARRDWSHDYFREKMREGIEEFSDGIKNEELWNDFAEGLYYCSGNMDDTESYQKLKAFLEELDGKRGTRGNRVFYLSVSPQFFPPGIKQLGAAGMLSDPLKHRIVIEKPFGKDLSSAQVLNRVVQNVCKEEQVYRIDHYLGKETVQNLLVFRFANAIFEPLWNRQFVDHVQITVAETVGVEDRAGYYDTSGALRDMLQNHLMQLFCLTAMEPPNALNADSIRNEKVKVLQATHLFDVHNLEKSAIRGQYKAGWMKGKPVPGYLEEPGVGENSSTPTYVAMKLMVDNWRWKGVPFYLRTGKRLPKKVTEISIQFKDVPLLIFQSAAHQTNPNVLSMRIQPNEGIALKFEAKMPGSELRTRSVEMDFSYGSSFGMASADAYHRLLLDAMLGDQTLFTRADEVEEAWRVVTPVLSAWNGPAEPYSVPQYEAGTWEPTEAEFLMNRDGRRWRRL

SEQ ID NO: 17129 - DNA, 1503 bp, Xylella fastidiosa Ann-1
  CDS (1)..(1503): transl_table=11
atgttgctcacgcaaacaaaaacacccccacaccaaccaacgttaacatccgaatccgagaccaggtccatgcacaacaccctcttattgtttggcgccaccggcgacctcgcccaacgctatctcttcccctccttactgcaactgtttactgatggcttattgccacaagacttccgcattcgtgctctggccttgtcgccccataacaccacacaattccgcgacatcctgcgcccgcgcttggaacaagcactacccatcgccaacaccgcacacatccaagccctactacaacgtgtcgactacctttccgtagacttgaacgacccaacatcaatcgccgaagcagtccgagatctgacggaacatccctgcatcagctacttggcaatcccaccaggcctgtataccaacaccgccctaggattggcacaaggaggggcactgcagacaccacaccgattgatgctggaaaaaccgatcggacgcgactcaataaacgcacgcgaaatcctaaacaccatcggcacactgattgacgaagatcgcatcttccgcgtagaccactatctaggcaaagcagcagtgcagaacctcgtcgcactgcgcttcggaaacaccctgctagaagcggtatggaaccgaaaccacattgagtccgtacacatcctcatcgccgaaaccgaaggcgtcgatggccgcaatgcttactacgcacgtgctggcgcactacgcgacatgatgcaaagccacatcctgcaactcctatgcctggtcgccatggaacccccggcctctctggaagccgaccgcatacgcgacgaaaaagtcaaagtcctgcgcgcactacgcccactgaacgcccaaaacgccgcaatgcacagcgtgcgcggacgctacagcgcgggcaccattaacagccaaccagtgccagcctatcaaccaccggaaggcagcaatgtagagacctttgtcggtgtcaccgcatacatcgacaactggcgctgggcgggtgtaccgttccatctatgcacagggaaacgcttggccgaacgctcaacccagatcgtcgtcaccctcaaacccgtcacacactggctatttgaacgtccaaaccggaacaatgcagcaccaaaccgcctgtgcttcaaactacagccccaggaaaatatcgaactaaacctgatgagcagcctggccggtcccgaatggggaaccctagaactgcaaccgctggaattggagttatccgtcccgaccgggaaacatcgccacatcgcctatgagcgcctgttcctcgacgcattcaacggcaaccctgcgctatttgtacgtcacgacgaagtcacagccgcctgggcttggatcgacagcatcagcaatgcctgggaactgtccgacttaccactgcaaccctaccccgccggcggctggggcccacctcaagcccaccaatttctgccgccattggggattgatggccatggaaacaacgcatga

SEQ ID NO: 17130 - protein, 500 aa, Xylella fastidiosa Ann-1
MLLTQTKTPPHQPTLTSESETRSMHNTLLLFGATGDLAQRYLFPSLLQLFTDGLLPQDFRIRALALSPHNTTQFRDILRPRLEQALPIANTAHIQALLQRVDYLSVDLNDPTSIAEAVRDLTEHPCISYLAIPPGLYTNTALGLAQGGALQTPHRLMLEKPIGRDSINAREILNTIGTLIDEDRIFRVDHYLGKAAVQNLVALRFGNTLLEAVWNRNHIESVHILIAETEGVDGRNAYYARAGALRDMMQSHILQLLCLVAMEPPASLEADRIRDEKVKVLRALRPLNAQNAAMHSVRGRYSAGTINSQPVPAYQPPEGSNVETFVGVTAYIDNWRWAGVPFHLCTGKRLAERSTQIVVTLKPVTHWLFERPNRNNAAPNRLCFKLQPQENIELNLMSSLAGPEWGTLELQPLELELSVPTGKHRHIAYERLFLDAFNGNPALFVRHDEVTAAWAWIDSISNAWELSDLPLQPYPAGGWGPPQAHQFLPPLGIDGHGNNA

SEQ ID NO: 17131 - DNA, 1455 bp, Roseovarius nubinhibens ISM
  CDS (1)..(1455): transl_table=11
atggtttcacgcgtcatcccagtcgaggctttcgacctggtgatcatcgggggcacgggcgatcttgcccggcgcaagatcctgcctgcgctctatcagcggttcaacgcgggtcagatcggcaagaagagccagatcatcggcgcggcgcggggcgagatgaccagcgaggcttaccgcgcttttgccgaggaggcgatccgcgagtttctcgacaagagcgatgtgaaggtgcgcgcgctcaaatcctttctcaagttgctgagctatgtcacgcttgacgccaagggcgagaccggctgggaggaactggccggcaagatgcatagcgaccgcatccgggcgatctatttctcggtggggccgagcctctttggcgatctggccaagcggttgcacaagcatgggatggcgggcgaaggcacgcggctggtggtggaaaagccctttggccgcgatctggcctcggccaaggagctcaaccagatgctggcgcggcatttcgacgagagccagatttaccggatcgaccattatctcggcaaggagacggtgcagaacctgatggcggtgcggtttggcaatatgctcttcgagccgctgtggaacagccaatatgtcgatcacatccagatcaccgtggccgagagtgtcggggtcggcacgcggggcggctattacgaccggtcgggggcgatgcgggatatggtgcagaaccatctcatgcagcttctgtgtctcatcgcgatggagccgccggccaagttcgacccggatgcggtgcgcgacgaaaagctcaaggtgatccgggcgctcgatcctgtagagcccgacaatatcgtgcgcggtcaatatgagggcgatggcgagcggccgggctatcgcaaccaggtggagagccgcgacagcaccaccgagacctttgtcgcgctcaaggcgcatatcagcaattggcgctgggccgggacgccgttttacctgcgcaccggcaagcggctcaaggatcgggcgagcgagattgccatcatcttcaaggacgcgccgcattcgattttcgaagaggatgggcagcgccataacaatatcctgacgatccggctgcagcccaatgaggggatcgagcttggcgtgacgatcaaggaaccggggccggggggaatgcgtcttgtggatgtgccgctcgacatgagtttcgcggaggtgctcgggcccgatgaggcggatttcccggatgcctatgagcggctgatcatggatgtgatccggggcaaccagacgctgttcatgcgcggcgacgaggtcgaggcggcctgggcctggaccgatccgatcatcgcggagtgggacgggtcggggcaggcgcccgaaccctatgcgccgggcagttccggaccggagagcgccatgttcctgatgcatcgggacgggcgccgttggcgggagataaagccatga

SEQ ID NO: 17132 - protein, 484 aa, Roseovarius nubinhibens ISM
MVSRVIPVEAFDLVIIGGTGDLARRKILPALYQRFNAGQIGKKSQIIGAARGEMTSEAYRAFAEEAIREFLDKSDVKVRALKSFLKLLSYVTLDAKGETGWEELAGKMHSDRIRAIYFSVGPSLFGDLAKRLHKHGMAGEGTRLVVEKPFGRDLASAKELNQMLARHFDESQIYRIDHYLGKETVQNLMAVRFGNMLFEPLWNSQYVDHIQITVAESVGVGTRGGYYDRSGAMRDMVQNHLMQLLCLIAMEPPAKFDPDAVRDEKLKVIRALDPVEPDNIVRGQYEGDGERPGYRNQVESRDSTTETFVALKAHISNWRWAGTPFYLRTGKRLKDRASEIAIIFKDAPHSIFEEDGQRHNNILTIRLQPNEGIELGVTIKEPGPGGMRLVDVPLDMSFAEVLGPDEADFPDAYERLIMDVIRGNQTLFMRGDEVEAAWAWTDPIIAEWDGSGQAPEPYAPGSSGPESAMFLMHRDGRRWREIKP

SEQ ID NO: 17133 - DNA, 1461 bp, Erythrobacter sp. NAP1
  CDS (1)..(1461): transl_table=11
atgactgaatttgctgctgaccgcttgctcttgttcggagcgacgggcgacctttcgcggcgcaagctgctgccgagcctgtgtgctctcgacgccgacggacttctgcctgaacgcctcgccattatcggcacggcgcgaagcgacatcgacgacggcgagtttcgcaacatggcgcgtgaggcgctggagcagttcctgccagcagaacgccgtggcagcatggcgcagtttctcaacaggctgagctaccagccgctcgatgcgtcgagtgtcgagggctttgatgcgcttgccgccaaggtcgcggaagtcggccagagtgatgaggagaacggcggccttgctatcttcctctcgaccgcgccgagcctgttcggcccgacgattgccgggctgcaacatgcggggctgacgggtgagaaggtgcgcatgtgccttgaaaaaccgctaggcaccgatctggaaagctccgctgaaatcaacgacgcggtggcgggcgcgttccccgaagagcgcattttccgcatcgaccattaccttggcaaggagacggtgcagaacctcctcgcgctgcgctttgccaacattctgttcgagccgatctggaattcgaacatcatcgagcatgtgcagatcaccgtcgccgaaacggtgggccttgaggggcgcgtcacattctacgacgatgcaggcgcgctgcgcgacatggtgcagaaccacatgctgcaactgctcgcgctggtcgcgatggagccgccgacgagcttcgatgcgaccgccgtgcgcgatgaaaaggtcaaggtcctgcgcgcgctgcgcaaggctgtcgccagtgaaaccgtcaccggtcagtaccgcgcaggtgcggtcaacggacaggcggtgccgggctatgacgaggaactgggcaagccctccaacaccgaaaccttcaccgcgatcaagacgcatgtcgacaactggcgctggaagggcgtgcccttctaccttcgcaccggcaaacgcctgcccgagcgcgtgaccgaaatcctggtcaagttccgctgcgtcccgcactcgatcttcgaaagcatgggcgcagggcttcagcccaaccaccttctcatcggtatccagcccgaagaggacatcacgctctcgctgatggcgaaagtcccgggcctcgacgaagacggagtgcgcctgcgcgaagtgccgctcaagatcgcgatgccatcggcctttgccgaaacgcagcgccggatcgcttacgagcgcctgctgcttgacctcatcaagggcgatcagacactattcgtgcgccgcgacgaggtcgaggcgcagtggcactggatcgacgcgatccgcgccgaatgggaagccaatggcgtcacgccaaagacctacaccgcaggcagttggggaccgagcgcggcaatcgcgctcaccgaacgcgacggagtaagctggcatgagtaa

SEQ ID NO: 17134 - protein, 486 aa, Erythrobacter sp. NAP1
MTEFAADRLLLFGATGDLSRRKLLPSLCALDADGLLPERLAIIGTARSDIDDGEFRNMAREALEQFLPAERRGSMAQFLNRLSYQPLDASSVEGFDALAAKVAEVGQSDEENGGLAIFLSTAPSLFGPTIAGLQHAGLTGEKVRMCLEKPLGTDLESSAEINDAVAGAFPEERIFRIDHYLGKETVQNLLALRFANILFEPIWNSNIIEHVQITVAETVGLEGRVTFYDDAGALRDMVQNHMLQLLALVAMEPPTSFDATAVRDEKVKVLRALRKAVASETVTGQYRAGAVNGQAVPGYDEELGKPSNTETFTAIKTHVDNWRWKGVPFYLRTGKRLPERVTEILVKFRCVPHSIFESMGAGLQPNHLLIGIQPEEDITLSLMAKVPGLDEDGVRLREVPLKIAMPSAFAETQRRIAYERLLLDLIKGDQTLFVRRDEVEAQWHWIDAIRAEWEANGVTPKTYTAGSWGPSAAIALTERDGVSWHE

SEQ ID NO: 17135 - DNA, 1470 bp, Pseudoalteromonas tunicata D2
  CDS (1)..(1470): transl_table=11
atgctaaacccatttgatattattatttttggtggtggtggtgatttatcactacgtaaactcctaccggcatggtatcgcgcttatcaagaaggtaatttgcctgctggtagtcgtattatgccaacagtaagagaattagctgatcgagccgaatttattgaaaaagtagacaacgccttgcaagcccatttaagcactggcgaatataacaaaaaagattgggctgtatttgcagagtttattcatccgatagcgattaatgttacagagattgatgaaaactggactttattaaaagaacgtcttgaagccgaagcctcagatcgttcgcgggtgttttatttatctttaccgccagctgtttacggtcgttgttgtgagttgttgtcgcagatggagcttattactgaaacttcgcgtgtcgtggtggaaaagccaatcggttactgcggtgcttctgctgaagaaattaactctcaagtggctctgtattttaaagaagagcaaattttccgtattgaccattatttaggtaaagagacagtacaaaatttaatggcattgcgtttttcgaacgtattgtttgagaatttatgggatgctaaaacgattgataatattcaaattagtatttcagaaaccgttggtttagaaactcgtgctggtttttatgacaaagcaggtgcactgcgagacatggtgcaaaaccacttattacaacttttatgtttagttgcgatggaatcgccgcataaattgaatgcgaatagtattcgagctgaaaaattaaaagtacttgaagcgctacgccctatagtaggtaaagaagttaaagagaacattgtgcgtgggcaatatgtacctggaacaatgaatggtaaagtggtacctggttatttagaagaattaggtgataactccaccacagaaacctttgttgctattcgcgctcacattgataactggcgttgggcaggtgtgccattttatttaagaacgggcaagcgtttgaaaaagcgttgcgctgagattgtggttgaatataaatcggtttcacataatgtttatgagcaaaatgtcggtccaattcaacctaatcgtctggtgatccaaattcaaccagaagaaagtattcaactaactttgatgtcaaaacgtcttgatagtctagaaatgcaacttgaacctgtaacgttaaacatcgaattagcggaagattataataataactatcaaggtgatgcttataagcgtttaatgcttgatgcagcagccaataatcctgcgttatttattcatcgtgacgaagttcgtcaagcgtggaagtggattgatcctattgttgaacaatggcaaaaatcaggtgttccagcgctttatcgagctggttcttggggcccaattgatgctgatgagttattagctgagcgaaatcatacttggtacaacgcaggagataatgtttaa

SEQ ID NO: 17136 - protein, 489 aa, Pseudoalteromonas tunicata D2
MLNPFDIIIFGGGGDLSLRKLLPAWYRAYQEGNLPAGSRIMPTVRELADRAEFIEKVDNALQAHLSTGEYNKKDWAVFAEFIHPIAINVTEIDENWTLLKERLEAEASDRSRVFYLSLPPAVYGRCCELLSQMELITETSRVVVEKPIGYCGASAEEINSQVALYFKEEQIFRIDHYLGKETVQNLMALRFSNVLFENLWDAKTIDNIQISISETVGLETRAGFYDKAGALRDMVQNHLLQLLCLVAMESPHKLNANSIRAEKLKVLEALRPIVGKEVKENIVRGQYVPGTMNGKVVPGYLEELGDNSTTETFVAIRAHIDNWRWAGVPFYLRTGKRLKKRCAEIVVEYKSVSHNVYEQNVGPIQPNRLVIQIQPEESIQLTLMSKRLDSLEMQLEPVTLNIELAEDYNNNYQGDAYKRLMLDAAANNPALFIHRDEVRQAWKWIDPIVEQWQKSGVPALYRAGSWGPIDADELLAERNHTWYNAGDNV

SEQ ID NO: 17137 - DNA, 1500 bp, Photobacterium sp. SKA34
  CDS (1)..(1500): transl_table=11
atggttcaaccagaaaataactcaattgtaatttttggtgcgtcaggcgacttgacacaccgaaagttaatacctgcgttttatcacctttatgctaatggtttattgcctgaagattttgcaattctaggggtaagtcgtacatcatatagcgatcaagaatttcgtgataagttaaagcaatctttgacagaaaatgaaaaaatcgatgaagaaacattggttaacttttgtcagcacctttactaccaagcattaaatacgtctgataaagatgaatatgcagtattgaaagaacgcttagacacattcaaagaaacgcataatacccaaggtaatgccgttttctacctcgcgacaccaccaagcctttacggcgtgatccctgaatgtctagccgcgcatggcctaaatgatgaaactgaaggttggaaaaacctgattgttgaaaaaccatttggttatgatctagagtcagcgatctcattagacaagcaaattcatgcttgtttccaagaacatcaaatctaccgtatcgatcactacctaggcaaagaaacggtgcaaaatcttcttgtattccgctttgcaaacggcatgtttgagccgctttggaatcgtaactttattgattacgttgaaatcactgcgtctgaatcattaggcgttgaagatcgtggtggctactatgacggtgcaggtgctgttcgagatatgttccaaaaccatttgctgcaagtattagcaatggtcggtatggaatctcctgctgcaattaatgctgattctatccgtgatgaagtggttaaagtgatgcaaagctttaaaccattatcagaagatgatcttaaaaataacttagtgttgggtcagtacactgaatcagatgctcgtggtaagcatttcttaggttatcgccaagaaccaggtgtagcagaagactctcgtactgaaacttacgttggtatgaagatgtttattcaaaactggcgttggaatggtgtgccattctacgttcgtacaggtaaacgactaccaacgcgtgtgacggaagtggttatccactttaagaaaacaccgcacccagtctttggtgaaaatgcacctgagaacaagttgattatccgtattcagcctgatgaagggattctaatgagcttcggtcttaaaaaaccgggggcaggttttgaatctcaagaagtatcaatggatttccattacgacaagcttgaagaaactaatatgctaacggcatacgaacgcttacttcttgactgtatgaagcaagatgcaactttgtttgcacgtacagatgctgttcgcgcttgttggaaattcgttcaaccaattcttgaatacaaagaaaacccagagcacttatttggttatgccgcaggtacgtggggaccaaaacaagctgatgacttacttgcatcaagtaatcgtgagtggcgttttccttgtaagaatttagcaaacactgactattgtgagctataa

SEQ ID NO: 17138 - protein, 499 aa, Photobacterium sp. SKA34
MVQPENNSIVIFGASGDLTHRKLIPAFYHLYANGLLPEDFAILGVSRTSYSDQEFRDKLKQSLTENEKIDEETLVNFCQHLYYQALNTSDKDEYAVLKERLDTFKETHNTQGNAVFYLATPPSLYGVIPECLAAHGLNDETEGWKNLIVEKPFGYDLESAISLDKQIHACFQEHQIYRIDHYLGKETVQNLLVFRFANGMFEPLWNRNFIDYVEITASESLGVEDRGGYYDGAGAVRDMFQNHLLQVLAMVGMESPAAINADSIRDEVVKVMQSFKPLSEDDLKNNLVLGQYTESDARGKHFLGYRQEPGVAEDSRTETYVGMKMFIQNWRWNGVPFYVRTGKRLPTRVTEVVIHFKKTPHPVFGENAPENKLIIRIQPDEGILMSFGLKKPGAGFESQEVSMDFHYDKLEETNMLTAYERLLLDCMKQDATLFARTDAVRACWKFVQPILEYKENPEHLFGYAAGTWGPKQADDLLASSNREWRFPCKNLANTDYCEL

SEQ ID NO: 17139 - DNA, 1464 bp, Oceanobacter sp. RED65
  CDS (1)..(1464): transl_table=11
atgcgcatgccagacgtaacggagccttttgaactggtgttatttggtgcaaaaggcgatttggcccaccgaaaactcattcctgctttatacaacctgcatgtcgatggtcgcctcagcgaacagggaaatatttgggcaatcacacgccccaatacggaacaaagtgcttatatcgagcaagtaaaagactgggtgcgcaaacttggtgcagaattcgacgaaaaaacttggaaggcgttctcacagcgaatcaagttggtgggcgtggatctttacaaggcagcgggatacagcaagttagcgaaaaaactcaacgcctctggtaaccctgtggtctattactgtgcggtgcactcgcggctgtatcccgtgatttgcgagcaattatttgcccataacctcatcactgaacatagtgccatcgtgcttgagaagcccattggcaacgactatgagtccggcatggtgatcaatcgccgcgtagcggagttttttgaagaatcgcaaatttaccgtattgaccattatctcggtaaagaaactgtgcagaaccttttggccttgcgctttgccaacagtatattcgagcatcaatggaatcagcgctatatcgatcacattcaaatcaccatcagtgagaccgtgggtgtcgagcaacgcgcgggtttttatgagggcacaggcgccttgcgggacatgctgcaaaaccacttacttcaacttttatgtatgaccgccatggagccaccggcgtctatggaagcagaaagcgtgcgggaagagaaagtaaaagtcctaaaagccctcaaacctatcgttggtgccgatatcagcgaatgcgtcgtgcgcggccaatatggtgaaggcatctccgaaggggaaatggtccctaaatataaagatgaacccggcgtggatacccattccaccacagagacatttgtcgcccttaaggctcaaattgataactggcgctggagcggcgtaccgttttatctacgtaccggcaagcgactcgccaagcgcgcttgtgaaatcgtggtgcagtttaaagaggtgccacacagtatttttgagatgcagcataaaaagaccatggccaacaaattggtattccaccttcagcctgatgaaggcgtgagtctgcaattatgtgaaaagcgtgtgggcaaccacatgcaagtgcgtccaatggtattgagcctgaatcaaagcgaccaagataaaaatcgcgtgcctgaagcttacgaacggttgctggcggatgccatcaatcgcaacccaacgttattcctgcgtgaagatgaactcatgaccgcatggcaatgggttgaccccatcctgaaccactggcagaccagtgatcagcgcccagatacctatacagcaggcagttgggggccagcagcttccaccttattgttagcgaaagatgggcgcttatgggaggaaaatagctaa

SEQ ID NO: 17140 - protein, 487 aa, Oceanobacter sp. RED65
MRMPDVTEPFELVLFGAKGDLAHRKLIPALYNLHVDGRLSEQGNIWAITRPNTEQSAYIEQVKDWVRKLGAEFDEKTWKAFSQRIKLVGVDLYKAAGYSKLAKKLNASGNPVVYYCAVHSRLYPVICEQLFAHNLITEHSAIVLEKPIGNDYESGMVINRRVAEFFEESQIYRIDHYLGKETVQNLLALRFANSIFEHQWNQRYIDHIQITISETVGVEQRAGFYEGTGALRDMLQNHLLQLLCMTAMEPPASMEAESVREEKVKVLKALKPIVGADISECVVRGQYGEGISEGEMVPKYKDEPGVDTHSTTETFVALKAQIDNWRWSGVPFYLRTGKRLAKRACEIVVQFKEVPHSIFEMQHKKTMANKLVFHLQPDEGVSLQLCEKRVGNHMQVRPMVLSLNQSDQDKNRVPEAYERLLADAINRNPTLFLREDELMTAWQWVDPILNHWQTSDQRPDTYTAGSWGPAASTLLLAKDGRLWEENS

SEQ ID NO: 17141 - DNA, 1506 bp, Vibrio sp. Ex25
  CDS (1)..(1506): transl_table=11
atgatggtaataccagaaaacagcagcatcgttatttttggtgcttcaggtgaccttacataccgtaagctcattcctgctttataccacctctatgcgaacaagcagcttccagaaaattttgccattctgggtgtaagtcgcactgaatacagtgatgagtcttaccgcgcgaagctgaaaaaatcgcttcaggaaatggaaaagactgagccagaaacgcttgatgcatttattaaccatctgcactaccaagctatcaatacttctgacacacaagattacagtaagctatcttctcgtttagaccaacttgctgacgaatatcgtttcgatcagcgcaatacgcttttctacttagcaaccccaccaagtttatacagtgtgattcctacaagtcttgcagcacacggcctaaacaaagaagaagatggttggaaacgcctgattattgagaaaccattcggttatgaccttgaatcagcgcgtattctggataaagaaattcacgagcacttccaagagcatcaaatttaccgaattgaccattacttaggtaaagagacggtacaaaaccttcttgtacttcgtttttcaaacgcgatgtttgagccgctttggaaccgtaacttcattgattatgttgaaatcacgggagcagaattcctcggcgtagaggagcgtggtggttactacgacaactcgggtgccgtgcgcgatatgttccaaaaccacctgctacaagtattggcgatggtgggtatggagccacctgcacagatcaatgcagattcgatgcgtgatgaagtcgttaaagtactccagtgtttaaaacctttggacgaaaacgctctgcgtaacgatctagtattaggtcaatacaccgcttctgaagttcgtggacaaagtctacgtggctaccgtgaagagccgggggttgcagacgactcacgtaccgaaacttacatcggtttgaaagcctacattaacaactggcgttggaatggcgtgccattctacgtgcgtactggtaagcgtcttccaacacgcgttactgaagtggttatccactttaaacaaacaccgcacccagtgtttggtcaaaacgcaccagaaaacaagctgatcattcgcattcagccagacgaaggcattcaaatgagctttggcttgaaagagccaggcgcaggttttgaagcgaaagaagtgaaaatgaacttccattacgctgacctacaagaaacgcaaatgctaactgcgtatgagcgtcttctacttgatgctttgaatggtgatgctacgctatttgcacgtagtgatgcggtggaagcgtgttggcagtacgtacagccaattttagattttaaacaagatccacaatccctcttcgggtacgcatgcggcacatggggtcctaaagagtcagacgacctgctacagcgtgatggtcgcgcttggcgcttcccatgtaaaaacttaacagatacggattactgtgaactatga

SEQ ID NO: 17142 - protein, 501 aa, Vibrio sp. Ex25
MMVIPENSSIVIFGASGDLTYRKLIPALYHLYANKQLPENFAILGVSRTEYSDESYRAKLKKSLQEMEKTEPETLDAFINHLHYQAINTSDTQDYSKLSSRLDQLADEYRFDQRNTLFYLATPPSLYSVIPTSLAAHGLNKEEDGWKRLIIEKPFGYDLESARILDKEIHEHFQEHQIYRIDHYLGKETVQNLLVLRFSNAMFEPLWNRNFIDYVEITGAEFLGVEERGGYYDNSGAVRDMFQNHLLQVLAMVGMEPPAQINADSMRDEVVKVLQCLKPLDENALRNDLVLGQYTASEVRGQSLRGYREEPGVADDSRTETYIGLKAYINNWRWNGVPFYVRTGKRLPTRVTEVVIHFKQTPHPVFGQNAPENKLIIRIQPDEGIQMSFGLKEPGAGFEAKEVKMNFHYADLQETQMLTAYERLLLDALNGDATLFARSDAVEACWQYVQPILDFKQDPQSLFGYACGTWGPKESDDLLQRDGRAWRFPCKNLTDTDYCEL

SEQ ID NO: 17143 - DNA, 1473 bp, Alteromonadales bacterium TW-7
  CDS (1)..(1473): transl_table=11
atgcttaatccttttgatatcataatttttgggggcggtggtgatcttgcgttacgcaaattactacctgcaatgtacagagcatatcaagaagggaacctacctgaaggctcacgcatcctgccaacagttcgtgaagaaagcaaacgtgccgaatacattgaaacagcgcacaaagcactgcaagagtttttaagtaaaggtgaatttaacgccaaagattggaaagcattttctacttatttagtgccagtggtgagtaatgttactgaagctgacgataactgggatgtacttaaagagatcttagatgagcacgatagcactaaatctcgcgtgttttacttatctttgccaccagccgtttatggcaagtgttgtgaaattctttctacaaaaaatttgattacgccaacatcgcgtgtagtagtagaaaaaccaatcggttactgtggtgaatctgcagaagcaataaacgctaaaattgctgaattttttgaagaagaccaaattttccgtatagaccattacttaggtaaagaaacagtacaaaacctaatggcactgcgtttttcaaattcattatttgaaaacatgtgggatgctaaatcgattgataatattcaaattagtctttctgaaaccgtaggccttgagagcagagctgggttttacgacaaagccggtgcacttcgtgatatggttcaaaatcacttattacagcttttgtgccttgttgcaatggaagcacctaataagcttaatgctaatagtattcgtaacgaaaaactaaaagtactcgaagcgcttcgtccactttttgattcagatgttgatagcaacatagtacgcggccaatatgtaccgggcgatttaaacggaaaaatagttcctggctacctagaagagctaaacgaaggcgctagtaaaacagaaacctttgttgctattcgtgcacacattgataattggcgctgggctggcgtaccattttaccttcgtacaggtaaacgcatggcaaaacgttgtgctgaaatagtggttgagtacaaaaaagtatcgcacaatatttatgaagaaaatgttggcaacattgaaccaaaccgcttagttattcgtcttcagcctgaagaaacgatacagctaacgcttatgtcaaaacgtttggataaccttgaaatgcaattagagccggtaacgatgaacattgagttatcacaagcttacagtaacggtttccattctgatgcatataaacgtttaatgcttgatgcggctgcaaataacccatcattgtttattcaccgtgatgaggttcgtcaagcatggaaatggattgacccgattgttgagcgttggcaagaaaaaggtaagcctgcactttaccgcgccggtacgtgggggcctgatgatgccgatgaactattagcagaaaacaaccatgtgtggtttaacacaggtgataaggcataa

SEQ ID NO: 17144 - protein, 490 aa, Alteromonadales bacterium TW-7
MLNPFDIIIFGGGGDLALRKLLPAMYRAYQEGNLPEGSRILPTVREESKRAEYIETAHKALQEFLSKGEFNAKDWKAFSTYLVPVVSNVTEADDNWDVLKEILDEHDSTKSRVFYLSLPPAVYGKCCEILSTKNLITPTSRVVVEKPIGYCGESAEAINAKIAEFFEEDQIFRIDHYLGKETVQNLMALRFSNSLFENMWDAKSIDNIQISLSETVGLESRAGFYDKAGALRDMVQNHLLQLLCLVAMEAPNKLNANSIRNEKLKVLEALRPLFDSDVDSNIVRGQYVPGDLNGKIVPGYLEELNEGASKTETFVAIRAHIDNWRWAGVPFYLRTGKRMAKRCAEIVVEYKKVSHNIYEENVGNIEPNRLVIRLQPEETIQLTLMSKRLDNLEMQLEPVTMNIELSQAYSNGFHSDAYKRLMLDAAANNPSLFIHRDEVRQAWKWIDPIVERWQEKGKPALYRAGTWGPDDADELLAENNHVWFNTGDKA

SEQ ID NO: 17145 - DNA, 1479 bp, marine gamma proteobacterium HTCC2143
  CDS (1)..(1479): transl_table=11
atgactgatccttttgatatagttatttttggcggtacgggcgatcttgcgctacggaaactaattccagcgctataccgtgcatttctggcagcgcaattgccggatgggacacgtgttattgctagttgtcggagtcaagatgatatcgataattacttggacaccgcagcattagcgcttcagcaacaccttacccctgaagagtttagcgtagctgcttgggagcaatttaaggcttatcttaatccggtgatgctggacatttcggtgttagatgataactggacatcattaaagggcgtgatggatattgcgcccgataaggtaagagttttttatctggcgacaccgccggatatctttggtgtcacctgtcgctatctcaatgagatgactttaattaccgccaaaagccgtttagttgtcgagaaaccattgggctatgatgccgtgtctgctaacgccatcaatactgagattgctcaatatttcaaagaagataatatttatcgaattgatcattatttgggtaaggagaccgttcagaacttaatggcgttgcgatttaccaatattatttttgaacagttgtggaatgctaaatcgattgaccatgtgcagattagtatttccgaaacggtcgggttagaagggcgagcggggttttataatgatgcgggtgcactgcgtgatatggtgcaaaatcatctgctgcagctactttgccttgtggcaatggagtcgccaaataaggttgacgcaaaaagtatacaggcagaaaagataaaggttttagaggcattgcgtcctatacggggcgaagacgtggccctgcatacagtgcgaggtcagtatgtggcaggtagctatctgggtgaattggtgccgggatatttagaggagttgaactcgtctaacagtaccacagagacatttgtcgctattcgtgcctacatcgataactggcgctgggcacgcacgccgttctacctgcgtactggtaaaagaatgaagtctcggggtgcagagatcgttattcagttcaaagatgttccacaccgggtatatgaggattcagcggggccgttggagcctaatcgtttagtgattcgtttgcagccagaagaattgattcagatgacagtgatgtcaaaaaatctagaaaatatggacatgcaattaaaaccggcaaccctaaatttgaatttttctgatacttatactcagtttcgcagtgatgcctataagcggcttatccttgatgcagcggcagcgaatacgagcctgtttattcatcgcgatgaagtatccagtgcctggcagtggattgatccgattgccgaagcatggcaggagggtaaagcgatccctcacttataccgtgcaggtacttgggggccagaagagtctgacgagttgttagcgcagtcaggtcatcgctggttcaattcaggtgaaaaagagtcgaaatcatga

SEQ ID NO: 17146 - protein, 492 aa, marine gamma proteobacterium HTCC2143
MTDPFDIVIFGGTGDLALRKLIPALYRAFLAAQLPDGTRVIASCRSQDDIDNYLDTAALALQQHLTPEEFSVAAWEQFKAYLNPVMLDISVLDDNWTSLKGVMDIAPDKVRVFYLATPPDIFGVTCRYLNEMTLITAKSRLVVEKPLGYDAVSANAINTEIAQYFKEDNIYRIDHYLGKETVQNLMALRFTNIIFEQLWNAKSIDHVQISISETVGLEGRAGFYNDAGALRDMVQNHLLQLLCLVAMESPNKVDAKSIQAEKIKVLEALRPIRGEDVALHTVRGQYVAGSYLGELVPGYLEELNSSNSTTETFVAIRAYIDNWRWARTPFYLRTGKRMKSRGAEIVIQFKDVPHRVYEDSAGPLEPNRLVIRLQPEELIQMTVMSKNLENMDMQLKPATLNLNFSDTYTQFRSDAYKRLILDAAAANTSLFIHRDEVSSAWQWIDPIAEAWQEGKAIPHLYRAGTWGPEESDELLAQSGHRWFNSGEKESKS

SEQ ID NO: 17147 - DNA, 1446 bp, marine gamma proteobacterium HTCC2080
  CDS (1)..(1446): transl_table=11
atgaccggagttgacctaattatttttggcgcttccggagacctttcagcaagaaagctctttcccgcactgtttcaactcgatcgcgccgaattactgcccagcgacctgcgcatcacagcaattgctagagatcaggtcgacgtaaatacttttttggaaggcctaagacagcgaatgcatgcctacatgggctctgagtcgccttcccatgccgagtggcagcactactcacgacattttcaatatgtgggcgccgacttcgccaacgctgacagctattccagtatcagggcaactctagatgatacccgtatcagcttattttacttggctacaccacccagcatcttcgccctaatttgcaacaatctggccactaacaattgcctcaccggcgactgccgaatcgtactcgaaaagcccattggcgaatgtctagcctcgtcaaaggaggtcaatgaaacgctggctcgctactttgacgaggaatctatttatcgcatagatcactacctgggaaaggagaccgttcaaaacttactcgcgctgcgctttgcaaaccgatttattaatagtcagtgggatgccaactgtatcgaccatgttcaaatcaccgttggcgaaatcgtcggtattgagggtcgctggtcttactatgaccgcgtcggccagctccgcgacatggttcaaaaccaccttatgcagttactctgtctcgttgctatggagccccccaatagcctagaagccgatagcatccgcgacgaaaaagtcaaaatcgtcaaggccttgagacgcatcgactctgatcaggtctctgagcacgtgattaaagggcaatacagccagggttggtcttcaggtgcggccgtgcctgggtaccttgaggagcccggttgcgagcgccctgacagcgataccgagacgtttatcgcgatcaaagctcatgtagacaactggcgctgggccggcgttccattttacctgcgaacaggaaaacgcgttcctgaaaaattaactgaaatcatcattcagtacaaagaccttccccacaacatttttagcggcggcaccagcgcgaacaagttaatcattcggttacagcccagggaaggcatcgagctaacaatggcatcgaaacgccagacgctgcgagaaaaactgtccttacagaaccataccttggatttagattttcgggaaaccaccggcatgaatcgaattcccgacgcctacgaacgattatttcttgatgcaattaatggcgatcagtcgctgtttgtaggtcgagaggagatcgaagaaagctggcgctggtgtgatgaactgattgacgcctgcaaccaaaagaacatagagaccaagccctatcacgctggatcttggggcccacctaaagccgagcttttaattgaaaaggatgggcgtagctggcatgtctga

SEQ ID NO: 17148 - protein, 481 aa, marine gamma proteobacterium HTCC2080
MTGVDLIIFGASGDLSARKLFPALFQLDRAELLPSDLRITAIARDQVDVNTFLEGLRQRMHAYMGSESPSHAEWQHYSRHFQYVGADFANADSYSSIRATLDDTRISLFYLATPPSIFALICNNLATNNCLTGDCRIVLEKPIGECLASSKEVNETLARYFDEESIYRIDHYLGKETVQNLLALRFANRFINSQWDANCIDHVQITVGEIVGIEGRWSYYDRVGQLRDMVQNHLMQLLCLVAMEPPNSLEADSIRDEKVKIVKALRRIDSDQVSEHVIKGQYSQGWSSGAAVPGYLEEPGCERPDSDTETFIAIKAHVDNWRWAGVPFYLRTGKRVPEKLTEIIIQYKDLPHNIFSGGTSANKLIIRLQPREGIELTMASKRQTLREKLSLQNHTLDLDFRETTGMNRIPDAYERLFLDAINGDQSLFVGREEIEESWRWCDELIDACNQKNIETKPYHAGSWGPPKAELLIEKDGRSWHV

SEQ ID NO: 17149 - DNA, 1443 bp, Pseudomonas putida GB-1
  CDS (1)..(1443): transl_table=11
ttgactattccttgcgacattctggtgttcggtggcacgggcgacctggccctgcacaaattgcttccggcgctctaccatttgtatcgcgaggcgcgcctgaacaacgcggtacgcatcattgccctcgcccgccgcaacatcagccgtaacgaatacctcaagctcgcagaacggcattgccgggcgcagattgcccgcaccgacttcgacgaagatgtgtggcaacgctttgccgcgcgcctcgactacttccccatggatgcctcgcaaagcgccgacttcggtcgcctggcgcgctacctcggcgagcctggcgggctgacccgcgtcttctacctggccaccgcgccctccctgttcgtgccaatcgccaaccacttgcgtatttccgggctggccgacagcgaggcgcgcattgtgctggaaaagcccattggccattcacagcactcggccaccgccatcaacgaagcgatcggcgccgtgttcgaagaaccccaggtgtttcgcattgatcactacctgggcaaggaaaccgtgcagaacctcatggcgctgcgctttgccaacgccctgcttgaacctgtgtggcgcaacggccaggtcgatcatgtgcagatcagcgcctgcgaaaccctcggtgtagagaaccgcggcgggtactacgaccgtgccggggcaacccgcgacatgctccagaaccacttgctgcagctgctgtgcctggtggccatggagccacccgcgcagttcgaagccgaggccgtgcgcgacgagaaagtgaaggtcctgcgtgccctcaagcccattactgggcaggacgtacaggacaagaccgtgcgtggtcagtacggtgccggctacatcggtggccaggaagtgccggcctattacttcgaaaaggacgtggacaacgacagcgataccgaaacctttgtggccgttcaggcgcacatcgacaattggcgctgggctggcgtgccgttctacctgcgcaccggcaagcgcatggcgcggcgcacttcgcagatcgtcatccagttcaagcctgtgccccatgagcttttcagcggcggccaggtcaaccagctgttgatccagctgcaaccggacgaacgcatcagcctgcgcatgatgaccaaaagccccggcaaaggcatgcgactggagccggtggacctggacctcaacctggcccaggtgttcggccagacccgtcgttggggtgcttacgaacgcctgctgctggacatcctggaaggcgactcgacgctgttcatgcggcgtgatgaagtggaagcggcctgggcgtgggtcgacccgatcatcaagggctgggaagagcactttcaggcgccacgccattacccggcgggcaacaacggcccggagcaggccaacagcctactggcgcggcatggcaggcactggcacagctga

SEQ ID NO: 17150 - protein, 480 aa, Pseudomonas putida GB-1
MTIPCDILVFGGTGDLALHKLLPALYHLYREARLNNAVRIIALARRNISRNEYLKLAERHCRAQIARTDFDEDVWQRFAARLDYFPMDASQSADFGRLARYLGEPGGLTRVFYLATAPSLFVPIANHLRISGLADSEARIVLEKPIGHSQHSATAINEAIGAVFEEPQVFRIDHYLGKETVQNLMALRFANALLEPVWRNGQVDHVQISACETLGVENRGGYYDRAGATRDMLQNHLLQLLCLVAMEPPAQFEAEAVRDEKVKVLRALKPITGQDVQDKTVRGQYGAGYIGGQEVPAYYFEKDVDNDSDTETFVAVQAHIDNWRWAGVPFYLRTGKRMARRTSQIVIQFKPVPHELFSGGQVNQLLIQLQPDERISLRMMTKSPGKGMRLEPVDLDLNLAQVFGQTRRWGAYERLLLDILEGDSTLFMRRDEVEAAWAWVDPIIKGWEEHFQAPRHYPAGNNGPEQANSLLARHGRHWHS

SEQ ID NO: 17151 - DNA, 1470 bp, Pseudomonas putida GB-1
  CDS (1)..(1470): transl_table=11
atggctgcgatcagtgtcgaaccttgcacctttgccctgtttggcgccctcggcgacctggcattgcgcaagctgtttcctgcgctctaccagctcgaccgggccaacttgctgcatccggacacccgcctgctggccttggcccgcgaggccggcagtgcgcaggtgcatctggacaccatcgaggcgcacttgcgccggcatgtgcccgaagccgatatcgagcctgcttcgctggggcgcttccttgcccggctgagctaccagcacctggacttccttcagcccgagggctaccaggccctggccgagcaactgcccggcgagcagccgttgatcgcttacttcgccaccgcggcagtggtgtacggggccatttgcgaaaacctcgacaaggtcgggctggccccgcgcacgcgcgtggtactggaaaagcccatcggccacgaccttgagtcgtcgcgccgggtcaacgatgccgtggcgcgcttcttccctgaaaaccgggtctaccgcatcgaccactacctgggcaaagagaccgtgcaaaacctcattgccctgcgcttcgccaacagcctgttcgaaacccagtggaaccagaattccatctcccacgtggagataaccgtcgcggaaaaggtcggtatcgaaggccgttggggttatttcgacaaggccggccagctgcgcgacatgattcagaaccacctgctgcaactgctgtgcctgatcgccatggacccgcccagcgagctgtccgccgatgccattcgcgacgaaaaggtgaaagtgctcaaggccctggcaccgatcaccggcgacggcctgagcacccgtgtggtgcgcggccagtacattgccggctacagcgaaggcaaaccggtgcctggttacctggaagaagacaacgccaacgcccagagcgacaccgaaacgttcgttgccctgcgcgccgacatccgtaactggcgctggtcgggtgtgccgttctacctgcgaaccggcaagcgcatgccgcagaagctgtcgcagatcgtcatccacttcaaggaaacgccgcactacatcttcgccccggagcagcgtttgcagatcggtaacaagctgatcatccgcctgcaaccggacgaaggcatttctttacgggtgatgaccaaggagcaaggcctggacaagggcatgcaactgcgcagtggccctttgcaattgaatttttccgacacctggcgcagcgcaagaattccggatgcctacgagcggcttttgctcgaagtgatgcgcggcaaccagaacctgttcgtgcgcaaggacgaaatcgagtatgcctggaagtggtgcgaccagttgatcgccggctggcgtaacgcgggcgatgcgcccaagccttacgctgcgggctcctgggggccgatgagctcgattgcactgatcacacgcgatgggagggcgtggtatggggatatctga

SEQ ID NO: 17152 - protein, 489 aa, Pseudomonas putida GB-1
MAAISVEPCTFALFGALGDLALRKLFPALYQLDRANLLHPDTRLLALAREAGSAQVHLDTIEAHLRRHVPEADIEPASLGRFLARLSYQHLDFLQPEGYQALAEQLPGEQPLIAYFATAAVVYGAICENLDKVGLAPRTRVVLEKPIGHDLESSRRVNDAVARFFPENRVYRIDHYLGKETVQNLIALRFANSLFETQWNQNSISHVEITVAEKVGIEGRWGYFDKAGQLRDMIQNHLLQLLCLIAMDPPSELSADAIRDEKVKVLKALAPITGDGLSTRVVRGQYIAGYSEGKPVPGYLEEDNANAQSDTETFVALRADIRNWRWSGVPFYLRTGKRMPQKLSQIVIHFKETPHYIFAPEQRLQIGNKLIIRLQPDEGISLRVMTKEQGLDKGMQLRSGPLQLNFSDTWRSARIPDAYERLLLEVMRGNQNLFVRKDEIEYAWKWCDQLIAGWRNAGDAPKPYAAGSWGPMSSIALITRDGRAWYGDI

SEQ ID NO: 17153 - DNA, 1506 bp, Pseudomonas putida GB-1
  CDS (1)..(1506): transl_table=11
atgaccaaacagaccattcccgctgcacccccttgtaccctgttcctgttcggcgccaatggcgacctggtcaagcgcctgctgatgccggcgctgtataacctcagccgcgacggcctgctggaccgtaacctgcgcatcgtcggcgtcgaccacaacgcggccagcgccgcgaatttcgctgagcggctgcaggcgttcatgcgcgagcgtgacaaaggccgcgagggcggcgaccagtgcctcgacgataagctctgggcccgcttggccaagcgcctggattaccagacaggcgacttcctcgacccggcgacttaccaagccattgccaagcgcatcgaaaagaccagccacggcaacgccatcttctacctggccacgtcgccgcgcttcttccccgaagtggcgcagcgcctcgggcaggccggtttgcttgacgagtctgccggcggctttcgccgagtggtggtggaaaagcccttcggcaccgacctggccagcgccgaggcgctcaacgcttgcctgctgaaggtgatgggcgagcggcagatctaccgcatcgaccattatctgggcaaagaaacggtgcagaacattctggtcagccgcttctccaacggcctgttcgaatcgttctggaacaaccactacatcgaccatgtgcagatcaccgcagcagaaaccgtcggcgtcgagacccgtggtgcgttctatgacagcaccggcgccttgcgtgacatggtacccaatcacctgttccagttgctggcgatggtggccatggagccgccggccgcgttcggcgccgatgcggtacgcggtgaaaaggccaaagtggtcggtgccatccgcccatggtcggcaaaaatggccctgaagaactccgtgcgtggccagtacagtgccggcaagcaggggcgcaagcaactgcccggttaccgccaggaggccaacgtcgcgcctgagagccagaccgaaacctacgtggcgctgaaggtgatgatcgacaattggcgctgggccggcgtgccgttctacctgcgcaccggcaagcgcatgagcgtgcgcgacaccgagatcgccatttgcttcaagcccgcgccgtatgcgcagtttcgcgagtcggagctggagcggcccaagcccaactacctgaaaatccagatccagcccaacgaaggcatgtggttcgacctgcaggcaaagcggcccgggccggagctggtgatggagaatgtcgagctgggctttgcctacaaggacttcttcaagatgaccccggcgaccggctacgagacgctgatctacgactgcctgaccggtgaccagaccctgttccagcgggccgacaacatcgaaaacggctggcgagcggtgcagccgtttctcgatgcctgggcccagggcggcgatgtgcatggctacccggccggcgaagatgggcccgaagcgggcaatgaattgctggcgcgggacaagcgcgagtggcaccggttggggtaa

SEQ ID NO: 17154 - protein, 501 aa, Pseudomonas putida GB-1
MTKQTIPAAPPCTLFLFGANGDLVKRLLMPALYNLSRDGLLDRNLRIVGVDHNAASAANFAERLQAFMRERDKGREGGDQCLDDKLWARLAKRLDYQTGDFLDPATYQAIAKRIEKTSHGNAIFYLATSPRFFPEVAQRLGQAGLLDESAGGFRRVVVEKPFGTDLASAEALNACLLKVMGERQIYRIDHYLGKETVQNILVSRFSNGLFESFWNNHYIDHVQITAAETVGVETRGAFYDSTGALRDMVPNHLFQLLAMVAMEPPAAFGADAVRGEKAKVVGAIRPWSAKMALKNSVRGQYSAGKQGRKQLPGYRQEANVAPESQTETYVALKVMIDNWRWAGVPFYLRTGKRMSVRDTEIAICFKPAPYAQFRESELERPKPNYLKIQIQPNEGMWFDLQAKRPGPELVMENVELGFAYKDFFKMTPATGYETLIYDCLTGDQTLFQRADNIENGWRAVQPFLDAWAQGGDVHGYPAGEDGPEAGNELLARDKREWHRLG

SEQ ID NO: 17155 - DNA, 1476 bp, Marinobacter sp. ELB17
  CDS (1)..(1476): transl_table=11
atgaccaaattagacaatactcgctgcgacttgatgatttttggcgccttaggcgacctggccaaccgcaaactgtttccggcgctctaccagcttgagcgcgcggaattgtttgctgaaggaagccgtgttctggcactggcccggcacgagcacagcaacgacgacgtgcgccagcagattgccgataatttgcgccagcgggttccggccgaagaatttgaacaatcggttgtagagcgtctggtacagcgggtggaataccgcagccttgatttcagccgccgcgagagttacccggagttgaacggttggcgcgacagcgtcaataacaatctgattgtgtacatggccacgccgccgtcgttgtacggggtgattgcgcgcaatctacgagattccgactgttgcagtgagcacatccgggtagtggttgagaaacccattggccatgatctgcaatcgtcgcgggtcatcaatgatgcactgggcgaggtatacgctgaaagtgagctgttccgcattgaccattatctgggcaaagagaccgtacaaaatctgattgctctgcgtttcgccaacaatctttttgcctcccagtgggatcagaaccacatttcccacgtggaaatcactgtggccgaaagcttgggtattgaagggcgatggggctatttcgacaaggccgggcaattgcgtgacatgattcagaaccacctgctgcaactgctgtgcctgattgccatggatccaccgtctgatttgtcggcagacagcattcgcgatgaaaaagtgaaagtgctgaaagctctgcgcaaaattacgcccgccatgatggaacattacgcggtgcgcgggcagtacaccgcaggttccagcgagggcaaggcggtgcccggataccttgatgaaaaaggtgctgataaatccagtgataccgaaacttttgtcgccctgaaagtagaaatcgataactggcgctggtctggtgtgccattttacatccgcacgggtaaacggctgcctgaaaagttttcccaaatcgtgattcatttcaaaccggcaccgcactacatatttgacccagaccagaagcatctggccaacaataaattgattatccgcctgcagccagacgaaggcatggcgctgaaaatactcaccaaagaccaaggcctggataaaggcatgcgcctgcgccaggggccgctggaactgaccttcgccgaaacctttgccaaggttcgcatccccgaagcctatgaacggctgctgtgggaagttatgaaaggtcaccagtacctgtttgtgcgccgcgacgaagttgaacacgcctggcgctggatagaccagatcatcaccaattggcaagacagcggcgagccgccaaaacgttacgccgcaggtggttgggggccggtggcatcggtggctttgataacccgtgacggacgaagctggtatgaagatgtctaa

SEQ ID NO: 17156 - protein, 491 aa, Marinobacter sp. ELB17
MTKLDNTRCDLMIFGALGDLANRKLFPALYQLERAELFAEGSRVLALARHEHSNDDVRQQIADNLRQRVPAEEFEQSVVERLVQRVEYRSLDFSRRESYPELNGWRDSVNNNLIVYMATPPSLYGVIARNLRDSDCCSEHIRVVVEKPIGHDLQSSRVINDALGEVYAESELFRIDHYLGKETVQNLIALRFANNLFASQWDQNHISHVEITVAESLGIEGRWGYFDKAGQLRDMIQNHLLQLLCLIAMDPPSDLSADSIRDEKVKVLKALRKITPAMMEHYAVRGQYTAGSSEGKAVPGYLDEKGADKSSDTETFVALKVEIDNWRWSGVPFYIRTGKRLPEKFSQIVIHFKPAPHYIFDPDQKHLANNKLIIRLQPDEGMALKILTKDQGLDKGMRLRQGPLELTFAETFAKVRIPEAYERLLWEVMKGHQYLFVRRDEVEHAWRWIDQIITNWQDSGEPPKRYAAGGWGPVASVALITRDGRSWYEDV

SEQ ID NO: 17157 - DNA, 1470 bp, Bacillus sp. SG-1
  CDS (1)..(1470): transl_table=11
atgatcttcggtgcaaccggcgatttggccaaacgtaagcttttcccttctctgtatcatctcttccgcaaagggaaaatcgcgaaaaactttgccgttataggagttgcccgccgtgaactgtcaaatgaagaattccaggcacatgtaaaggattccgtcctgacatccatcggcagagatgaaaacattgaagagttcatctctcatttctattataagtccaacgatgtttccgacagtgattcatacatagagttaaaccaattggcagcacaattggatgaaaaatataagctggaaggcaacaggattttttaccttgccatggctccggaatttttcggaacaatcactgatcatcttaaacaagatggcctgactgacacggaaggattccaacgcctagtcattgaaaaaccatttggacacgacctagaatcagcagaggttctgaacaaccaaatccgtgcttctttctctgaagaagagatctatcgtatcgaccattatcttggaaaagaaatggtgcaaaatatcgaagttatccgatttgctaatgccctgtttgagcctttatggaacaaccgttacatttccaacatccaagtgacttccagtgaagaactaggtgtagaggaccgcggccgatactacgagaagagcggcgcattaagagacatggtccaaaaccatatgatgcagatggttgcccttctcgccatggagccgccgatcaagctgacgacggatgaaatcagaagcgaaaaggtcaaggtgctaagagccctccgtccgatgaaacaggaagaggtcaaggactatttcgtccgcggccagtatgatgccggatcaatgaaagggactgatgttccaggttaccgtgaaggcagtaatgttgatcctgattccaatacagaaactttcgttgccggaaaactgatgatcgataatttccgctgggccggcacaccattctatatccgtacaggaaaaagaatgaaagccaagtccaccaagattgtcattcagttcaaggatattccgatgaacctctattacaatacagataagcagctgtcaccgaaccttctggtcatccacatccagccggaagaaggaattacgcttcacctgaatgcgaagaagacaggacaaaacatcgaaacgacaccggtgaaactcaactatgtcaataacggtgtggatggaatgaatacacctgaagcctacgaaaaactcctgcatgactgtatgcgtggagatgcaacgaatttcactcactgggatgaagtgaaactttcctgggcatttacggatacaatctccaacgtatgggaaaacacaacagaagaggagttccctaattatcaagcgggaacgatgggaccattggcagcagataaactgcttgcacaagacggtttcttctggtggccattctctgaacttgaagttgacgaatgctaa

SEQ ID NO: 17158 - protein, 489 aa, Bacillus sp. SG-1
MIFGATGDLAKRKLFPSLYHLFRKGKIAKNFAVIGVARRELSNEEFQAHVKDSVLTSIGRDENIEEFISHFYYKSNDVSDSDSYIELNQLAAQLDEKYKLEGNRIFYLAMAPEFFGTITDHLKQDGLTDTEGFQRLVIEKPFGHDLESAEVLNNQIRASFSEEEIYRIDHYLGKEMVQNIEVIRFANALFEPLWNNRYISNIQVTSSEELGVEDRGRYYEKSGALRDMVQNHMMQMVALLAMEPPIKLTTDEIRSEKVKVLRALRPMKQEEVKDYFVRGQYDAGSMKGTDVPGYREGSNVDPDSNTETFVAGKLMIDNFRWAGTPFYIRTGKRMKAKSTKIVIQFKDIPMNLYYNTDKQLSPNLLVIHIQPEEGITLHLNAKKTGQNIETTPVKLNYVNNGVDGMNTPEAYEKLLHDCMRGDATNFTHWDEVKLSWAFTDTISNVWENTTEEEFPNYQAGTMGPLAADKLLAQDGFFWWPFSELEVDEC

SEQ ID NO: 17159 - DNA, 1482 bp, Moritella sp. PE36
  CDS (1)..(1482): transl_table=11
atggtaaaacctgagaataacagtatcgtcatttttggtgcttcgggtgatttaacaaaacgaaagttactccccgcgctttatcacctttatgtcaatgaactgttacctgaagatttttctattttgggtgcgagtaaaacagcattcacggatgattcatttcgtgagaaagtaactaatgatttaatcaaaagtgaaggcgtctctcagcagcaagctgaagaattctgtcaacatttgtattatatatcgatggatatgacagatgctgatagttatgttgcctttaaagaacgcttagaaatattatctgagaagcataatacggttggcaatgctatttattacatggcaacgccaccaagcctatatgcagccatctcaactaatttagctaaacataaattgaataaagaccgtaacggttggaaacgattaatcgttgagaaaccgtttggttatgatcttgcgtcagccaacgagttagatgaacatctacatacttgtttccgtgaacgtcaggtttaccgtatcgatcattacctaggtaaagaaacagtacagaacctattagtattccgcttttcaaatggtttctttgaaccactttggaaccgtagttttattgattacgtggaaattactgccgcagagagtttaggtgttgaagagcgaggtggttattatgatcattctggcgcggttcgagacatgctgcaaaatcatctgttacaggtactagccttagttgcgatggaaccgcctgcggttattaacgcggatgcgatgcgtaacgaagtggttaaagttattcaaagcttacgtccacttgaagaacaagatttaaaagagaatctagtacttggtcaatatacaaagagtgttgtaaatggcgaagaattgcctggttaccgtagtgaaaaagacgttgatgaagattcacgtacacctacgtatgtaggcatgaagatgatgattgataactggcgttggaacggtgtacctttctatgtacgtaccggtaaacgtatgccagaacgtctaactgaaattgtggttcattttaagaaaaccccacatccagtgttcggtcaaaatgccccagagaataagttgatcttacgtattcaaccaaatgaatcgattcagatggattttggtttgaaaaaaccgggtgcaggttttactgcgcaacaggtatcaatgagctttaattataatagcctggaagaaaataatttattaacggcttatgagcgcttgctactggattgtatgaaaggcgatgcgactttatttgctcgttccgatgcggttaaagcgtgttgggaatacgtgcagccaatcttagattacaaaaaagaagtgaaatctttatttggatataagtgtggtacttggggtccgaaccgagcagatgagatgttagaaaaagacggccgtgaatggcgcttttctagcgaagaagtaattaattaa

SEQ ID NO: 17160 - protein, 493 aa, Moritella sp. PE36
MVKPENNSIVIFGASGDLTKRKLLPALYHLYVNELLPEDFSILGASKTAFTDDSFREKVTNDLIKSEGVSQQQAEEFCQHLYYISMDMTDADSYVAFKERLEILSEKHNTVGNAIYYMATPPSLYAAISTNLAKHKLNKDRNGWKRLIVEKPFGYDLASANELDEHLHTCFRERQVYRIDHYLGKETVQNLLVFRFSNGFFEPLWNRSFIDYVEITAAESLGVEERGGYYDHSGAVRDMLQNHLLQVLALVAMEPPAVINADAMRNEVVKVIQSLRPLEEQDLKENLVLGQYTKSVVNGEELPGYRSEKDVDEDSRTPTYVGMKMMIDNWRWNGVPFYVRTGKRMPERLTEIVVHFKKTPHPVFGQNAPENKLILRIQPNESIQMDFGLKKPGAGFTAQQVSMSFNYNSLEENNLLTAYERLLLDCMKGDATLFARSDAVKACWEYVQPILDYKKEVKSLFGYKCGTWGPNRADEMLEKDGREWRFSSEEVIN

SEQ ID NO: 17161 - DNA, 1548 bp, Boophilus microplus
  CDS (1)..(1548)
atgcctcaaacatcgttcccgccttctctctctcctcagtgcatcgctctcctgaaggaatcgatacacctgttcgaggagcctgtgcaggagggacagcaacacatcttcgtcgtgctcggcgcttcgggggacttggcaaagaaaaaaatttacccaacgttatgggcactgttccgagacggtttattaccacagaaaacaaagttcgttggctatgctcgcaccaagatgaccttggaggagctgtgggcgaagattgttccttttctaaaagtgaaggacgaagaaaagagccggtttgccgagttcacccgtgccaactcgtacttgtcgggcaaatacgatgagagcagtgactttgtagttctcaacaaggcgatggaaaaacttgaaggcaattccggtggtaatcggatgttttacatggccctgccaccaacagttttccagcaagttgccagcaacatcaagcagcattgcatgagcaagcagggctggacccgtgttgtgattgagaagccatttggccgggactcgcaatcatcagccgaactttccaaccacctggccgcgctatttgaagagtctcagatataccgcatcgaccactatcttggcaaggagatggtccagaatctcatggcaattaggtttgccaaccagatcttcggtcctacgtggaacagaaacaacattgccagtattgtcatatcattcaaagagccatttggaacgcaaggccgaggtggttactttgacaactttggtattatcagggacgtcatgcagaaccacctgctgcaaattatgtctctcgtcgccatggagaggccagtgtccacaaatgcagaagacatcaggaatgagaaggtaaaggtgctcaagtgcgttcccccgatcaccatggacaacgtggtattgggccagtatgtgggtaaaccaggcggcactggagaggagacccagggctacctggacgaccccactgtgccaaagggctcccacacggccacttatgccacagcagtagcctacatcaacaacgagcgctgggaaggagtgcccttcatccttcgatgtggcaaggcactgaatgagcgtaaggcagaagtgcgaatccagtacaaggaagttgctggcgacctctttgccggggagagcaagcgcaacgaattggtattgagggtgcagcctgatgaggccatctacgtcaagttcatgaccaagaaacctggaatggccttcgacattgaggagaccgagctggatctcacctatggcagtcgctacaagggtatggtcatgccggatgcttacgaacgtctcattctggatgcgttctacggcagtcaggtgcactttgtgcgcagcgatgaattggccgaggcgtggcgtattttcacacccctcctgcatcaaattgataaggagaagcccaaaccagtgccttacgagtatggcagccgaggcttcaaggaggcggacgatctctggaaaagggcgggcttcaagttttacggcacataccgttggactaaagcttaa

SEQ ID NO: 17162 - protein, 515 aa, Boophilus microplus
MPQTSFPPSLSPQCIALLKESIHLFEEPVQEGQQHIFVVLGASGDLAKKKIYPTLWALFRDGLLPQKTKFVGYARTKMTLEELWAKIVPFLKVKDEEKSRFAEFTRANSYLSGKYDESSDFVVLNKAMEKLEGNSGGNRMFYMALPPTVFQQVASNIKQHCMSKQGWTRVVIEKPFGRDSQSSAELSNHLAALFEESQIYRIDHYLGKEMVQNLMAIRFANQIFGPTWNRNNIASIVISFKEPFGTQGRGGYFDNFGIIRDVMQNHLLQIMSLVAMERPVSTNAEDIRNEKVKVLKCVPPITMDNVVLGQYVGKPGGTGEETQGYLDDPTVPKGSHTATYATAVAYINNERWEGVPFILRCGKALNERKAEVRIQYKEVAGDLFAGESKRNELVLRVQPDEAIYVKFMTKKPGMAFDIEETELDLTYGSRYKGMVMPDAYERLILDAFYGSQVHFVRSDELAEAWRIFTPLLHQIDKEKPKPVPYEYGSRGFKEADDLWKRAGFKFYGTYRWTKA

SEQ ID NO: 17163 - DNA, 1398 bp, Boophilus microplus
  CDS (1)..(1398)
atgagaagaaacggaggggcactgttccgagacggtttattaccacagaaaacaaagttcgttggctatgctcgcaccaagatgaccttggaggagctgtgggcgaagattgttccttttctaaaagtgaaggacgaagaaaagagccggtttgccgagttcacccgtgccaactcgtacttgtcgggcaaatacgatgagagcagtgactttgtagttctcaacaaggcgatggaaaaacttgaaggcaattccggtggtaatcggatgttttacatggccctgccaccaacagttttccagcaagttgccagcaacatcaagcagcattgcatgagcaagcagggctggacccgtgttgtgattgagaagccatttggccgggactcgcaatcatcagccgaactttccaaccacctggccgcgctatttgaagagtctcagatataccgcatcgaccactatcttggcaaggagatggtccagaatctcatggcaattaggtttgccaaccagatcttcggtcctacgtggaacagaaacaacattgccagtattgtcatatcattcaaagagccatttggaacgcaaggccgaggtggttactttgacaactttggtattatcagggacgtcatgcagaaccacctgctgcaaattatgtctctcgtcgccatggagaggccagtgtccacaaatgcagaagacatcaggaatgagaaggtaaaggtgctcaagtgcgttcccccgatcaccatggacaacgtggtattgggccagtatgtgggtaaaccaggcggcactggagaggagacccagggctacctggacgaccccactgtgccaaagggctcccacacggccacttatgccacagcagtagcctacatcaacaacgagcgctgggaaggagtgcccttcatccttcgatgtggcaaggcactgaatgagcgtaaggcagaagtgcgaatccagtacaaggaagttgctggcgacctctttgccggggagagcaagcgcaacgaattggtattgagggtgcagcctgatgaggccatctacgtcaagttcatgaccaagaaacctggaatggccttcgacattgaggagaccgagctggatctcacctatggcagtcgctacaagggtatggtcatgccggatgcttacgaacgtctcattctggatgcgttctacggcagtcaggtgcactttgtgcgcagcgatgaattggccgaggcgtggcgtattttcacacccctcctgcatcaaattgataaggagaagcccaaaccagtgccttacgagtatggcagccgaggcttcaaggaggcggacgatctctggaaaagggcgggcttcaagttttacggcacataccgttggactaaagcttaa

SEQ ID NO: 17164 - protein, 465 aa, Boophilus microplus
MRRNGGALFRDGLLPQKTKFVGYARTKMTLEELWAKIVPFLKVKDEEKSRFAEFTRANSYLSGKYDESSDFVVLNKAMEKLEGNSGGNRMFYMALPPTVFQQVASNIKQHCMSKQGWTRVVIEKPFGRDSQSSAELSNHLAALFEESQIYRIDHYLGKEMVQNLMAIRFANQIFGPTWNRNNIASIVISFKEPFGTQGRGGYFDNFGIIRDVMQNHLLQIMSLVAMERPVSTNAEDIRNEKVKVLKCVPPITMDNVVLGQYVGKPGGTGEETQGYLDDPTVPKGSHTATYATAVAYINNERWEGVPFILRCGKALNERKAEVRIQYKEVAGDLFAGESKRNELVLRVQPDEAIYVKFMTKKPGMAFDIEETELDLTYGSRYKGMVMPDAYERLILDAFYGSQVHFVRSDELAEAWRIFTPLLHQIDKEKPKPVPYEYGSRGFKEADDLWKRAGFKFYGTYRWTKA

SEQ ID NO: 17165 - DNA, 1605 bp, Boophilus microplus
  CDS (1)..(1605)
atggctggccgcgcggcgagtgaagaaaccctgttggaaatcatccacagcagtctctgctcggcggaagagagctcctactccagtgaagacaggtgcatcgctctcctgaaggaatcgatacacctgttcgaggagcctgtgcaggagggacaacaacacatcttcgtcgtgctcggcgcttcgggggacttggcaaagaaaaaaatttacccaacgttatgggcactgttccgagacggtttattaccacagaaaacaaagttcgttggctatgctcgcaccaagatgaccttggaggagctgtgggcgaagattgttccttttctaaaagtgaaggacgaagaaaagagccggttcgccgagttcacccgtgccaactcgtacttgtcgggcaaatacgatgagagcagtgattttgtagttctcaacaaggcaatggaaaaacttgaaggcaattccggtggtaaccgaatgttttacatggccctgccaccaacagttttccagcaagttgccagcaacatcaagcagcattgcatgagcaagcagggctggacccgtgttgtgattgagaagccatttggccgggactcgcaatcatcggccgaactttccaaccacctggccgcgctatttgaagagtctcagatataccgcatcgaccactatcttggcaaggagatggtccagaatctcatggcaattaggtttgccaaccagatcttcggtcctacgtggaacagaaacaacattgccagtattgtcatatcattcaaagagccatttggaacgcaaggccgaggtggttactttgacaactttggtattatcagggacgtcatgcagaaccacctgctgcaaattatgtccctcgtcgccatggagaggccagtgtctacaaatgcagaggacatcaggaatgagaaggtaaaggtgctcaagtgcgttcccccgatcaccatggacaacgtagtattgggccagtacgtgggtaaaccaggcggcactggagaagagacccagggctacctggacgaccccactgtgccaaagggctcccacacggccacttatgccacagcggtagcctacatcaacaacgagcgctgggaaggagtgcccttcatccttcgatgtggcaaggcactgaatgagcgcaaggcagaagtgcgaatacagtacaaggaagttgctggcgacctctttgccggggagagcaagcgcaacgaattggtattgagggtgcagcctgatgaggccatctatgtcaagttcatgaccaagaaacctggaatggccttcgacattgaggagaccgagctggatctcacctatggcagtcgctacaagggtatggtcatgccggatgcttacgagcgtctcattctggatgtgttttacggcagtcaggtgcactttgtgcgcagcgatgaattggccgaggcgtggcgtatttttacacccctcctgcatcaaattgataaggagaagcccaaaccagtgccttacgagtatggcagccgaggcttcaaggaggcggacgatctctggaaaagggcgggcttcaagttttacggcacataccgttggactaaagcttaa

SEQ ID NO: 17166 - protein, 534 aa, Boophilus microplus
MAGRAASEETLLEIIHSSLCSAEESSYSSEDRCIALLKESIHLFEEPVQEGQQHIFVVLGASGDLAKKKIYPTLWALFRDGLLPQKTKFVGYARTKMTLEELWAKIVPFLKVKDEEKSRFAEFTRANSYLSGKYDESSDFVVLNKAMEKLEGNSGGNRMFYMALPPTVFQQVASNIKQHCMSKQGWTRVVIEKPFGRDSQSSAELSNHLAALFEESQIYRIDHYLGKEMVQNLMAIRFANQIFGPTWNRNNIASIVISFKEPFGTQGRGGYFDNFGIIRDVMQNHLLQIMSLVAMERPVSTNAEDIRNEKVKVLKCVPPITMDNVVLGQYVGKPGGTGEETQGYLDDPTVPKGSHTATYATAVAYINNERWEGVPFILRCGKALNERKAEVRIQYKEVAGDLFAGESKRNELVLRVQPDEAIYVKFMTKKPGMAFDIEETELDLTYGSRYKGMVMPDAYERLILDVFYGSQVHFVRSDELAEAWRIFTPLLHQIDKEKPKPVPYEYGSRGFKEADDLWKRAGFKFYGTYRWTKA

SEQ ID NO: 17167 - DNA, 1506 bp, Pichia guilliermondii
  CDS (1)..(1506)
atgtcggctccatttggcgaccatgtgtccattgtagttttcggggcttccggagacttggccaaaaagaaaacgttccctgccttatttggcttgttccgtcagggccaattgcccgcttcggtgaagatttttggttacgcccgttcaaaattgtctcaagaagatttcagagaaagagtcgaacccaattttaagaccaagaatgacaaagacaaagaaaaagtcaaggagttcttggacttgtgtacgtaccattctggtcaatacgacaccgatgaggggtacaaagagttgctcaaggaaatcactgaattcgaaaaatccggcaacgtttccaaaccagaacgtttgttctacttggctttaccaccatctacattcactgtggtggctctgcaattgaagaagcttgtgtaccctgaaaatggtgctgtcagattgatcgtggagaagcctttcggtcatgacttggagtcttctcgtaagttgcaaaaggacttggctcctttgttttccgaggaggaattgtacagaattgaccattacttgggtaaggaaatggtgaagaatttgttggttttgcgtttcggaaaccaattgttgaatgctgcttggaacaaggaacacattcagtcgatccagatctcgttcaaggaagctttcggaactgaaggtagaggaggatactttgacgaaatcggtattgtgagagatgtgatgcaaaaccacattttgcaggtattgaccttgttaactatggaacgtccagtttcatttgacccggaagctattcgtgatgaaaaggtcaaggtgttgaaagcatttgctccattgaacaacgatgacattcttttgggtcaatactccaagtctgaggatggcaagaagccaggttatttggatgacgaaacagtcaagaaggactctaaatgtgtcacctacgcagcaattggcgccagaattaacaatgagagatgggaggatgtcccaatcgtcatgagagcaggaaaagcattagatgagtcaaaggtggagatcagaatccaatttaagccggttcccagaggcatgtttgaacagatccaaagtaacgagttggttatcagaattcaacccgacgaagctgtttacatgaagatcaactccaagattcctggtatctccaccgagacggcattgaccgacttggacttgacttactccaagagatactccaaggacttctggatccccgaggcttacgagacgttgatccgagactgtcttcttggcaatcactccaactttgtcagagacgacgagttggatgtgtcgtggcaattgttcactccattgttgaactacatcgagtctgacaaggctccagttcccgagaaatatccatacggatccaagggacccaaaggattaagagactttttgggcaagcacaactacgtctttaccgacgaaggaacttatcaatggcctttgacgagaccagatgttaagggcaagatatag

SEQ ID NO: 17168 - protein, 501 aa, Pichia guilliermondii
MSAPFGDHVSIVVFGASGDLAKKKTFPALFGLFRQGQLPASVKIFGYARSKLSQEDFRERVEPNFKTKNDKDKEKVKEFLDLCTYHSGQYDTDEGYKELLKEITEFEKSGNVSKPERLFYLALPPSTFTVVALQLKKLVYPENGAVRLIVEKPFGHDLESSRKLQKDLAPLFSEEELYRIDHYLGKEMVKNLLVLRFGNQLLNAAWNKEHIQSIQISFKEAFGTEGRGGYFDEIGIVRDVMQNHILQVLTLLTMERPVSFDPEAIRDEKVKVLKAFAPLNNDDILLGQYSKSEDGKKPGYLDDETVKKDSKCVTYAAIGARINNERWEDVPIVMRAGKALDESKVEIRIQFKPVPRGMFEQIQSNELVIRIQPDEAVYMKINSKIPGISTETALTDLDLTYSKRYSKDFWIPEAYETLIRDCLLGNHSNFVRDDELDVSWQLFTPLLNYIESDKAPVPEKYPYGSKGPKGLRDFLGKHNYVFTDEGTYQWPLTRPDVKGKI

SEQ ID NO: 17169 - DNA, 1815 bp, Petroselinum crispum
  CDS (1)..(1815)
atggccaccctttcttcagctaccaattgtcgctcctcctcctcctcctcctattcctcttcatcttctctctttccaaggattcatcatcaacaacacttcatcgtttcgttggcttctcccaaacctctattcaacaagctttctttccattccaatcaaccttctttttccttcactcctgctcctgctcctgctgctgcatcccaagatggtgcaatatccacaacggtgccacatattgaaaatgaaactccactcaagaaagtcaagaatgcaaatttatcagttccaccccctcaggagtccaaaggcattactccttttcgtctcaacaaagacaagtcctctgtcactatcactgtcgtcggagcttctggggacctggccaagaagaagatatttcctgcactttttgcactttattacgaggactgcctacctgagcacttcacaatttttggttatgcccgaagtaagatgactgatgctgaacttagggacatggtgagcaagaccctcacttgcaggattgataagagggcaaactgtggggaaaagatggaacaatttttgaaacgatgcttctatcattctggtcaatatgattctgaagccaattttgccgaacttgacaaaaaactgaaggaacacgaggctggaacaattgccaatcgtcttttctatctatcaattccaccaaacatttttataaatgctgtaaaatctgcaagcatatccgcttcttctgcaaatggctggacaagggtcatcgtagagaaaccatttggtcgggattctgaatcctctgctgcactgacaacagctctcaaacagtatctggaggaagatcaaatattcaggatagatcactatcttggaaaagagctagtggagaatctttctgtccttcgattctccaatctcatatttgaacctttatggtctagacagtttattagaaacgtgcagctgatattttctgaagattttggaaccgaaggcaggggagggtactttgataactatggaatagtcagagacataatgcaaaaccatctgctacaaattttggcactctttgccatggaaacacctgttagtttggatgcagaagatatcaggaatgaaaaagtcaaagttctccgatcaatgaggcccattcaacttgatgatgtggttatagggcagtataagagccacacaaggggaggtgtcaattaccctgcatacaccgacgacaagactgtcccccataatagtctgacaccaacatttgctgcagccgccctttttatagataatgcaagatgggatggtgtaccgtttttaatgaaagctggaaaagccctccatgataggaggactgagataagagtacagtttagacatgtacctggtaatctatacaaacggaactttggaacaaatcttgaccatgagaccaatgagcttgttattcgcgtacaacctgatgaagctatatatctgaagattaataataaggtgccaggtttaggaatgagactggatcgcagcaatctgaatctcttatattcgacaaggtactcgggggagatccccgatgcatacgaaaggcttcttcttgatgccgtcgaaggtgaaaggagactgtttatccgcagtgacgaactggatgctgcttggtcgctctttacacccgtattgaaagatctagaagacaagaaaactgttcccgaatattacccttatgggagtcgaggacccgttggtgctcactatcttgcagccaaatataaagttaggtggggagattttgcaggagatcaatga

SEQ ID NO: 17170 - protein, 604 aa, Petroselinum crispum
MATLSSATNCRSSSSSSYSSSSSLFPRIHHQQHFIVSLASPKPLFNKLSFHSNQPSFSFTPAPAPAAASQDGAISTTVPHIENETPLKKVKNANLSVPPPQESKGITPFRLNKDKSSVTITVVGASGDLAKKKIFPALFALYYEDCLPEHFTIFGYARSKMTDAELRDMVSKTLTCRIDKRANCGEKMEQFLKRCFYHSGQYDSEANFAELDKKLKEHEAGTIANRLFYLSIPPNIFINAVKSASISASSANGWTRVIVEKPFGRDSESSAALTTALKQYLEEDQIFRIDHYLGKELVENLSVLRFSNLIFEPLWSRQFIRNVQLIFSEDFGTEGRGGYFDNYGIVRDIMQNHLLQILALFAMETPVSLDAEDIRNEKVKVLRSMRPIQLDDVVIGQYKSHTRGGVNYPAYTDDKTVPHNSLTPTFAAAALFIDNARWDGVPFLMKAGKALHDRRTEIRVQFRHVPGNLYKRNFGTNLDHETNELVIRVQPDEAIYLKINNKVPGLGMRLDRSNLNLLYSTRYSGEIPDAYERLLLDAVEGERRLFIRSDELDAAWSLFTPVLKDLEDKKTVPEYYPYGSRGPVGAHYLAAKYKVRWGDFAGDQ

SEQ ID NO: 17171 - DNA, 1488 bp, Petroselinum crispum
  CDS (1)..(1488)
atgacatctgataaatggagtatagagaaaagagcacctcttagaaatgattctgttttgaaagaagaaaatgtgccagaaattggatgtctttcaattgttgttcttggtgcttctggtgatcttgccaagaaaaagacttttccagcacttttcaatctttatcgtcaggggtttttgcaatcacatgaagtctacattttcggctatgcaaggacaaagatatcggacgaagagttgagagatcgaattcgtggatatcttgttccaagcaagaatactgtggaggggcatgaagaagatttaactaactttctgcaattgatcaaatatgtttgcggatcttatgacaccgaggaggggtatcaattactggataaagaaatatctgagcacgaaatatacagaaattgcacggaaggatcatcccgtagactattttaccttgctcttcctccatcagtatatcctcctgtctgcaagatgatcaggaaatgctgcatgaataaatctgatcttggtggatggactcggattgttgttgaaaagccctttggcagggatttggagtcggctgagcaactcagtaaccagataggggagttgtttgaagagccccagatttaccgtattgatcattatctgggaaaagaattggtgcagaacttgttggtacttcgtttcgcaaatcgtttcttcatgccactttggaatcgtgacaacattgacaatattcagattgtatttagggaggattttggaactgatggccgtggtggatattttgatcagtacggaattatccgcgatatcatccaaaaccatctattgcaggtcctatgccttgttgccatggagaagcctgtctctcttaagcctgagcatattcgagatgagaaagtgaaggttcttcaatctgtagttcctataaaagatgaagaggttgtgctcggacagtacgatggctatttggaagacccgacagttcctgatggctcgtacactcccacatttgctactatggttttaagaatacacaatgagagatgggaaggtgtaccctttatactcaaggccgggaaagctttgaattctagaaaggcagaaatccgggttcagttcaaggatgttcctggtgatatattcaaaagtaagaagcaaggaaggaacgaatttgtaatacgcctgcaaccttcagaggcaatgtatatgaagcttacagtcaaacaaccaggacttaagatgtcaactgtgcaaagtgagatggacttgtcatacggacagcgttatcaggacgttaccattccagaagcttatgaacgtctgattcttgatacgataagaggtgaccaacaacattttgttcggagagatgaacttaaggcggcctgggagattttcactcctctcctgcacagaatcgacaagggagagtttaaatcacttccgtacaagccaggcagcagagggccagaggaaagcggataa

SEQ ID NO: 17172 - protein, 495 aa, Petroselinum crispum
MTSDKWSIEKRAPLRNDSVLKEENVPEIGCLSIVVLGASGDLAKKKTFPALFNLYRQGFLQSHEVYIFGYARTKISDEELRDRIRGYLVPSKNTVEGHEEDLTNFLQLIKYVCGSYDTEEGYQLLDKEISEHEIYRNCTEGSSRRLFYLALPPSVYPPVCKMIRKCCMNKSDLGGWTRIVVEKPFGRDLESAEQLSNQIGELFEEPQIYRIDHYLGKELVQNLLVLRFANRFFMPLWNRDNIDNIQIVFREDFGTDGRGGYFDQYGIIRDIIQNHLLQVLCLVAMEKPVSLKPEHIRDEKVKVLQSVVPIKDEEVVLGQYDGYLEDPTVPDGSYTPTFATMVLRIHNERWEGVPFILKAGKALNSRKAEIRVQFKDVPGDIFKSKKQGRNEFVIRLQPSEAMYMKLTVKQPGLKMSTVQSEMDLSYGQRYQDVTIPEAYERLILDTIRGDQQHFVRRDELKAAWEIFTPLLHRIDKGEFKSLPYKPGSRGPEESG

SEQ ID NO: 17173 - DNA, 1605 bp, Petroselinum crispum
  CDS (1)..(1605)
atgaaatcagcagtgtgtgacatagttcataagatgtcggataaatggtgcttagaggaaagagcccctgttgttgaggatagtgccggagatcctattgttaaagatactcaaccaccaccacccgtgtctgaagatggttgcctatcaattgttgtgcttggtgcttctggtgatcttgccaagaaaaagacttttcctgctctctttaacctttaccgccagggtttcttgcagtcacatgaagtatacatttttggctatgccaggaccaagatttctgatgatgacttgagagaccgcattcgtggatatcttactccaaacaagaacactgcagaaggacacacagaagatgtatcaaaatttctgcaactgatcaaatacgtctgtggttcttatgacgcagcggagggttttcagtgtttggataaggaaatatctgagcatgaaatatcaagaaacagtattgaaggatcgtcccggagactattttaccttgcacttcctccttcagtatatcctcctgtctgcaaaatgattaagacttactgcatgaataaatctgatcttggtggatggactcgtattgttgttgagaagccctttggtagggacttggagtcagctgagcatctcagtaaccagataggagaactgtttgaggagccacagatatatcggattgatcactatttgggaaaagagctggtgcagaatttgttggtgcttcgttttgctaatcgtttcttcctgccttcatggaatcgtgacaacatcagtagtgtgcagattgtcttccgagaggattttggaactgaaggccgtggcggatattttgatcagtatggaatcatccgggatattatccaaaatcatctcttgcaggttctttgcctcgttgctatggaaaaacctatttctcttaaacctgagcacattcgagatgagaaagtgaaggttcttcaatctgtagctccacttaatgatgaagaggttgtgcttggacaatatgatggttacttggatgatcccactgtgcccgctggctctaacactccaacttttgcaaccatggtattgcgtatacacaatgaaagatgggaaggtgttcctttcgtacttaaggctggaaaagcattggaatctagaaaggcagaaattcgtatccaattcaaggaagtcccgggtgatatatttaaatgtcaaaagcaggggagaaatgaatttgtgatacggttacaaccttcagaggccatgtatatgaaacttacagtcaagaagcctggacttgagatgtctactgctcagagtgagctcgacttgtcatatgggcagcgttatcaggatgtaaccataccggaggcttatgaacgacttattcttgacactataaggggtgatcagcagcattttgttcgcagagatgagttgaaggcagcctgggagattttcacccctcttcttcacagaatagataaaagtgaacttaaatcagtttcatacaaaccaggcagccgaggcccagaggaagcggatgagttgctgaaaaaagttggctatgttcagacacatggctatacatggattcctccaaccctataa

SEQ ID NO: 17174 - protein, 534 aa, Petroselinum crispum
MKSAVCDIVHKMSDKWCLEERAPVVEDSAGDPIVKDTQPPPPVSEDGCLSIVVLGASGDLAKKKTFPALFNLYRQGFLQSHEVYIFGYARTKISDDDLRDRIRGYLTPNKNTAEGHTEDVSKFLQLIKYVCGSYDAAEGFQCLDKEISEHEISRNSIEGSSRRLFYLALPPSVYPPVCKMIKTYCMNKSDLGGWTRIVVEKPFGRDLESAEHLSNQIGELFEEPQIYRIDHYLGKELVQNLLVLRFANRFFLPSWNRDNISSVQIVFREDFGTEGRGGYFDQYGIIRDIIQNHLLQVLCLVAMEKPISLKPEHIRDEKVKVLQSVAPLNDEEVVLGQYDGYLDDPTVPAGSNTPTFATMVLRIHNERWEGVPFVLKAGKALESRKAEIRIQFKEVPGDIFKCQKQGRNEFVIRLQPSEAMYMKLTVKKPGLEMSTAQSELDLSYGQRYQDVTIPEAYERLILDTIRGDQQHFVRRDELKAAWEIFTPLLHRIDKSELKSVSYKPGSRGPEEADELLKKVGYVQTHGYTWIPPTL

SEQ ID NO: 17175 - DNA, 1533 bp, Nicotiana tabacum
  CDS (1)..(1533)
atggcagcatcatggtgcattgaaaaaagaggttctcttcggctcgactcttttagagagaatgataatatacctgaaaccgggtgtctttccattattgttcttggcgcttctggtgatcttgccaagaagaaaacttttcctgctctcttcaacctctaccgacagggattcctgcaatccaatgaagttcacatttttggctatgcaaggacaaaaatttctgacgatgacttgagaagccgtatccgtgggtatctttctaaggggaaagaatatgaagaagtatcggagtttctgcaactgattaaatacgtcagtggctcttatgattctggggagggctttagtttactggacaaggcgatagctgagcacgaattcgcaaaaaatagcacggaaggatcatccagaagactcttctactttgctcttcctccatcagtatatccctctgtttgcaggatgataaaaaactattgtatgaacaaatctgatcttggtggttggactcgcattgttgttgagaagcccttcggcaaggatttagcttcagctgagcaactaagttcccagataggagaactatttaatgaaccccaaatttaccggattgaccattatttggggaaggagttggttcagaatgtgttggttctgcgttttgcaaaccgcttctttttgccgctctggaatcgtgacaacattgataatatacagattgtctttagggaggactttggaactgaaggccgcggtggatattttgatgaatatgggattatacgtgacattattcagaatcagctactgcaggtcctttgccttgttgctatggagaagcccgtgtctcagaagcccgagcacgtccgggatgagaaagttaaggttcttcaatcaatgcttccaatcaaagatgaagaggtcgttcttgaacaatatgaaggctataaggatgacccaacggttcctggcaactcaaatactcctacttttgcaactatggttttacgcatacacaatgaaagatgggaaggtgtgccctttataatgaaggctggaaaagcactaaattcaagaaaagcagaaatacgagtgcagtttaaggatgttcctggtgatatatttagatgtaaaaagcaggggagaaatgagtttgttatacgcctccagccttcagaagccatgtacatgaagcttacggtcaagaagcctgggcttgaaatgtcaactgttcaaagtgaattagacctgtcatatgggcagcgttatcaaggggttgtcattccagaggcttatgaacgtctgattctcgacacaataagaggggatcagcagcattttgtgcgcagagatgagctcaaggccgcttgggagatttttaccccacttttgcatagaattgacgatggagagatcaagccaattccatacaagccgggcagcagaggtcctgctgaagcagatgagttgctgcaaaatgtcggttacgttcaaactcatggctatatatggattcctcccacattataa

SEQ ID NO: 17176 - protein, 510 aa, Nicotiana tabacum
MAASWCIEKRGSLRLDSFRENDNIPETGCLSIIVLGASGDLAKKKTFPALFNLYRQGFLQSNEVHIFGYARTKISDDDLRSRIRGYLSKGKEYEEVSEFLQLIKYVSGSYDSGEGFSLLDKAIAEHEFAKNSTEGSSRRLFYFALPPSVYPSVCRMIKNYCMNKSDLGGWTRIVVEKPFGKDLASAEQLSSQIGELFNEPQIYRIDHYLGKELVQNVLVLRFANRFFLPLWNRDNIDNIQIVFREDFGTEGRGGYFDEYGIIRDIIQNQLLQVLCLVAMEKPVSQKPEHVRDEKVKVLQSMLPIKDEEVVLEQYEGYKDDPTVPGNSNTPTFATMVLRIHNERWEGVPFIMKAGKALNSRKAEIRVQFKDVPGDIFRCKKQGRNEFVIRLQPSEAMYMKLTVKKPGLEMSTVQSELDLSYGQRYQGVVIPEAYERLILDTIRGDQQHFVRRDELKAAWEIFTPLLHRIDDGEIKPIPYKPGSRGPAEADELLQNVGYVQTHGYIWIPPTL

SEQ ID NO: 17177 - DNA, 1536 bp, Nicotiana tabacum
  CDS (1)..(1536)
atggcagcatcatggtgcattgaaaaaaggggttctattcggctcgactcttttagagataatgataatatacctgaaactgggtgtctttccattattgttcttggtgcttctggtgatcttgccaagaagaaaacttttcctgcgctcttcaacctctaccggcagggatttctgcaatccaatgaggttcacatttttggctatgcaaggaccaaaatttctgacgacgacttgagaggccgtatccgtgggtatctttctcaggggaaagaaaatgaagaagaagtatcggagtttctgcagctgattaaatacgtcagtggctcttatgattctggggagggctttagtttactggacaaggctatagctgagcacgaaattgcaaaaaatagcacagaaggatcatccagaagactcttctactttgctcttcctccatcagtatatccctccgtttgcagaatgataaaaaattactgtatgaacaaatctgatcttggtggttggactcgcattgttgttgagaagcccttcggcaaggatttagcttcagctgagcaactaagttctcagataggagaactatttgatgaaccacaaatttaccggattgaccattatttgggaaaggagttggtgcagaatttgttggtgctgcgttttgcaaatcgcttctttttgccgctctggaatcgtgacaacattgataatatacagattgtctttagggaggactttggaactgaaggtcgctgtggatattttgatgaatatgggattatacgtgacattattcagaatcagctattgcaggtcctttgccttgttgccatggagaagcctgtgtcccagaagcccgaacacattcgggatgagaaagttaaggttcttcaatcaatgcttccaattaaagatgaagaggttgttcttggacaatatgaaggctataaggatgacccaacggttcctgacaactcaaatactcctacttttgcaactatggttttacgcatacacaatgaaagatgggaaggtgtgccctttataatgaaggctggaaaagcactaaattcaagaaaagcagaaatacgagtgcagtttaaggatgttcctggtgatatatttagatgtaaaaagcaggggagaaatgagtttgttatacgcctccagccttcagaagccatgtacatgaagcttacggtcaagaagcctgggcttgaaatgtcaactgttcaaagtgaattagacctgtcatataggcagcgttatcaaggggttgtcattccagaggcttatgaacgtctgattctcgacacaataagaggggatcagcagcattttgtgcgcagagatgagctcaaggccgcttgggagatttttaccccacttttgcatagaattgacgatggagaggtcaagccaattccatacaagccaggcagcagaggtcccgctgaagcagatgagttgctgcaaaatgtcggttacgttcaaactcatggctatatatgtattcctcccacattataa

SEQ ID NO: 17178 - protein, 511 aa, Nicotiana tabacum
MAASWCIEKRGSIRLDSFRDNDNIPETGCLSIIVLGASGDLAKKKTFPALFNLYRQGFLQSNEVHIFGYARTKISDDDLRGRIRGYLSQGKENEEEVSEFLQLIKYVSGSYDSGEGFSLLDKAIAEHEIAKNSTEGSSRRLFYFALPPSVYPSVCRMIKNYCMNKSDLGGWTRIVVEKPFGKDLASAEQLSSQIGELFDEPQIYRIDHYLGKELVQNLLVLRFANRFFLPLWNRDNIDNIQIVFREDFGTEGRCGYFDEYGIIRDIIQNQLLQVLCLVAMEKPVSQKPEHIRDEKVKVLQSMLPIKDEEVVLGQYEGYKDDPTVPDNSNTPTFATMVLRIHNERWEGVPFIMKAGKALNSRKAEIRVQFKDVPGDIFRCKKQGRNEFVIRLQPSEAMYMKLTVKKPGLEMSTVQSELDLSYRQRYQGVVIPEAYERLILDTIRGDQQHFVRRDELKAAWEIFTPLLHRIDDGEVKPIPYKPGSRGPAEADELLQNVGYVQTHGYICIPPTL

SEQ ID NO: 17179 - DNA, 1767 bp, Nicotiana tabacum
  CDS (1)..(1767)
atgggtgggcagttgcaattgaatccttgttcttcatcttcagttgctactactttccataatggggcacataagttttgcagaaattttaatattttaccatttaaagcccattcccttgaatcttcagttgctagtactttccataatggaatttattcaagaatccagccaagaaagcattttgagatcatgtcatcaaatggttttcatctgaatgctgtgtctttgctggatggttcggcgtcaaaatctatgccagaacaagtgcctttgacagagttagaaaatgcagagacaactgtcagcataactgttattggagcttcaggtgacctagccaagaagaagattttcacagctttatttgctcttttctatgaagattgtttgcctgagaattttatagtttttggttattcacgaacaaaaatgagtgatgaagagctgagaaacatgatcagcaagaccttaacttgtagaattgatcagagagagaattgcgaggctaaaatggaccactttctggaaagatgcttttaccactccggtcagtaccattctgaggatgattttgcagaactggattacaaattaaaggcaaaggaggggtctagggtttctaataggttgttttacttatcaatacctccaaatatattcgtggatgtggtgagatgtgcaagtcttaaagcttcttcaacaagtgggtggacaagagtcattgttgagaaaccgtttggtcgtgacttagaatcatctagtgagctgaccagatgcctaaagaagtatctaactgaggagcaaatattccgaattgaccattacttgggaaaggaacttgttgagaatctctcagttcttcgtttctcgaatcttgtctttgagcctctctggtccagaaactacatacgcaatgtccaattcatattttccgaggactctggtaccgagggacgaggagggtactttgacaattacgggatcatccgagatataatgcaaaatcatctccttcaaatattagcattgtttgctatggaaacacctgtcagcatggatgccgaggacatcagaaatgaaaaggttaaagttttaaggtcaatgaggccattgcagcttgaagatgtggtacttggccagtataaaggtcatagcaagggtggtaaattatatccagcttatacagacgatccaactgtgccaaacggtagtgtcactccaacgttttctgctgctgcactctttattaataatgcacgctgggacggcgttcctttcctcatgaaagctggaaaagctctccatactaggagggcggagatcagggtacagttcagacatgttcctggaaatttgtacaaaaggaactttggaactgatctagataaggccacaaatgagctagttctgcgcttacaacctgatgaagccatatatctgaagatcaacaacaaggttcctggtcttggaatgagacttgaccggagtgaccttaatcttctttacaaagcaaagtatcgaggtgaaataccagatgcatatgagcggcttctgttagatgcaatagaaggagagcgaagattgttcattagaagtgatgagctggatgctgcatgggctctatttacaccattgctgaaggagctagaagagaagaagattgcgccagagctttatccgtatggcagtaggggtccagtaggagcacattatctagctgcaaagcacaacgttcgttggggagatctgtctggtgatgattga

SEQ ID NO: 17180 - protein, 588 aa, Nicotiana tabacum
MGGQLQLNPCSSSSVATTFHNGAHKFCRNFNILPFKAHSLESSVASTFHNGIYSRIQPRKHFEIMSSNGFHLNAVSLLDGSASKSMPEQVPLTELENAETTVSITVIGASGDLAKKKIFTALFALFYEDCLPENFIVFGYSRTKMSDEELRNMISKTLTCRIDQRENCEAKMDHFLERCFYHSGQYHSEDDFAELDYKLKAKEGSRVSNRLFYLSIPPNIFVDVVRCASLKASSTSGWTRVIVEKPFGRDLESSSELTRCLKKYLTEEQIFRIDHYLGKELVENLSVLRFSNLVFEPLWSRNYIRNVQFIFSEDSGTEGRGGYFDNYGIIRDIMQNHLLQILALFAMETPVSMDAEDIRNEKVKVLRSMRPLQLEDVVLGQYKGHSKGGKLYPAYTDDPTVPNGSVTPTFSAAALFINNARWDGVPFLMKAGKALHTRRAEIRVQFRHVPGNLYKRNFGTDLDKATNELVLRLQPDEAIYLKINNKVPGLGMRLDRSDLNLLYKAKYRGEIPDAYERLLLDAIEGERRLFIRSDELDAAWALFTPLLKELEEKKIAPELYPYGSRGPVGAHYLAAKHNVRWGDLSGDD

SEQ ID NO: 17181 - DNA, 1614 bp, Ostreococcus tauri
  CDS (1)..(1614)
atgccgccgcttgtgggcgcgcgtgggcgcgtacgagcgcgattaggggtgaatgagacgttcgttgacctcggcgtcgtcgccgatggggtcgaagaggaaagagaggcgaacgtgcgcgcgacggcgggggagggggagatgctgtcgttcgtcgtgttcggcgcgagcggagacttggcgaagaagaaaatctacccggcgttgttcgcgctgtattacgaagggcggttgccgaagaatttcatgatttacggctacgcccggtcgaagatgacgacggaggcgttcaaggataagatcgcggagtccctgacgtgtcggttggattggagcaagcagggcgggagcgactgcgcgcagaagagtgaggaattcttcgaccggtgcgtgtacgtggcgggacagtacgatgtcgcggcggatttcaaggcgcttgatgcgcagatgtgcgaggacgagaagcatgtgagcgcggtgaagcgcgtcttttacctgagcattccgccgagcatctttgttcccgtggcgcaaaacgccgcgcgcgagtgccagtgcaaaaagggagacaccagagtgatcgtggagaaaccgttcgggcgagatctcacgagctcacgcgagctcaccgccgcgctcgcgagtgagctgagcgaagagcaaacctatcgcatcgatcactacctcggcaaggagttgatcgagaatctcaccgtgatgcgcttctccaacatcatgttccaaccgctgtggaacagaaactacatccgcaacgttcagatcaactttagcgaggacttcggcacggaaggccgcgggggttacttcgaccactacgggatcattcgcgacatcatgcaaaaccacctgttgcaaatcttggcgctcttcgccatggaggagccggcgagtctgaacgccgaggacattcgtgacgagaaggtcaaggtgattcgatgcatgcgtccgatcgagatggataacgtcgcgctcggacagtacaagggacgactgacggatgggagaaagtacccggcgtacttggacgacgaaaccgtgcccaaggggtctctctgcccgacgttcgccgccatggcgctcttcatcgacaatgcgcgctgggacggtgtcccgttcttgctcaaggctggcaaggctctacacaagcggcaggctgaaattcgcgtgcagttccgtcacgctccgggtaacctttacggggaacgacaaggacgcgtcgagcacgtcacaaacgaattggtgattcgcatccaaccggacgaagccatctacttgcgcatcaataacaaggtccccggtctcggtcaacgtctcgaccaaacggttctggatcttcaatacaagagcgcgtacggacaagttcaacttccggacgcctacgaacgcctgattttggacgtcatcaacggcgacaagcgcctgttcatccgtaacgacgagctcgaagcggcctggaagctcttcacgccgcttctggataagatcgaacagcaaaagatcgcgcccgagctctacccttacggctctcgcgggcccatcggcgcgcactacctcgcgtcgaggttcaacgttcgatggggtgacacagactag

SEQ ID NO: 17182 - protein, 537 aa, Ostreococcus tauri
MPPLVGARGRVRARLGVNETFVDLGVVADGVEEEREANVRATAGEGEMLSFVVFGASGDLAKKKIYPALFALYYEGRLPKNFMIYGYARSKMTTEAFKDKIAESLTCRLDWSKQGGSDCAQKSEEFFDRCVYVAGQYDVAADFKALDAQMCEDEKHVSAVKRVFYLSIPPSIFVPVAQNAARECQCKKGDTRVIVEKPFGRDLTSSRELTAALASELSEEQTYRIDHYLGKELIENLTVMRFSNIMFQPLWNRNYIRNVQINFSEDFGTEGRGGYFDHYGIIRDIMQNHLLQILALFAMEEPASLNAEDIRDEKVKVIRCMRPIEMDNVALGQYKGRLTDGRKYPAYLDDETVPKGSLCPTFAAMALFIDNARWDGVPFLLKAGKALHKRQAEIRVQFRHAPGNLYGERQGRVEHVTNELVIRIQPDEAIYLRINNKVPGLGQRLDQTVLDLQYKSAYGQVQLPDAYERLILDVINGDKRLFIRNDELEAAWKLFTPLLDKIEQQKIAPELYPYGSRGPIGAHYLASRFNVRWGDTD

SEQ ID NO: 17183 - DNA, 1482 bp, Lactobacillus reuteri
  CDS (1)..(1482): transl_table=11
ttggctacagaaaataaggctgtcattacattatttggtgcgactggtgaccttgcaaagcgtaaactttatactgctttgttcaagttatatcaaaagggttacctagctgaccattttgcattactaggaacctcccgtcgtccattgactgacgaagaattccaacaaatcgttcgtgaatctattagcaacattccagaaactgaggatggccaagcagaagcattctcaaaacactttttctacaagtcacatgatgttactaaaccagaacattacgaaatccttaagcaacgccttgccgaattagatgaacagtttggcgctgaaggcaaccgtctcttctacatgtcaatggcaccacaattcttcggtactattgccttgaacttaaagaagcaaggattattaactgacaatggctttaaccgtcttgttattgaaaagccatttggtcgtgactttgaatctgctaagaagcttaacgatgaattatcacaaacatttagtgaaaatcaaattttccggattgaccactaccttggtaaggaaatggttcaaaacattcaagcattacgttttggtaacaccatgattgaatcactctggaataatcgttacattgataacatccaagtaactttaagtgaaaagcttggtgttgaagaacgtgccggttactatgaccaatctggtgcattacgtgatatggtgcaaaaccacatcatgcaaatcgttgctcaattagcaatggaacaaccagttgcatttactgatgctgatgttcgagttgaaaagattaaggctcttcgtagtcttcgcctctacacgccatcagaagcagctgctaactttgtccgtggacaatatgatgctggagaaggaactaacgcttaccgtcatgaagatggtgttgatccagaatctggtactgaaacctttgttgctgctaagttaatgtttgataactatcgttggtctggtgtaccattctacgttcggactggtaagaagttagcagacaagtttactcgtattgatgttgtcttcaagaagccattaatcgatatctttgctaacccacgttctgaaagtgaccaatcccttaactcaaacgtattaactatttttgttgaacctaactcaggttttgcaatccaattaaatgctaagcgcgcaggtcaaggcttcacaacagaacctgttgatttacgcttcttgcaaagtgattctgataagaaggaatctccagaaccatatgaacgtcttttccatgatgcacttgaaggtgaccacacaaactttgcctcatgggctgaaattgcttatgcatggaagttcgtcgatgttatccgtaagctttgggatattgaaaagcctcaattccctaactacactcctggttccatgggtccagcagcttctgacgaactcttggctcgtgatggacgtaagtgggtttatcgtttaaatcattag

SEQ ID NO: 17184 - protein, 493 aa, Lactobacillus reuteri
MATENKAVITLFGATGDLAKRKLYTALFKLYQKGYLADHFALLGTSRRPLTDEEFQQIVRESISNIPETEDGQAEAFSKHFFYKSHDVTKPEHYEILKQRLAELDEQFGAEGNRLFYMSMAPQFFGTIALNLKKQGLLTDNGFNRLVIEKPFGRDFESAKKLNDELSQTFSENQIFRIDHYLGKEMVQNIQALRFGNTMIESLWNNRYIDNIQVTLSEKLGVEERAGYYDQSGALRDMVQNHIMQIVAQLAMEQPVAFTDADVRVEKIKALRSLRLYTPSEAAANFVRGQYDAGEGTNAYRHEDGVDPESGTETFVAAKLMFDNYRWSGVPFYVRTGKKLADKFTRIDVVFKKPLIDIFANPRSESDQSLNSNVLTIFVEPNSGFAIQLNAKRAGQGFTTEPVDLRFLQSDSDKKESPEPYERLFHDALEGDHTNFASWAEIAYAWKFVDVIRKLWDIEKPQFPNYTPGSMGPAASDELLARDGRKWVYRLNH

SEQ ID NO: 17185 - DNA, 1548 bp, Medicago truncatula
  CDS (1)..(1548)
atgggaacaaatgaatggcatgttgaaagaagagatagcattggtactgaatctcctgtagcaagagaggtacttgaaactggcacactctctattgttgtgcttggtgcttctggtgatcttgctaagaagaagacatttcctgcacttttccacctatataaacaggaattgttgccacccgatgaagttcacatttttggctatgcaaggtcaaagatctctgatgatgaattgagaaacaaattgcgtagctatcttgttccagagaaaggtgcttcccctaaacagctagatgatgtatcaaagtttttacaattggtgaaatatgtaagtggcccttatgattctgaagatggttttcgcttgttggataaagagatttcagagcatgaatatttgaaaaatagtaaagagggttcatctcggaggcttttctatctagcacttcctccttcagtgtatccgtccgtttgcaagatgatcaagacttgttgcatgaataaatctgatcttggtggatggacacgcgttgttgttgagaaaccctttggtagggatctagaatctgcagaagaactcagtactcagattggagagttatttgaagaaccacaaatttatcgtattgatcactatttgggaaaggaactagtgcaaaacatgttagtacttcgttttgcaaatcggttcttcttgcctctttggaaccacaaccacattgacaatgtgcagatagtatttagagaggattttggaactgatggtcgtggtggatattttgaccaatatggaattatccgagatatcattcaaaaccatctgttgcaggttctttgcttgattgctatggaaaaacccgtttctctcaagcctgagcacattcgagatgagaaagtgaaggttcttgaatcagtactccctattagagatgatgaagttgttcttggacaatatgaaggctacagagatgacccaactgtaccggacgattcaaacaccccgacttttgcaactactattctgcggatacacaatgaaagatgggaaggtgttcctttcattgtgaaagcagggaaggccctaaattctagaaaggcagagattcgggttcaattcaaggatgttcctggtgatattttcaggagtaaaaagcaagggagaaatgagtttgttatccgcctacaaccttcagaagctatttacatgaagcttacggtcaagcaacctggactggaaatgtctgcagttcaaagtgaactagacttgtcatatgggcaacgatatcaagggataaccattccagaggcttacgagcgtctaattcttgacacaattcgaggtgatcaacaacattttgttcgcagagacgaattaaaggcatcatggcaaatattcacaccgcttttacacaaaattgatagaggggagttgaagccggttccttacaagccgggaagtagaggtcctgcagaagcagatgagttattagaaaaagctggatatgttcaaacacacggttatatatggattcctcctaccttatag

SEQ ID NO: 17186 - protein, 515 aa, Medicago truncatula
MGTNEWHVERRDSIGTESPVAREVLETGTLSIVVLGASGDLAKKKTFPALFHLYKQELLPPDEVHIFGYARSKISDDELRNKLRSYLVPEKGASPKQLDDVSKFLQLVKYVSGPYDSEDGFRLLDKEISEHEYLKNSKEGSSRRLFYLALPPSVYPSVCKMIKTCCMNKSDLGGWTRVVVEKPFGRDLESAEELSTQIGELFEEPQIYRIDHYLGKELVQNMLVLRFANRFFLPLWNHNHIDNVQIVFREDFGTDGRGGYFDQYGIIRDIIQNHLLQVLCLIAMEKPVSLKPEHIRDEKVKVLESVLPIRDDEVVLGQYEGYRDDPTVPDDSNTPTFATTILRIHNERWEGVPFIVKAGKALNSRKAEIRVQFKDVPGDIFRSKKQGRNEFVIRLQPSEAIYMKLTVKQPGLEMSAVQSELDLSYGQRYQGITIPEAYERLILDTIRGDQQHFVRRDELKASWQIFTPLLHKIDRGELKPVPYKPGSRGPAEADELLEKAGYVQTHGYIWIPPTL

SEQ ID NO: 17187 - DNA, 1524 bp, Populus trichocarpa
  CDS (1)..(1524)
atgggatcaggtcaatggaaggtagagaagagatctagttttagaagtgattcattttcaaaggaatacgagactgttcccgaaactgggtgcctctcaattattgttcttggtgcttctggtgatctagccaagaagaagactttccctgctctctacaatctttatcgccggggatttctgcaatcaaatgaagtttacatttttggatatgcaaggaccaagatttcagatgatgatctcagaaatcgaatccgtggggatattttggcaaagatgcttcagagcactctgaagatgtatcaacagattaaatatgtaagtggttcttatgatactgaggatggctttcggctattggataaggaaatttcagagcatgaagtatcaaaaaacagtgcagaaggatcatctcgaagactattttatcttgcactccccccatcagtgtatccaccagtctgcaggatgatcagaaagtgttgcatgaatagagcggatcttggtggatggactagaattgtcattgagaaacctttcggcaaagatttggaatctgcagaaaaactcagtgcccagattggagagttgtttgaggaaccacaactttaccgaattgatcattacttgggaaaagaattggtgcagaacttgctagtactccgttttgcaaatcgcttctttttacctctttggaaccgcgacaacattcagattgtgttccgagaagattttggaacagaaggccgtggtggatattttgatgaatacgggattatccgtgatattattcaaaatcacttattacagctttgtttggttgccatggagaagcccgtttctctcaaacctgaacatatccgggatgagaaagtgaaggttcttcaatcagtacttccaatcaaagatgaagaggttgttcttggacagtatgaaggctacagagatgacccaacagttcctgatcactcaaataccccaacatttgcaactgttgttctgagaatacataatgaaagatgggaaggggttcctttcatactaaaggccgggaaagcattgaattcaaggaaggcagagatacgtgttcaatttaaggatgttcctggtgatatattcaaatgtcaaaagcaaggaagaaatgagtttgtgatacgcctgcaaccctcagaagccatgtacatgaaacttacggtgaagcagcctggacttgagatgtctactgttcaaagtgaactagacttgtcatataagcaacgttatcaaggggttgccatcccggaggcatatgaacgtctgattcttgacacgattagaggtgatcagcagcattttgttcgcagagatgagttgaaggcggcatgggagattttcacaccccttctgcataggattgatgatggcgagatgaagccattgcaataccaaccaggcagccgaggtccggtcgaagcagatgagttgttggcaaaagctggttatgttcaaacacatggctatatctggattcctcccacattatag

SEQ ID NO: 17188 - protein, 507 aa, Populus trichocarpa
MGSGQWKVEKRSSFRSDSFSKEYETVPETGCLSIIVLGASGDLAKKKTFPALYNLYRRGFLQSNEVYIFGYARTKISDDDLRNRIRGDILAKMLQSTLKMYQQIKYVSGSYDTEDGFRLLDKEISEHEVSKNSAEGSSRRLFYLALPPSVYPPVCRMIRKCCMNRADLGGWTRIVIEKPFGKDLESAEKLSAQIGELFEEPQLYRIDHYLGKELVQNLLVLRFANRFFLPLWNRDNIQIVFREDFGTEGRGGYFDEYGIIRDIIQNHLLQLCLVAMEKPVSLKPEHIRDEKVKVLQSVLPIKDEEVVLGQYEGYRDDPTVPDHSNTPTFATVVLRIHNERWEGVPFILKAGKALNSRKAEIRVQFKDVPGDIFKCQKQGRNEFVIRLQPSEAMYMKLTVKQPGLEMSTVQSELDLSYKQRYQGVAIPEAYERLILDTIRGDQQHFVRRDELKAAWEIFTPLLHRIDDGEMKPLQYQPGSRGPVEADELLAKAGYVQTHGYIWIPPTL

SEQ ID NO: 17189 - DNA, 1536 bp, Populus trichocarpa
  CDS (1)..(1536)
atgggatccggtcaaaggaaggtagagaagagatctggtttagaaaatgattcgtttctaaaggaacatgagactgcgcctgaaagtgggtgcctttcaattattgttcttggtgcttctggtgatctagccaagaagaagactttccctgctctctaccatctttatcgccaggggtttctgcacccagatgaagtccacattttcggatatgcaaggactaggatttcagatgatgaacttagagatcgaatccgtggggatatcttggcaaagaagctgaagttgtatcaaagttcttgcaaccagatcaaatatgtaagtggttcttatgatactgaggatggctttcagctattggataaggaaatttcacagcatgaagtatcaaaaaacagtgcagaaggatcatctcgaagactattttatcttgcacttcccccctcagtgtatccaactgtctgcaggatgatcagaaaatgttgcatgaataaagctgatcatgggggatggactagaattgtcattgagaaaccttttggcaaagatttggaatctgcagaaaatctcagtgcccatattggagagttgtttgaagaagcacaactttttcgtatcgatcactacttgggaaaagaattggtgcagaacttgctagttctccgttttgcaaatcgcttctttttacctctttggaaccgcgacaacatttccaatgttcagattgtgtttcgggaaaattttggaactgaaggtcgtggtggatattttgatgaatatgggattattcgtgatattattcaaaatcacttattacagattctttgtctggttgccatggaaaagcccgtttctctcaaacctgaatatattcgggatgagaaagtgaaggttcttcaatcagtacttccaatcagagatgaagatgttgttcttggacagtatgacggctacagggatgacccaacagttcctgatcaatcaaataccccaacatttgctactgttgttctgagaatacataatgaaagatgggaaggggttcctttcatactaaaggcaggaaaagcattaaattcaagcaaggcagagatacgtgttcaatttaaggacgttcctggtgatatattcaaatgtcaaaagcaaggaaggaatgagtttgtaatacgcctgcaaccctcagaagccatgtacatgaaacttacggtcaagcagcctggactcgagatgtctactgttcaaagtgaactggacttgtcatatatgcaacgttatcaaggggttcccatcccggaggcatatgaacgtctgattcttgacacgattaggggcgatcagcagcattttgttcgcagagatgaattgaaggcagcatgggagatcttcacaccccttctgcacaggattgacaatggtgaaatgaagccaaaggaataccaaccaggcagccggggtccagtcgaagcagatgagctgctggcaaaagctggttatgttcaaacacatggctatatctggattcctcctacattgtag

SEQ ID NO: 17190 - protein, 511 aa, Populus trichocarpa
MGSGQRKVEKRSGLENDSFLKEHETAPESGCLSIIVLGASGDLAKKKTFPALYHLYRQGFLHPDEVHIFGYARTRISDDELRDRIRGDILAKKLKLYQSSCNQIKYVSGSYDTEDGFQLLDKEISQHEVSKNSAEGSSRRLFYLALPPSVYPTVCRMIRKCCMNKADHGGWTRIVIEKPFGKDLESAENLSAHIGELFEEAQLFRIDHYLGKELVQNLLVLRFANRFFLPLWNRDNISNVQIVFRENFGTEGRGGYFDEYGIIRDIIQNHLLQILCLVAMEKPVSLKPEYIRDEKVKVLQSVLPIRDEDVVLGQYDGYRDDPTVPDQSNTPTFATVVLRIHNERWEGVPFILKAGKALNSSKAEIRVQFKDVPGDIFKCQKQGRNEFVIRLQPSEAMYMKLTVKQPGLEMSTVQSELDLSYMQRYQGVPIPEAYERLILDTIRGDQQHFVRRDELKAAWEIFTPLLHRIDNGEMKPKEYQPGSRGPVEADELLAKAGYVQTHGYIWIPPTL

SEQ ID NO: 17191 - DNA, 1536 bp, Populus trichocarpa
  CDS (1)..(1536)
atgggatccggtcagtggaaggtagagaagagatctggtttagaaaatgattcgtttctaaaggaacatgagactgcgcctgaaagtgggtgcctttcaattattgttcttggtgcttctggtgatctagccaagaagaagactttccctgctctctaccatctttatcgccaggggtttctgcacccagatgaagtccacattttcggatatgcaaggactaggatttcagatgatgaacttagagatcgaatccgtggggatatcttggcaaagaagctgaagttgtatcaaagttcttgcaaccagatcaaatatgtaagtggttcttatgatactgaggatggctttcagctattggataaggaaatttcacagcatgaagtatcaaaaaacagtgcagaaggatcatctcgaagactattttatcttgcacttcccccctcagtgtatccaactgtctgcaggatgatcagaaaatgttgcatgaataaagctgatcatgggggatggactagaattgtcattgagaaaccttttggcaaagatttggaatctgcagaaaatctcagtgcccatattggagagttgtttgaagaagcacaactttttcgtatcgatcactacttgggaaaagaattggtgcagaacttgctagttctccgttttgcaaatcgcttctttttacctctttggaaccgcgacaacatttccaatgttcagattgtgtttcgggaaaattttggaactgaaggtcgtggtggatattttgatgaatatgggattattcgtgatattattcaaaatcacttattacagattctttgtctggttgccatggaaaagcccgtttctctcaaacctgaatatattcgggatgagaaagtgaaggttcttcaatcagtacttccaatcagagatgaagatgttgttcttggacagtatgacggctacagggatgacccaacagttcctgatcaatcaaataccccaacatttgctactgttgttctgagaatacataatgaaagatgggaaggggttcctttcatactaaaggcaggaaaagcattaaattcaagcaaggcagagatacgtgttcaatttaaggacgttcctggtgatatattcaaatgtcaaaagcaaggaaggaatgagtttgtaatacgcctgcaaccctcagaagccatgtacatgaaacttacggtcaagcagcctggactcgagatgtctactgttcaaagtgaactggacttgtcatatatgcaacgttatcaaggggttcccatcccggaggcatatgaacgtctgattcttgacacgattaggggcgatcagcagcattttgttcgcagagatgaattgaaggcagcatgggagatcttcacaccccttctgcacaggattgacaatggtgaaatgaagccaaaggaataccaaccaggcagccggggtccagtcgaagcagatgagctgctggcaaaagctggttatgttcaaacacatggctatatctggattcctcctacattgtag

SEQ ID NO: 17192 - protein, 511 aa, Populus trichocarpa
MGSGQWKVEKRSGLENDSFLKEHETAPESGCLSIIVLGASGDLAKKKTFPALYHLYRQGFLHPDEVHIFGYARTRISDDELRDRIRGDILAKKLKLYQSSCNQIKYVSGSYDTEDGFQLLDKEISQHEVSKNSAEGSSRRLFYLALPPSVYPTVCRMIRKCCMNKADHGGWTRIVIEKPFGKDLESAENLSAHIGELFEEAQLFRIDHYLGKELVQNLLVLRFANRFFLPLWNRDNISNVQIVFRENFGTEGRGGYFDEYGIIRDIIQNHLLQILCLVAMEKPVSLKPEYIRDEKVKVLQSVLPIRDEDVVLGQYDGYRDDPTVPDQSNTPTFATVVLRIHNERWEGVPFILKAGKALNSSKAEIRVQFKDVPGDIFKCQKQGRNEFVIRLQPSEAMYMKLTVKQPGLEMSTVQSELDLSYMQRYQGVPIPEAYERLILDTIRGDQQHFVRRDELKAAWEIFTPLLHRIDNGEMKPKEYQPGSRGPVEADELLAKAGYVQTHGYIWIPPTL

SEQ ID NO: 17193 - DNA, 1578 bp, Ips typographus
  CDS (1)..(1578)
atgtcttctcgtccatttttagagtgtactgatgaaaactcggaagtgtgtctggctttatacagaaagtctctaaaagctattgacttggatcatgaagggacccattttgatggacagtatccccatatatttgtcactctgggggcatcgggtgacttggcgcgcaagaaaatctacccaaccctttggtggctttacagagataatctaataccatcaaatactcactttattggatatgctagaagtaacacgacaatacaagacattaaatccaaatgtgaaccttacatgaaagttaagaaaggcgaagagaagctttatgaagagttttggaagttgaattattacatttccggaaaatacgatgtcagaagtgattttgaaaagctaaaccaagaaataagtcaatatgagaagggacctattgcaaacaggttgttttatctggctttacctccttccgtatttgaagacgttacagttttgattaaaaacacttgtatggctgaaaaaggttggactagaattattattgaaaaaccattcggaagagattccgcttcgtctcaaaaattatctgaccatttatcttctttgtttgacgagcatcaattgtatcgtattgatcattatttggggaaagaaatggttcaaaatctgatgacgcttagatttggaaatcgaatctttggaccagtgtggaatcgcgataatattgcttcaatacaaattacttttaaagaaccatttggaacccaaggaagaggcggttattttgacgaatttggaattataagggatatcatgcagaaccacttgttgcaaattttgactttggctgctatggaaaaacctgctacgattcaccctgatgatattcgtgatgaaaaagtaaaagttttaaaaagtgttaaaactttgactctcaatgatgtagtacttggacaatacgttggcaatccagaaggagagggtgaagctaaaattggatatctagatgatcctacagtgcccgcaggttctgttactcctacctatgctgctgcggtacttagaatagataatgaaaggtgggatggtgttcccttcattttaaaatgtggcaaagctttaaatgaaaggaaagccgaagttcgaatccaatttgaagacgttcctggagatatatttgatggaaaagctaaaagaaacgaacttgttattagagttcaacctggagaagctttgtatgttaagcttatggttaagactcccggaatggcttttgatatggaagaaactgaacttgacctaacttatggacatcgttacgagaatgtaaaacttcccgatgcgtacgaacgtttgattcttgacgtgttttgcgggtcgcaaatgcattttgtaaggtctgacgaacttagcgaagcttggaggatatttacgcctttgttgcatgaaatcgaaggcaaccgcgtccaaccaattccttacacatttggcagccgagggccgaaagaggcagatgagttattgaaaaaacataactttaattatacgggttcctacaagtggtataaatcgaacaagtag

SEQ ID NO: 17194 - protein, 525 aa, Ips typographus
MSSRPFLECTDENSEVCLALYRKSLKAIDLDHEGTHFDGQYPHIFVTLGASGDLARKKIYPTLWWLYRDNLIPSNTHFIGYARSNTTIQDIKSKCEPYMKVKKGEEKLYEEFWKLNYYISGKYDVRSDFEKLNQEISQYEKGPIANRLFYLALPPSVFEDVTVLIKNTCMAEKGWTRIIIEKPFGRDSASSQKLSDHLSSLFDEHQLYRIDHYLGKEMVQNLMTLRFGNRIFGPVWNRDNIASIQITFKEPFGTQGRGGYFDEFGIIRDIMQNHLLQILTLAAMEKPATIHPDDIRDEKVKVLKSVKTLTLNDVVLGQYVGNPEGEGEAKIGYLDDPTVPAGSVTPTYAAAVLRIDNERWDGVPFILKCGKALNERKAEVRIQFEDVPGDIFDGKAKRNELVIRVQPGEALYVKLMVKTPGMAFDMEETELDLTYGHRYENVKLPDAYERLILDVFCGSQMHFVRSDELSEAWRIFTPLLHEIEGNRVQPIPYTFGSRGPKEADELLKKHNFNYTGSYKWYKSNK

SEQ ID NO: 17195 - DNA, 1623 bp, Ips typographus
  CDS (1)..(1623)
atgaaatccgcgtgtgtgatatcgtttttacttattttatttattgtttggtgtgacggtgttgggaacaacactaaagaaaactcggaagtgtgtctggctttatacagaaagtctctaaaagctattgacttggatcatgaagggacccattttgatggacagtatccccatatatttgtcactctgggggcatcgggtgacttggcgcgcaagaaaatctacccaaccctttggtggctttacagagataatctaataccatcaaatactcactttattggatatgctagaagtaacacgacaatacaagacattaaatccaaatgtgaaccttacatgaaagttaagaaaggcgaagagaagctttatgaagagttttggaagttgaattattacatttccggaaaatacgatgtcagaagtgattttgaaaagctaaaccaagaaataagtcaatatgagaagggacctattgcaaacaggttgttttatctggctttacctccttccgtatttgaagacgttacagttttgattaaaaacacttgtatggctgaaaaaggttggactagaattattattgaaaaaccattcggaagagattccgcttcgtctcaaaaattatctgaccatttatcttctttgtttgacgagcatcaattgtatcgtattgatcattatttggggaaagaaatggttcaaaatctgatgacgcttagatttggaaatcgaatctttggaccagtgtggaatcgcgataatattgcttcaatacaaattacttttaaagaaccatttggaacccaaggaagaggcggttattttgacgaatttggaattataagggatatcatgcagaaccacttgttgcaaattttgactttggctgctatggaaaaacctgctacgattcaccctgatgatattcgtgatgaaaaagtaaaagttttaaaaagtgttaaaactttgactctcaatgatgtagtacttggacaatacgttggcaatccagaaggagagggtgaagctaaaattggatatctagatgatcctacagtgcccgcaggttctgttactcctacctatgctgctgcggtacttagaatagataatgaaaggtgggatggtgttcccttcattttaaaatgtggcaaagctttaaatgaaaggaaagccgaagttcgaatccaatttgaagacgttcctggagatatatttgatggaaaagctaaaagaaacgaacttgttattagagttcaacctggagaagctttgtatgttaagcttatggttaagactcccggaatggcttttgatatggaagaaactgaacttgacctaacttatggacatcgttacgagaatgtaaaacttcccgatgcgtacgaacgtttgattcttgacgtgttttgcgggtcgcaaatgcattttgtaaggtctgacgaacttagcgaagcttggaggatatttacgcctttgttgcatgaaatcgaaggcaaccgcgtccaaccaattccttacacatttggcagccgagggccgaaagaggcagatgagttattgaaaaaacataactttaattatacgggttcctacaagtggtataaatcgaacaagtag

SEQ ID NO: 17196 - protein, 540 aa, Ips typographus
MKSACVISFLLILFIVWCDGVGNNTKENSEVCLALYRKSLKAIDLDHEGTHFDGQYPHIFVTLGASGDLARKKIYPTLWWLYRDNLIPSNTHFIGYARSNTTIQDIKSKCEPYMKVKKGEEKLYEEFWKLNYYISGKYDVRSDFEKLNQEISQYEKGPIANRLFYLALPPSVFEDVTVLIKNTCMAEKGWTRIIIEKPFGRDSASSQKLSDHLSSLFDEHQLYRIDHYLGKEMVQNLMTLRFGNRIFGPVWNRDNIASIQITFKEPFGTQGRGGYFDEFGIIRDIMQNHLLQILTLAAMEKPATIHPDDIRDEKVKVLKSVKTLTLNDVVLGQYVGNPEGEGEAKIGYLDDPTVPAGSVTPTYAAAVLRIDNERWDGVPFILKCGKALNERKAEVRIQFEDVPGDIFDGKAKRNELVIRVQPGEALYVKLMVKTPGMAFDMEETELDLTYGHRYENVKLPDAYERLILDVFCGSQMHFVRSDELSEAWRIFTPLLHEIEGNRVQPIPYTFGSRGPKEADELLKKHNFNYTGSYKWYKSNK

SEQ ID NO: 17197 - DNA, 1536 bp, Solanum tuberosum
  CDS (1)..(1536)
atggcggcatcatggtgtattgagaaaaggggttctattaggaatgactcttttagagacaatgataatatacctgaaactgggtgtctttctattattgttcttggtgcttctggtgatcttgccaagaagaaaacttttcctgctctcttcaacctctaccgccagggatttctgcaatccaatgaagttcacatttttggctacgcaaggacaaaaatttctgatgatgacttgagaagccgtatccgtgggtatctttctcaggggaaagaaaatgaaggagaagtatcagagtttctgcaacttattaaatacgtcagtggttcttatgattctggtgagggctttacgttactggacaaggcaatatctgagcacgaattctcaaaaaatagcactgaaggatcatccagaagactcttctattttgctcttcctccatcagtatatccctcggtttgcagaatgataaaaagttattgtatgaacaaatctgatcttggtggttggacgcggattgttgttgagaagccctttggcaaggatttagcttcatctgaacaactaagttcccagatcggagaactatttgacgaaccccaaatttatcgcattgaccattatttggggaaggagttggttcagaatttgttggtgctgcgttttgcaaatcgcttctttttgccgctctggaatcgtgacaacattgataatatacagattgtctttagagaggactttggaactgaaggccgtggtggatattttgatgaatatgggattatacgtgacattattcagaaccatctattgcaggtcctttgccttgttgccatggagaagcctgtttctcagaagcccgaacacattcgggatgagaaagttaaggttcttcaatcaatgcttccaattgaagatgaagaggttgttcttggacaatatgaaggctataaggatgatccaacggttcctaacaactcaaatactcctacttttgctactatggttttacgcatacacaatgaaagatgggaaggtgtcccctttataatgaaggctggaaaagcactaaattcaagaaaggcagaaatacgagtgcagtttaaggatgttcctggtgatatatttagatgtcaaaagcaggggagaaatgagtttgtgatacgcctccaaccttcagaagccatgtacatgaagcttacggtcaagaaacctgggcttgaaatgtcaactgttcaaagtgaattagacctgtcgtatgggcagcgttaccaaggggtcgtcattccagaggcttatgaacgtctgattctcgacacaataagaggggatcagcagcattttgtgcgtagggatgagctcaaggcggcttgggagatttttacccctcttttgcatagaattgacaatggagaggtgaagccaattccatacaagccaggcagcagaggccctgctgaagcagatgagttgttgcaaaatgccggttacgttcaaactcatggctatatatggatccctcccacactataa

SEQ ID NO: 17198 - protein, 511 aa, Solanum tuberosum
MAASWCIEKRGSIRNDSFRDNDNIPETGCLSIIVLGASGDLAKKKTFPALFNLYRQGFLQSNEVHIFGYARTKISDDDLRSRIRGYLSQGKENEGEVSEFLQLIKYVSGSYDSGEGFTLLDKAISEHEFSKNSTEGSSRRLFYFALPPSVYPSVCRMIKSYCMNKSDLGGWTRIVVEKPFGKDLASSEQLSSQIGELFDEPQIYRIDHYLGKELVQNLLVLRFANRFFLPLWNRDNIDNIQIVFREDFGTEGRGGYFDEYGIIRDIIQNHLLQVLCLVAMEKPVSQKPEHIRDEKVKVLQSMLPIEDEEVVLGQYEGYKDDPTVPNNSNTPTFATMVLRIHNERWEGVPFIMKAGKALNSRKAEIRVQFKDVPGDIFRCQKQGRNEFVIRLQPSEAMYMKLTVKKPGLEMSTVQSELDLSYGQRYQGVVIPEAYERLILDTIRGDQQHFVRRDELKAAWEIFTPLLHRIDNGEVKPIPYKPGSRGPAEADELLQNAGYVQTHGYIWIPPTL

SEQ ID NO: 17199 - DNA, 1530 bp, Boophilus microplus
  CDS (1)..(1530)
atggtcaagtccacgggacagtgcatcgctctcctgaaggaatcgatacacctgttcgaggagcctgtgcaggagggacagcaacacatcttcgtcgtgctcggcgcttcgggggacttggcaaagaaaaaaatttacccaacgttatgggcactgttccgagacggtttattaccacagaaaacaaagttcgttggctatgctcgcaccaagatgaccttggaggagctgtgggcgaagattgttccttttctaaaagtgaaggacgaagaaaagagccggtttgccgagttcacccgtgccaactcgtacttgtcgggcaaatacgatgagagcagtgactttgtagttctcaacaaggcgatggaaaaacttgaaggcaattccggtggtaatcggatgttttacatggccctgccaccaacagttttccagcaagttgccagcaacatcaagcagcattgcatgagcaagcagggctggacccgtgttgtgattgagaagccatttggccgggactcgcaatcatcagccgaactttccaaccacctggccgcgctatttgaagagtctcagatataccgcatcgaccactatcttggcaaggagatggtccagaatctcatggcaattaggtttgccaaccagatcttcggtcctacgtggaacagaaacaacattgccagtattgtcatatcattcaaagagccatttggaacgcaaggccgaggtggttactttgacaactttggtattatcagggacgtcatgcagaaccacctgctgcaaattatgtctctcgtcgccatggagaggccagtgtccacaaatgcagaagacatcaggaatgagaaggtaaaggtgctcaagtgcgttcccccgatcaccatggacaacgtggtattgggccagtatgtgggtaaaccaggcggcactggagaggagacccagggctacctggacgaccccactgtgccaaagggctcccacacggccacttatgccacagcagtagcctacatcaacaacgagcgctgggaaggagtgcccttcatccttcgatgtggcaaggcactgaatgagcgtaaggcagaagtgcgaatccagtacaaggaagttgctggcgacctctttgccggggagagcaagcgcaacgaattggtattgagggtgcagcctgatgaggccatctacgtcaagttcatgaccaagaaacctggaatggccttcgacattgaggagaccgagctggatctcacctatggcagtcgctacaagggtatggtcatgccggatgcttacgaacgtctcattctggatgcgttctacggcagtcaggtgcactttgtgcgcagcgatgaattggccgaggcgtggcgtattttcacacccctcctgcatcaaattgataaggagaagcccaaaccagtgccttacgagtatggcagccgaggcttcaaggaggcggacgatctctggaaaagggcgggcttcaagttttacggcacataccgttggactaaagcttaa

SEQ ID NO: 17200 - protein, 509 aa, Boophilus microplus
MVKSTGQCIALLKESIHLFEEPVQEGQQHIFVVLGASGDLAKKKIYPTLWALFRDGLLPQKTKFVGYARTKMTLEELWAKIVPFLKVKDEEKSRFAEFTRANSYLSGKYDESSDFVVLNKAMEKLEGNSGGNRMFYMALPPTVFQQVASNIKQHCMSKQGWTRVVIEKPFGRDSQSSAELSNHLAALFEESQIYRIDHYLGKEMVQNLMAIRFANQIFGPTWNRNNIASIVISFKEPFGTQGRGGYFDNFGIIRDVMQNHLLQIMSLVAMERPVSTNAEDIRNEKVKVLKCVPPITMDNVVLGQYVGKPGGTGEETQGYLDDPTVPKGSHTATYATAVAYINNERWEGVPFILRCGKALNERKAEVRIQYKEVAGDLFAGESKRNELVLRVQPDEAIYVKFMTKKPGMAFDIEETELDLTYGSRYKGMVMPDAYERLILDAFYGSQVHFVRSDELAEAWRIFTPLLHQIDKEKPKPVPYEYGSRGFKEADDLWKRAGFKFYGTYRWTKA

SEQ ID NO: 17201 - DNA, 1482 bp, Lactobacillus sanfranciscensis
  CDS (1)..(1482): transl_table=11
atgccaacagaaaaccctacaagagcaacttttatgctgttcggtggtacaggtgaccttgcattacgtaagttatatcctgcaatctttaacctttataaaaaaggtagtttaagcactcattttgccttagttggactttcacgtaaagcactaactgacgaagaattcagagctaaaattatcgaatcaatctcatcagaaactgatgacaaggctcaagctgaagagtttgctagccacttctactggaaatcacacgacgtaactaatactgatcattacaaagaattaggtaaaatcgctgacgaactagatcaaaaatacgaaactgatggaaatcgaattttttacgtgtcaatggcaccacggttcttcggaatcgttgctaaaaaccttaaagaacaaggtgttttatcaactaatggtggatttaaccgtcttgtaattgaaaaaccatttggtcgtgattatgcatcagctaaagaattaaatgatgaattaactagtgcctttaatgaaaaccaaatttaccgaattgatcattacttaggtaaagaaactacccaagcaattcctgtaattcgatttggtaacccaattatcgaagctatttggaaccaaaactacatcaaagatgtccaaatcaccttagcagaaaaacttggtgttgaagatcgggcgggctactatgatactgctggtgcccttcgtgatatgattcaaaatcacactcttcaaatcgttagttatttagcaatggatgaaccaaattcatttgttgatactgaaattcgtcgcgaaaaagttaaagcccttgaaagcatggaaatttacgatgctgatggtgttaaacaaaactttgttcgtggtcaatacggtgccggtgatggtactcctgcttatcgtgacgaacccggtgttcctcatgactcaaacaataatacctacgctgctggaaagattgttttcaacaacccacgttggggaaaaactcctttctacattcgttcaggtaaaaaattagcaactaagactggtcgaattgatatcgaattcaagaaaccaattgtagatatctttgccaaaggtactcaccaacctgcagaacttaaatcaaatgttttaactcttttgattgaccctaagattggaattaccttagaaatcaacactaaaaattcagctcaaggaatgcacactgaaactgttgatttaagctacttacaatcagatgctcgtgctgctgaagttccacttccatacgaacgtcttttccacgatatccttaagggtgacggaacttacttcgctagttggccagaagttgctgctgcttggaagtacgttgaccctgttcaaaaactttgggatactacccaaccagacttccctaattacgaatctggttcaatgggtccaaaggctgctgatgaactattggctcgtgacggaaattcttggtatttccccaacaagtaa

SEQ ID NO: 17202 - protein, 493 aa, Lactobacillus sanfranciscensis
MPTENPTRATFMLFGGTGDLALRKLYPAIFNLYKKGSLSTHFALVGLSRKALTDEEFRAKIIESISSETDDKAQAEEFASHFYWKSHDVTNTDHYKELGKIADELDQKYETDGNRIFYVSMAPRFFGIVAKNLKEQGVLSTNGGFNRLVIEKPFGRDYASAKELNDELTSAFNENQIYRIDHYLGKETTQAIPVIRFGNPIIEAIWNQNYIKDVQITLAEKLGVEDRAGYYDTAGALRDMIQNHTLQIVSYLAMDEPNSFVDTEIRREKVKALESMEIYDADGVKQNFVRGQYGAGDGTPAYRDEPGVPHDSNNNTYAAGKIVFNNPRWGKTPFYIRSGKKLATKTGRIDIEFKKPIVDIFAKGTHQPAELKSNVLTLLIDPKIGITLEINTKNSAQGMHTETVDLSYLQSDARAAEVPLPYERLFHDILKGDGTYFASWPEVAAAWKYVDPVQKLWDTTQPDFPNYESGSMGPKAADELLARDGNSWYFPNK

SEQ ID NO: 17203 - DNA, 1800 bp, Arabidopsis thaliana
  CDS (1)..(1800)
atgtcgtctctctcctgccctacctaccgctcccgcacttcgtcttcgtctcctttcttgtcgaatcatcatcattcttcgctgatcaatgttgttgacccacgccgctcactctccttccactacgcttctcctcaggggcttaatctagctgagctctgtgttgttagatcgcagaggaggtccgttcagagttctgttgtcgtgcaagatggatcagtagccaccgagtcaaactcgtccgaggaggcgaaagatgtaggggtgttaacgattccttcacttgaagctgacaaggttgtagcagagtctgatggcggtgaacaactttcaacagttagtatcacggtggtgggagcttctggtgatcttgccaagaagaaaatattcccagctcttttcgcactttactatgaaggctgtcttcctgagcattttaccatttttggctatgcaaggagtaagatgacagatgctgaacttagagttatggtcagcaaaacattgacatgtagaattgataagagggcaaactgcggtgaaaagatggaagagtttctcaagagatgtttttaccattcgggtcagtatgattctcaggaacattttgttgcattggacgagaagctcaaggagcatgagggtggaagactttcgaaccgtcttttctatctttcaatccctccaaatatctttgttgacgcggtgaaatgtgcaagctcatctgcttcatctgtcaatggatggactagggtcattgtcgagaaaccttttggccgggactccaaaacctcggctgcattaacaaagtctcttaagcagtacctggaggaagaccaaatatttaggatagaccattacttagggaaggagctggttgagaacttgtcggttcttcgattctcaaatcttatatttgaaccgctatggtcaaggcagtatataaggaacgtgcaattcattttttctgaggatttcggcactgaaggacgcggagggtacttcgacaattacggaataataagagatataatgcagaatcatctgcttcagatattagctcttttcgccatggaaacacctgtgagtttggatgcagaggatatcagaaatgaaaaggtaaaggtactacgttcaatgagaccaataaaacttgaagatgtggtgataggacagtacaagagccacagcataggaggagtcacttatccaagctatactgatgataaaactgtgccaaaaggtagtctgaccccgacatttgcagctgctgcactcttcatcgacaatgcaagatgggatggtgtaccttttctaatgaaagctgggaaagcactaaacacccgaagtgcggagataagagtccagttcaggcatgtgcctggaaatttatataaccggaattctggtactgatcgtgatcagaccacaaatgagcttgtcatccgcgtccaacctgatgaagctatctatttgaaaatcaacaacaaggtccctggtttaggaatgagattagatcagagtaacttaaatcttctctattcagcaaggtattcaaaggagattccagatgcatatgagaggcttttgttagatgcgatcgaaggtgaacgcagattgttcataagaagcgatgaacttgacgctgcttgggcgcttttcactccattgctcaaagagatagaagaaaagaagacaaccccagaattctatccttacggcagtcgtggtccagtcggtgcccattatctagccgcaaaacacaaggtccaatggggagacctaagtcttgatcagtga

SEQ ID NO: 17204 - protein, 599 aa, Arabidopsis thaliana
MSSLSCPTYRSRTSSSSPFLSNHHHSSLINVVDPRRSLSFHYASPQGLNLAELCVVRSQRRSVQSSVVVQDGSVATESNSSEEAKDVGVLTIPSLEADKVVAESDGGEQLSTVSITVVGASGDLAKKKIFPALFALYYEGCLPEHFTIFGYARSKMTDAELRVMVSKTLTCRIDKRANCGEKMEEFLKRCFYHSGQYDSQEHFVALDEKLKEHEGGRLSNRLFYLSIPPNIFVDAVKCASSSASSVNGWTRVIVEKPFGRDSKTSAALTKSLKQYLEEDQIFRIDHYLGKELVENLSVLRFSNLIFEPLWSRQYIRNVQFIFSEDFGTEGRGGYFDNYGIIRDIMQNHLLQILALFAMETPVSLDAEDIRNEKVKVLRSMRPIKLEDVVIGQYKSHSIGGVTYPSYTDDKTVPKGSLTPTFAAAALFIDNARWDGVPFLMKAGKALNTRSAEIRVQFRHVPGNLYNRNSGTDRDQTTNELVIRVQPDEAIYLKINNKVPGLGMRLDQSNLNLLYSARYSKEIPDAYERLLLDAIEGERRLFIRSDELDAAWALFTPLLKEIEEKKTTPEFYPYGSRGPVGAHYLAAKHKVQWGDLSLDQ

SEQ ID NO: 17205 - DNA, 1518 bp, Saccharomyces cerevisiae
  CDS (1)..(1518)
atgagtgaaggccccgtcaaattcgaaaaaaataccgtcatatctgtctttggtgcgtcaggtgatctggcaaagaagaagacttttcccgccttatttgggcttttcagagaaggttaccttgatccatctaccaagatcttcggttatgcccggtccaaattgtccatggaggaggacctgaagtcccgtgtcctaccccacttgaaaaaacctcacggtgaagccgatgactctaacgtcgaacagttcttcaagatggtcagctacatttcgggaaattacgacacagatgaaggcttcgacgaattaagaacgcagatcgagaaattcgagaaaagtgccaacgtcgatgtcccacaccgtctcttctatctggccttgccgccaagcgtttttttgacggtggccaagcagatcaagagtcgtgtgtacgcagagaatggcatcacccgtgtaatcgtagagaaacctttcggccacgacctggcctctgccagggagctgcaaaaaaacctggggcccctctttaaagaagaagagttgtacagaattgaccattacttgggtaaagagttggtcaagaatcttttagtcttgaggttcggtaaccagtttttgaatgcctcgtggaatagagacaacattcaaagcgttcagatttcgtttaaagagaggttcggcaccgaaggccgtggcggctatttcgactctataggcataatcagagacgtgatgcagaaccatctgttacaaatcatgactctcttgactatggaaagaccggtgtcttttgacccggaatctattcgtgacgaaaaggttaaggttctaaaggccgtggcccccatcgacacggacgacgtcctcttgggccagtacggtaaatctgaggacgggtctaagcccgcctacgtggatgatgacactgtagacaaggactctaaatgtgtcacttttgcagcaatgactttcaacatcgaaaacgagcgttgggagggcgtccccatcatgatgcgtgccggtaaggctttgaatgagtccaaggtggagatcagactgcagtacaaagcggtcgcatcgggtgtcttcaaagacattccaaataacgaactggtcatcagagtgcagcccgatgccgctgtgtacctaaagtttaatgctaagacccctggtctgtcaaatgctacccaagtcacagatctgaatctaacttacgcaagcaggtaccaagacttttggattccagaggcttacgaggtgttgataagagacgccctactgggtgaccattccaactttgtcagagatgacgaattggatatcagttggggcatattcaccccattactgaagcacatagagcgtccggacggtccaacaccggaaatttacccctacggatcaagaggtccaaagggattgaaggaatatatgcaaaaacacaagtatgttatgcccgaaaagcacccttacgcttggcccgtgactaagccagaagatacgaaggataattag

SEQ ID NO: 17206 - protein, 505 aa, Saccharomyces cerevisiae
MSEGPVKFEKNTVISVFGASGDLAKKKTFPALFGLFREGYLDPSTKIFGYARSKLSMEEDLKSRVLPHLKKPHGEADDSNVEQFFKMVSYISGNYDTDEGFDELRTQIEKFEKSANVDVPHRLFYLALPPSVFLTVAKQIKSRVYAENGITRVIVEKPFGHDLASARELQKNLGPLFKEEELYRIDHYLGKELVKNLLVLRFGNQFLNASWNRDNIQSVQISFKERFGTEGRGGYFDSIGIIRDVMQNHLLQIMTLLTMERPVSFDPESIRDEKVKVLKAVAPIDTDDVLLGQYGKSEDGSKPAYVDDDTVDKDSKCVTFAAMTFNIENERWEGVPIMMRAGKALNESKVEIRLQYKAVASGVFKDIPNNELVIRVQPDAAVYLKFNAKTPGLSNATQVTDLNLTYASRYQDFWIPEAYEVLIRDALLGDHSNFVRDDELDISWGIFTPLLKHIERPDGPTPEIYPYGSRGPKGLKEYMQKHKYVMPEKHPYAWPVTKPEDTKDN

SEQ ID NO: 17207 - DNA, 1533 bp, Populus suaveolens
  CDS (1)..(1533)
atgggatccggtcaatggatggtagagaagagatctggtttagaaaatgattcgtttcgaaacgaacatgagactgcgtctgaaagtgggtgcctttcaattattgttcttggtgcttctggtgatctagccaagaagaagactttccctgctctctaccatctttatcgccaggggtttctggactcaaatgaagtccacattttcggatatgcaaggactaagatttcagatgatgaacttagagatcgaatccgtggatatcttggaaaagaagctgaagttgtatcaaagttcttgcaactgatcaaatatgtaagtggttcttatgatactgaggatggctttcagctattggataaggaagttttacagcatgaagtatcaaaaaacagtgcagaaggatcatctcgaagactattttatcttgcactccccccctcagtgtatccatctgtctgcaggatgatcagaaaatgttgcatgaataaatctgatcttggtggatggactagaattgtcattgagaaaccttttggcaaagatttggaatctgcagaaaatctcagtgcccatattggagagttgtttgaagaagcacaactttttcgtatcgatcactacttgggaaaagaattggtgcagaacttgctagttctccgttttgcaaatcgcttctttttacctctttggaaccgcgacaacatttccaatgttcagattgtgtttcgggaaaattttggaactgaaggtcgtggtggatattttgatgaatatgggattattcgagatattattcaaaatcacttattacagattctttgtctggttgccatggaaaagcccgtttctctcaaacctgaatatattcgagatgagaaagtgaaggttcttcaatcagtacttccaatcagagatgaagatgttgttcttggacagtatgaaggctacagggatgacccaacagttcctgatcaatcaaataccccaacatttgctactgttgttctgagaattcataatgaaagatgggaaggggttcctttcatactaaaggcaggaaaagcattaaattcaagcaaggcagagatacgtgttcaatttaaggacgttcctggtgatatattccaatgtcaaaagcaaggaaggaatgagtttgtaatacgcctgcaaccctcagaagccatgtacatgaaacttacggtcaagcagcctggactcgagatgtctactgttcaaagtgaactggacctgtcatatatgcaacgttatcaaggggttcccatcccggaggcatatgaacgtctgattcttgacacaattaggggcgatcagcagcattttgttcgcagagatgaattgaaggcagcatgggagatcttcacaccccttctgcacaggattgacaatggtgaattgaagccaaaggaataccaaccaggcagccggggtccagtcgaagcagatgagctgctggcaaaagctggttatgttcaaacacatggctatatctggattcctcctacattgtag

SEQ ID NO: 17208 - protein, 510 aa, Populus suaveolens
MGSGQWMVEKRSGLENDSFRNEHETASESGCLSIIVLGASGDLAKKKTFPALYHLYRQGFLDSNEVHIFGYARTKISDDELRDRIRGYLGKEAEVVSKFLQLIKYVSGSYDTEDGFQLLDKEVLQHEVSKNSAEGSSRRLFYLALPPSVYPSVCRMIRKCCMNKSDLGGWTRIVIEKPFGKDLESAENLSAHIGELFEEAQLFRIDHYLGKELVQNLLVLRFANRFFLPLWNRDNISNVQIVFRENFGTEGRGGYFDEYGIIRDIIQNHLLQILCLVAMEKPVSLKPEYIRDEKVKVLQSVLPIRDEDVVLGQYEGYRDDPTVPDQSNTPTFATVVLRIHNERWEGVPFILKAGKALNSSKAEIRVQFKDVPGDIFQCQKQGRNEFVIRLQPSEAMYMKLTVKQPGLEMSTVQSELDLSYMQRYQGVPIPEAYERLILDTIRGDQQHFVRRDELKAAWEIFTPLLHRIDNGELKPKEYQPGSRGPVEADELLAKAGYVQTHGYIWIPPTL

SEQ ID NO: 17209 - DNA, 1602 bp, Nonomuraea sp
  CDS (1)..(1602): transl_table=11
atgacagacccggcagcacccgcggaggaggccgtcaccgtggcggcggccgtcgcgggcaccgccaccaccgaggctgtggcagccgccaacccgctgcgcgacccgcgtgacaagcggttgccccgggtggcgggaccgtgcgtgatggtgttgttcggcgtgacgggtgacctggccaagcgcaagctgctaccggcgatttacgacctgggcaaccgggggctgctgccgcccggcttctcgctggtcggcttcgcccggcgcgattggaaagaccaggatttcgcccagttgacgcacgacgccgtcaaggcgcatgcccggacacccttccgtgaggaggtctggaagcagatccgcgagggcatccatttcgttcccggcgagttctcggacgacggggcgttcgacgcgctggccatggcgttggcagagatcgacgagacccgcggcacgggcggaaactacgctttctacctgtcggtgccgccgaagttcttccccgtggtggtggagcagctcaagcgcaccgggctgtccgacgcgcccgacggctcgtggcggcgggtggtgatcgagaagccgttcgggcacgacctgcagtcggcccacgagctgaacgagatcaccacctcggccttcccggagagctcgatcttccggatcgaccactacctgggcaaggagaccgtccagaacatcatggcgctgaggttcgccaacaacctctacgagccgatctggaaccgcagcttcgtcgaccacgtacagatcacgatggccgaggacatcggcatcggcggccgggccggctactacgacggcatcggcgccgcccgcgacgtgatccagaaccacctgctccagctcctcgcgctcgtcgcgatggaggacccgacctccttcgaggccaactcgctgcggcgggagaaggagaaggtgctcaaggccgtgcggctgcccgcgaacctgggcctgaacaccgcgcgcggccagtactccgcgggctggcagggcggcgagaaggtcgtcggctacctccaggaggagggcatctcgcaggagtccaccaccgagacctacgccgccatcaagctggagatcgccaaccggcgctgggccggcgtgccgttctacctgcgcaccggcaagcgcctgggccgccgcgtcaccgaggtggccgtggtgttccagcgggcgccgcacctgccgttcagcaaggacgacaccgagatcctcggccagaacgcgctggtcgtccgggtccagccggacgagggcatcaccgtgcggttcggctcgaaggtgccggggacggcgatggaggtgcgtgacgtctccatggacttcgcctacggcgagtcgttcctggagtcgtcgccggaggcgtacgagcggctgctgctcgacgtgatgatcggcgatccgccgctcttcccgcaccagcgggaggtggagctgtcgtggaacatcctcgacccgatcgaggagttctgggccacgcaggggcagccggagccgtacgagtccggttcgtgggggcccgagtcggccgacgcgatgatggcccgcgacggccgcgtgtggaggaggctctag

SEQ ID NO: 17210 - protein, 533 aa, Nonomuraea sp
MTDPAAPAEEAVTVAAAVAGTATTEAVAAANPLRDPRDKRLPRVAGPCVMVLFGVTGDLAKRKLLPAIYDLGNRGLLPPGFSLVGFARRDWKDQDFAQLTHDAVKAHARTPFREEVWKQIREGIHFVPGEFSDDGAFDALAMALAEIDETRGTGGNYAFYLSVPPKFFPVVVEQLKRTGLSDAPDGSWRRVVIEKPFGHDLQSAHELNEITTSAFPESSIFRIDHYLGKETVQNIMALRFANNLYEPIWNRSFVDHVQITMAEDIGIGGRAGYYDGIGAARDVIQNHLLQLLALVAMEDPTSFEANSLRREKEKVLKAVRLPANLGLNTARGQYSAGWQGGEKVVGYLQEEGISQESTTETYAAIKLEIANRRWAGVPFYLRTGKRLGRRVTEVAVVFQRAPHLPFSKDDTEILGQNALVVRVQPDEGITVRFGSKVPGTAMEVRDVSMDFAYGESFLESSPEAYERLLLDVMIGDPPLFPHQREVELSWNILDPIEEFWATQGQPEPYESGSWGPESADAMMARDGRVWRRL

SEQ ID NO: 17211 - DNA, 1467 bp, Gluconobacter oxydans
  CDS (1)..(1467): transl_table=11
atggaacatttccagcaggtcgagcctttcgactatgtcatcttcggtgccactggcgatctcacgatgcgcaagctgctgcccgcgctctacaaccgccttcggatgggccagattccggatgatgcgtgcatcatcggagccgcccgtacggagctggaccgggaggcctatgtcgcgcgggcccgagacgcccttgagcggtttcttccctcagacatcctgggcccggggctggtcgagcgtttcctcgcccgtctcgattacgtgacgctggacagcagccgcgagggcccgcagtgggacgccctgaagtccctgctggccaaggcacagcctgaccgggtgcgcgtctatatttcgcaaccgcaccgcagcttacggcagcatctgcgagacctgaaccgctacgagctgatcacccccacgtcgcgggttgttctcgaaaagccgatcggtacgaacatggccaccgccaccgccatcaatgacggggtcggccagtattttccggaaaagcagatctaccggatcgatcattatctcgggaaagagacggtccagaacgttctcgccctgcgttttgcaaacccgctcatgaacgctgcctggtccggcgagcatatcgagagcgtgcagatcacggcggtcgagaccgtgggcgtcgaaggtcgtgcggcctattacgacacgtctggcgcgcttcgcgacatgatccagaaccacctgctccaggtactgtgtctggttgcgatggaagcccccgattcccttgaggccgatgccgtccgcaacgccaaactggccgtcctgaacgccctgcgccccatcacggatgccacagccgccaccgagacggtgcgcgcgcagtacacggcaggcgtggtcgatggcgagaatgttccgggttatcttgaagagctcggcaagcccagcgcgacggaaacctatgccgcaatccgcgcctgggtggacacgccgcgctggaagaacgtgccgttctacatccgcacggccaagcggtccggcaagaaggtcagcgagatcgtcgtgacgttccgcccggctgcgaccaccatgttcggcgccaccccggccagcaacaggctggtcctgcgcatccagcccaacgaaggcgtggacctgcgtctgaacgtcaagaaccctgcgctggatgtcttcaacctgcggacggcggatcttgatacctccatccgcatggaaggcggcctgcccttcccggattcctatgagcggcttcttctggatgccgtgcggggtgatccggtactgttcatccgccgcgacgaggtcgaggccgcatggcgctgggtcgagcccatccttgaggcctggaaacatgacaaggcgcccatgcagacctacagtgcgggttcctatgggccggaacaggcaacacaactgctcgccagccatggcgacacctggcatgaagcgtcggagtaa

SEQ ID NO: 17212 - protein, 488 aa, Gluconobacter oxydans
MEHFQQVEPFDYVIFGATGDLTMRKLLPALYNRLRMGQIPDDACIIGAARTELDREAYVARARDALERFLPSDILGPGLVERFLARLDYVTLDSSREGPQWDALKSLLAKAQPDRVRVYISQPHRSLRQHLRDLNRYELITPTSRVVLEKPIGTNMATATAINDGVGQYFPEKQIYRIDHYLGKETVQNVLALRFANPLMNAAWSGEHIESVQITAVETVGVEGRAAYYDTSGALRDMIQNHLLQVLCLVAMEAPDSLEADAVRNAKLAVLNALRPITDATAATETVRAQYTAGVVDGENVPGYLEELGKPSATETYAAIRAWVDTPRWKNVPFYIRTAKRSGKKVSEIVVTFRPAATTMFGATPASNRLVLRIQPNEGVDLRLNVKNPALDVFNLRTADLDTSIRMEGGLPFPDSYERLLLDAVRGDPVLFIRRDEVEAAWRWVEPILEAWKHDKAPMQTYSAGSYGPEQATQLLASHGDTWHEASE

SEQ ID NO: 17213 - DNA, 1767 bp, Oryza sativa subsp
  CDS (1)..(1767)
atggcgctctcctgcatgaggtgctccccggccgccggcgccgtacgacgaggattggcatcggcggctccgccggcggcgctctcctttgccagatgcggcctccgtagagcggccgcgctcgggtggcgcgtcgccgccgtcgccactacgggagtgcaaggtgccaaggatgctggtctggagaaagctgccagaagtgcttcccaatcaaaggtggaaaatggctcaccttcagaaatcattttagatgattttgaagacttgagccctctatcagaaaatgatgactccactgttagtatcactgtagtcggagcatctggtgaccttgccaagaagaagatatttcctgcactttttgctctatactatgaagattgtcttccaaagcatttcactatcttcggatatgcacgcagcaagatgacagatgctgaattgagaaacatggtcagcaaaacactgacatgcagaatagataaaagggaaaactgtaatgagaagatggaagagtttttaaagagatgcttctatcattcaggccaatatgattcagaggagcatttcatggaccttgacaagaagctgaaacaacatgagggttccagagtttctaaccgtcttttctacttgtcaataccaccaaatatattccttgatgttgtaaaatgtgcaagcaaatcagcatcatctgggaatggttggacaagggtaattgttgagaaaccttttggtcgtgactcagattcatcttctgcattaacaaggggtctgaagcagtacctggtagaggaccaaatcttcaggattgaccactacttgggaaaggaactagtggagaacctgtctgtccttcgcttctcaaatcttgtttttgaacctctatggtcaaggcagtatataaggaatgtgcagctgatattctcagaggatttcggcactgaaggacgaggagggtactttgataggtatggtattatccgtgacataatgcagaatcatcttcttcagatactagccctatttgcaatggaaactcctgttagcttggaggcagaggacataagaaacgaaaaggttaaagttttgcgttccatgaagcccctgcaactggaagatgtggtgataggacagtacaaaagtcatacaaagggtggtaccacataccctggatacactgaagataagacggtgcccaaggatagtgtcaccccaacatttgctgcagctgcacttttcataaataatgctagatgggatggagttccttttcttatgaaagctgggaaggctttacatacaaaaggggctgagattagagtacagttccgacatgttcctggtaatctttataagaggagttttgggactgatcttgatacagccactaatgaacttgtcatacgtgtgcaacctgatgaagctatctacttgaagattaacaacaaaattcctggtcttggtatgagactagatagaagtaatttgaatcttcactatgcagcaaggtactccaaggagataccagatgcttatgagaggctcttacttgatgccattgaaggagagcgaaggctttttatccgttctgatgagttggatgccgcatgggagctcttcactcccttactcaaggagctggaagagaagcggatagcccctgagctatacccttatggaagccgcggtcctgtaggggctcactaccttgcagcaaagtacaacgtcagatggggtgatttgaccacagaacagaaggcatga

SEQ ID NO: 17214 - protein, 588 aa, Oryza sativa subsp
MALSCMRCSPAAGAVRRGLASAAPPAALSFARCGLRRAAALGWRVAAVATTGVQGAKDAGLEKAARSASQSKVENGSPSEIILDDFEDLSPLSENDDSTVSITVVGASGDLAKKKIFPALFALYYEDCLPKHFTIFGYARSKMTDAELRNMVSKTLTCRIDKRENCNEKMEEFLKRCFYHSGQYDSEEHFMDLDKKLKQHEGSRVSNRLFYLSIPPNIFLDVVKCASKSASSGNGWTRVIVEKPFGRDSDSSSALTRGLKQYLVEDQIFRIDHYLGKELVENLSVLRFSNLVFEPLWSRQYIRNVQLIFSEDFGTEGRGGYFDRYGIIRDIMQNHLLQILALFAMETPVSLEAEDIRNEKVKVLRSMKPLQLEDVVIGQYKSHTKGGTTYPGYTEDKTVPKDSVTPTFAAAALFINNARWDGVPFLMKAGKALHTKGAEIRVQFRHVPGNLYKRSFGTDLDTATNELVIRVQPDEAIYLKINNKIPGLGMRLDRSNLNLHYAARYSKEIPDAYERLLLDAIEGERRLFIRSDELDAAWELFTPLLKELEEKRIAPELYPYGSRGPVGAHYLAAKYNVRWGDLTTEQKA

SEQ ID NO: 17215 - DNA, 1746 bp, Solanum tuberosum
  CDS (1)..(1746)
atggtaaccctttattcttccccttccactaactgttctggggctttttcatcttactccaattcttctattggcttctacaattatcacaacaacttccctatttcatccagaaagtttggttctcacaagatttctttgcaaattaatgccattcgcatgcaagatggtgctgttgtggctcaacctagcaaaacccaagatgaaactcctttgaagaaattaaaagatggaattttgtcaaaggagcagaaacatacatttgattttgatagcaacaaagataaatcaactgtcagtattactgttgttggtgcttcaggagatcttgccaaaaaaaagatatttcctgcactttttgcactttattatgagggttgcttaccggagcatttcactatttttggttatgcccggagtaagatgactgatgatgaactcaggaacatggtcagcaagacacttacttgcaggattgataagagggaaaattgtggtgaaaagatggaacagtttctagaaaggtgtttctaccatagtggacaatatgattcccaagaaaactttgcagagcttgataaaaaactgaaagaacatgaggctggaaggttttccaatcgtctgttttacttgtccattccaccaaatatttttataaatgctgtacgatgtgcaagccttgcgtcatctgctcatggatggactagagtcattgtagagaaaccctttggtcgggattctgaatcctctgctgcattaacaggagcacttaagcagtacttgaaggaagatcaaattttcaggattgatcactatttagggaaggagcttgtggaaaacctttctgtccttcgtttctccaacttgatatttgaacccttatggtcaaggcagtatataaggaacgtgcaatttattttctctgaagattttggcactgaaggaaggggaggttattttgatcattatgggataattagagacattatgcaaaaccatttgcttcaaattcttgccctctttgccatggaaacacctgtcagtttggatgcagaagatatcaggaatgaaaaggtaaaagttctgcgttctatgagacctttacaactagatgatgttattgtcgggcagtacaaaagtcacacaaaagggggtgttaactatcctggttataccgacgacaagactgtacccaaggacagtctaaccccaacttttgctgcagctgctcttttcatagataatgcaagatgggatggtgtgcctttccttatgaaggctggaaaagctttacataccaggagtgcggaaataagagtacaattcaggcacgtgccaggaaacttatacaataagaactttggctcggatctagatcaggcaacaaacgagcttgttatccgtgttcaacctgacgaagctatatacctaaagatcaataacaaagttcccggtttaggaatgagattggatcgcagtaatcttaatctgctttactcagcaagatactcaaaggagatccctgatgcatatgagcggctacttcttgatgccatagaaggtgaacgtaggctttttatccgtagtgatgaactggatgctgcttggtctcttttcacaccagtgttgaaagaccttgagcataagaaaatagtaccggaaagctacccctatggaagtcgaggacctattggagcacattaccttgcagcacgatataaagtaagatggggtgatcttgcttag

SEQ ID NO: 17216 - protein, 581 aa, Solanum tuberosum
MVTLYSSPSTNCSGAFSSYSNSSIGFYNYHNNFPISSRKFGSHKISLQINAIRMQDGAVVAQPSKTQDETPLKKLKDGILSKEQKHTFDFDSNKDKSTVSITVVGASGDLAKKKIFPALFALYYEGCLPEHFTIFGYARSKMTDDELRNMVSKTLTCRIDKRENCGEKMEQFLERCFYHSGQYDSQENFAELDKKLKEHEAGRFSNRLFYLSIPPNIFINAVRCASLASSAHGWTRVIVEKPFGRDSESSAALTGALKQYLKEDQIFRIDHYLGKELVENLSVLRFSNLIFEPLWSRQYIRNVQFIFSEDFGTEGRGGYFDHYGIIRDIMQNHLLQILALFAMETPVSLDAEDIRNEKVKVLRSMRPLQLDDVIVGQYKSHTKGGVNYPGYTDDKTVPKDSLTPTFAAAALFIDNARWDGVPFLMKAGKALHTRSAEIRVQFRHVPGNLYNKNFGSDLDQATNELVIRVQPDEAIYLKINNKVPGLGMRLDRSNLNLLYSARYSKEIPDAYERLLLDAIEGERRLFIRSDELDAAWSLFTPVLKDLEHKKIVPESYPYGSRGPIGAHYLAARYKVRWGDLA

SEQ ID NO: 17217 - DNA, 1566 bp, Chlorella vulgaris
  CDS (1)..(1566)
atggccgcaattgcagagtctccgtcaaccgagttgcagggcgaggcctctggttacagcaatcgcgatgagtggcactgcgggttctcagaggaactttgcctgaccatcgtggttgcgggggcctctggtgacctggctcgtaagaagacctaccccgcgctgcagttcctcttccagcatggcttcttgccaagcaatgtggccatcattggctatgcccgcaccgacatgaacgacgacaagctgcgggagaagctgaagccaaagctggtgggcagcgacgatgacattgataagttcctgaagcgctgcacatatgtggcagggtcgtatgatggtgccgagggatggcaagggctggcaaaagtgctggacaagcgcgagtcaaagtgcagcaagaaccctgctggccgcctctactaccttgcactgccgccctcagtctacccccaagtgtgcgctggcctgaaggagcattgcgacaacctacggagcgtggagggctcctggattcgagtcattgttgagaagccttttgggcacgacctgcagagctctgagcagctggcagaccagctggggaagctgtacccagagcaccagctgtatcgcatcgaccattacctgggcaaggagatggcgcagaacctgtttgtgatgcggcatgccaacatgtttttggcgcctgtttggaaccggacctgcatctccaatgtccaaatcacctttaaggaggatttcgggacagagggccgtggcggctacttcgacacatttggtatcctgagggatgtgctgcagaaccacttggctcagatgctggccatggttgcaatggagaagcctctgtctgtgcacccagatgatttgcgagatgagaaggtcaaggtgctgcggtgcatcaagcctgtggagccgcataatgttgtactggggcagtacactgccgctaatggacaaccgggctacacagatgatcccaccgtgccggatgatagcaagacgcccacctttgctgctgtcacgctgtacattgacaatgatcggtgggcgggggttccctttgtgttgaaggcgggcaaggcgctgaacgagcggaaggcggagatcagggtgcagctgcgtgcgacgccccactttgtattcaatggagagccagagtcgatgcgcaacgagcttgtggtgcggctgcagccggacgaggcgatttacttgaagatgattgtgaagaagccaggcctggagtttgatgccgccatcagcgagctggacctggactacagccgccagtaccctgaagtggacataccagatgcctacccccgcctcattctcgactccatccgtggcgaccagcaacactttgttcgcagggatgagctgcgcgcggcatggggcatcttcacgccgctgctccacaaaatcgacgctggcgaggttgaggtgcacccctacccttacggcagcaggggcccggcggaggcggatgagctgcttgcacgagctgactttgtgaagaacgtggcatacaattggaaggatcccgggagctgcaagttgtga

SEQ ID NO: 17218 - protein, 521 aa, Chlorella vulgaris
MAAIAESPSTELQGEASGYSNRDEWHCGFSEELCLTIVVAGASGDLARKKTYPALQFLFQHGFLPSNVAIIGYARTDMNDDKLREKLKPKLVGSDDDIDKFLKRCTYVAGSYDGAEGWQGLAKVLDKRESKCSKNPAGRLYYLALPPSVYPQVCAGLKEHCDNLRSVEGSWIRVIVEKPFGHDLQSSEQLADQLGKLYPEHQLYRIDHYLGKEMAQNLFVMRHANMFLAPVWNRTCISNVQITFKEDFGTEGRGGYFDTFGILRDVLQNHLAQMLAMVAMEKPLSVHPDDLRDEKVKVLRCIKPVEPHNVVLGQYTAANGQPGYTDDPTVPDDSKTPTFAAVTLYIDNDRWAGVPFVLKAGKALNERKAEIRVQLRATPHFVFNGEPESMRNELVVRLQPDEAIYLKMIVKKPGLEFDAAISELDLDYSRQYPEVDIPDAYPRLILDSIRGDQQHFVRRDELRAAWGIFTPLLHKIDAGEVEVHPYPYGSRGPAEADELLARADFVKNVAYNWKDPGSCKL

SEQ ID NO: 17219 - DNA, 1455 bp, Corynebacterium glutamicum
  CDS (1)..(1455): transl_table=11
atggtgatcttcggtgtcactggcgacttggctcgaaagaagctgctccccgccatttatgatctagcaaaccgcggattgctgcccccaggattctcgttggtaggttacggccgccgcgaatggtccaaagaagactttgaaaaatacgtacgcgatgccgcaagtgctggtgctcgtacggaattccgtgaaaatgtttgggagcgcctcgccgagggtatggaatttgttcgcggcaactttgatgatgatgcagctttcgacaacctcgctgcaacactcaagcgcatcgacaaaacccgcggcaccgccggcaactgggcttactacctgtccattccaccagattccttcacagcggtctgccaccagctggagcgttccggcatggctgaatccaccgaagaagcatggcgccgcgtgatcatcgagaagcctttcggccacaacctcgaatccgcacacgagctcaaccagctggtcaacgcagtcttcccagaatcttctgtgttccgcatcgaccactatttgggcaaggaaacagttcaaaacatcctggctctgcgttttgctaaccagctgtttgagccactgtggaactccaactacgttgaccacgtccagatcaccatggctgaagatattggcttgggtggacgtgctggttactacgacggcatcggcgcagcccgcgacgtcatccagaaccacctgatccagctcttggctctggttgccatggaagaaccaatttctttcgtgccagcgcagctgcaggcagaaaagatcaaggtgctctctgcgacaaagccgtgctacccattggataaaacctccgctcgtggtcagtacgctgccggttggcagggctctgagttagtcaagggacttcgcgaagaagatggcttcaaccctgagtccaccactgagacttttgcggcttgtaccttagagatcacgtctcgtcgctgggctggtgtgccgttctacctgcgcaccggtaagcgtcttggtcgccgtgttactgagattgccgtggtgtttaaagacgcaccacaccagcctttcgacggcgacatgactgtatcccttggccaaaacgccatcgtgattcgcgtgcagcctgatgaaggtgtgctcatccgcttcggttccaaggttccaggttctgccatggaagtccgtgacgtcaacatggacttctcctactcagaatccttcactgaagaatcacctgaagcatacgagcgcctcattttggatgcgctgttagatgaatccagcctcttccctaccaacgaggaagtggaactgagctggaagattctggatccaattcttgaagcatgggatgccgatggagaaccagaggattacccagcgggtacgtggggtccaaagagcgctgatgaaatgctttcccgcaacggtcacacctggcgcaggccataa

SEQ ID NO: 17220 - protein, 484 aa, Corynebacterium glutamicum
MVIFGVTGDLARKKLLPAIYDLANRGLLPPGFSLVGYGRREWSKEDFEKYVRDAASAGARTEFRENVWERLAEGMEFVRGNFDDDAAFDNLAATLKRIDKTRGTAGNWAYYLSIPPDSFTAVCHQLERSGMAESTEEAWRRVIIEKPFGHNLESAHELNQLVNAVFPESSVFRIDHYLGKETVQNILALRFANQLFEPLWNSNYVDHVQITMAEDIGLGGRAGYYDGIGAARDVIQNHLIQLLALVAMEEPISFVPAQLQAEKIKVLSATKPCYPLDKTSARGQYAAGWQGSELVKGLREEDGFNPESTTETFAACTLEITSRRWAGVPFYLRTGKRLGRRVTEIAVVFKDAPHQPFDGDMTVSLGQNAIVIRVQPDEGVLIRFGSKVPGSAMEVRDVNMDFSYSESFTEESPEAYERLILDALLDESSLFPTNEEVELSWKILDPILEAWDADGEPEDYPAGTWGPKSADEMLSRNGHTWRRP

SEQ ID NO: 17221 - DNA, 1518 bp, Oryza sativa subsp
  CDS (1)..(1518)
atgtcaggaggatcttcaccaaggtcaagacgaagcagctttaattctttatcaagagatctcgaactcccttcagagcaaggttgtctctctgttattgtcctcggggcttctggagacctagccaagaagaaaactttcccggcactcttccatctttttgcacagggatttatacaatcaggtgaagtgcatatatttgggtatgcgagatcaaacctttctgatgatgggttaagggaacgcattcgtggatacctcaaaggagcctcagaagaacatctctcagactttttgcaacatataaaatatgtcagtggttcctatgacagcggagaaggatttgagaaattgaacaaggaaatttcagagtatgagaagtcaaacaaatcagaaagccctcgcaggctcttctatttggcattgcctccatctgtctacccttcagtctgcaaaatgatcagaacatattgcatgaatccatctggatggactagagtcattgttgagaagccatttggaaaggacttggactcttcagaagaattaagtgcccaacttggggagctatttgacgaaaaccaactctacagaattgatcactacttgggaaaagagttggtccaaaacctgcttgtgcttcgttttgccaaccgcttgttcttgcctctttggaaccgcgacaatattgataatatacagattgtattcagggaggactttgggactgacgggcgtggtggatattttgatcaatatggaatcattcgtgacatcatccagaaccatttgttacaggttttctgtttggttgcaatggaaaagcctgtctctcttaagcctgagcacattagagatgagaaagtcaaggttctgcagtccgtgaaccctataaagcatgatgaggttgtccttggacaatacgaggggtacaaggatgaccctacagtgccagatgactcaaacaccccaacttttgcatctgtcgtgtttcgggtacacaatgaaagatgggagggtgttcctttcattcttaaagctggtaaagcactaagctcaaggaaagcagaagtccgtgtgcagttcaaagatgttcctggtgacatctttaaatgtaaaaggcaaggaagaaatgagtttgtcatacgccttcagccatcagaagccatgtacatgaaacttactgtcaaaaaacctggattggagatggccaccgagcagagtgaacttgatctgtcatacgggatgcggtaccaaaacgtcaaaattccagaggcatgcgagcgtctcatattggatacgatacgaggagaccaacagcacttcgttcgccgagatgagctgaaggctgcttggcagatcttcactcccctgctgcacgacatcgacgaaggcaaggtgaagtctattccataccagcctggcagccgaggccccaaggaagccgatgaactgagcgagagggttgggtatatgcagacccacggttacatatggataccacccacccttgcatag

SEQ ID NO: 17222 - protein, 505 aa, Oryza sativa subsp
MSGGSSPRSRRSSFNSLSRDLELPSEQGCLSVIVLGASGDLAKKKTFPALFHLFAQGFIQSGEVHIFGYARSNLSDDGLRERIRGYLKGASEEHLSDFLQHIKYVSGSYDSGEGFEKLNKEISEYEKSNKSESPRRLFYLALPPSVYPSVCKMIRTYCMNPSGWTRVIVEKPFGKDLDSSEELSAQLGELFDENQLYRIDHYLGKELVQNLLVLRFANRLFLPLWNRDNIDNIQIVFREDFGTDGRGGYFDQYGIIRDIIQNHLLQVFCLVAMEKPVSLKPEHIRDEKVKVLQSVNPIKHDEVVLGQYEGYKDDPTVPDDSNTPTFASVVFRVHNERWEGVPFILKAGKALSSRKAEVRVQFKDVPGDIFKCKRQGRNEFVIRLQPSEAMYMKLTVKKPGLEMATEQSELDLSYGMRYQNVKIPEACERLILDTIRGDQQHFVRRDELKAAWQIFTPLLHDIDEGKVKSIPYQPGSRGPKEADELSERVGYMQTHGYIWIPPTLA

SEQ ID NO: 17223 - DNA, 1521 bp, Enterococcus mundtii
  CDS (1)..(1521): transl_table=11
atgaatgaaaaaaacgtattatttactatatttggcggtacaggagatttagcacaacgtaaattgtatccttccctttttcgtttatacaaaaagggcaacttgagcgaacattttgctgtgatcggtacagcacgtcgtccttggagcgatgaacactatcgtgaagtggttaaaggaacaatcaaaacattgaatccttctgccgaagaagccgaacgatttgccagccatttttattatcaatcccatgatgtcaatgattcttctcattaccaaacattaaaagaattatctgatcgtttagatgaaaaataccacttgaatggtaatcgaatgtactatttagccatggctccacaatttttcggtacgatcgtttcacatttgaaatctcagaaaatcatcactgaagctggcttcaaccgattgattatcgaaaaaccttttggttctgatttccattctgcctttgaattgaatgaaaaaattcgacaagtctttccagaagatgatattttccgtattgaccattatttaggtaaagaaatgatccaaaatatctctgcgattcgctttgccaataatatttttgagtctcaatggaacaatcgttacatcgacaacatccaaatcacttttggtgagagtttaggtgttgaagatcgtggcggctattatgaccacagtggtgcgttaaaagatatggtccaaaatcatatccttcaagtattagctttacttgcgatggaaccaccagttgccttttccgaaaaagaaatccgatcagaaaaaatcaaagcgttaaaagctattcgtatttatgaaaaaaaagaagtcttagaaaattttgtacgtgggcaatatgctgcaggtcaattagatgatcagacattcaaaggctatcgtgaagaagacaacgttgatccagaatcaacaactgaaacatttgttgctggaaaattcacgatcgataacttccgttggtctggcgtaccgttttatgtacggactgggaaacgtcttactgaaaaaggtacacgaatcaatatcgtctttaaacaagtacctgtcaatgtatttaaaacatcgatcgacgaaccttgtaatgatccaacgttaccaccaaatgttttgactatctatattcaaccaacagaaggtttttcatttacattaaatggaaaaaaagttggtcaaggcttcgccaccgatccaatcaaactggaatatcgcaatagtgctgaaatggtcgaaaatagtcctgaagcgtatgaaaagcttatgttagatgcattgaacggtgatagtacaaacttctctcattgggaagaagtcgcacaatcttggcatatcgttgacgtgatccgccaagtttgggatcaagtacaaccggatttcccgaattataaagctggttctatgggtcctgaagcagcattcgagcttttagaaaaagacgggttcgaatggatctggcaaccagatcattggtaccgtgaacgtggtaaattggattag

SEQ ID NO: 17224 - protein, 506 aa, Enterococcus mundtii
MNEKNVLFTIFGGTGDLAQRKLYPSLFRLYKKGNLSEHFAVIGTARRPWSDEHYREVVKGTIKTLNPSAEEAERFASHFYYQSHDVNDSSHYQTLKELSDRLDEKYHLNGNRMYYLAMAPQFFGTIVSHLKSQKIITEAGFNRLIIEKPFGSDFHSAFELNEKIRQVFPEDDIFRIDHYLGKEMIQNISAIRFANNIFESQWNNRYIDNIQITFGESLGVEDRGGYYDHSGALKDMVQNHILQVLALLAMEPPVAFSEKEIRSEKIKALKAIRIYEKKEVLENFVRGQYAAGQLDDQTFKGYREEDNVDPESTTETFVAGKFTIDNFRWSGVPFYVRTGKRLTEKGTRINIVFKQVPVNVFKTSIDEPCNDPTLPPNVLTIYIQPTEGFSFTLNGKKVGQGFATDPIKLEYRNSAEMVENSPEAYEKLMLDALNGDSTNFSHWEEVAQSWHIVDVIRQVWDQVQPDFPNYKAGSMGPEAAFELLEKDGFEWIWQPDHWYRERGKLD

SEQ ID NO: 17225 - DNA, 1470 bp, Pseudomonas putida
  CDS (1)..(1470): transl_table=11
atggctgcgatcagtgtcgatccttgcacgtttgccctgtttggcgcccttggcgacctggcgttgcgcaagctgtttcctgcgctctaccagctcgaccgggccaacctgctgcacccggacacccgcctgctggcgctggcccgcgaggcaggcagcgcgcaggagcacctgaacagcatcgaagcccacctgcgccggcatgtgcccgaggccgatatcgagcctgctgcattgggccgcttcctggcccggttgagctaccagcacctggacttcctgcaacctgagggttaccgggccctggccgagcagttgccgggcgacctgccgctgatcgcctacttcgccacggcggcagcggtgtacggggccatctgcgaaaacctcgacaacgccgggctggccccgcgtacccgggtggtgctggagaagcccatcggccacgacctggagtcgtcgcgacgggtcaacgatgccgtggcgcggttcttccccgaaaaccgggtgtaccgtatcgaccactatctgggcaaggagacggtgcagaacctgattgccctgcgcttcgccaatagcctgttcgaaacccagtggaaccagaattccatctcccacgtggagatcaccgttgccgagaaagtcggtatcgaaggccgctggggctacttcgacaaggccggccaactgcgcgacatgatccagaaccatctgctgcagttgctgtgcctgatcgccatggacccgcccagcgagctgtccgccgatgccattcgtgacgagaaggtgaaggtgctaaaggccctggcgccgatcacgggcgagggtttgagcacccaagtggtgcgtggtcagtatattgccggctacagcgagggcaagccggtacctggctacctggaagaggacaacgccaacgcccgcagcgacaccgaaaccttcgtcgccctgcgtgccgatatccgcaactggcgctggtcgggcgtgccgttctacctgcgtactggcaagcgcatgccgcagaagctgtcgcagatcgtcatccacttcaaggaaacgccgcactacattttcgccccggaacagcgtttgcaaatcggtaacaagctgatcattcgcctgcaaccggacgaaggcatttctttacgggtgatgaccaaggagcagggcctggacaaaggcatgcaactgcgcagcggtccgttgcagcttaatttttctgacacctggcgcagtacgcggattccggatgcctacgagcgcctgttgctcgaagtgatgcgtggcaaccagaacctgttcgtgcgcaaggacgaaatcgaatatgcctggaagtggtgcgaccagttgatcgccggctggcgtaatgcgggcgatgcgcccaagccttacgcggcgggctcctgggggccgatgagctcgattgcattgattacacgcgatgggagggcgtggtatggggatatctga

SEQ ID NO: 17226 - protein, 489 aa, Pseudomonas putida
MAAISVDPCTFALFGALGDLALRKLFPALYQLDRANLLHPDTRLLALAREAGSAQEHLNSIEAHLRRHVPEADIEPAALGRFLARLSYQHLDFLQPEGYRALAEQLPGDLPLIAYFATAAAVYGAICENLDNAGLAPRTRVVLEKPIGHDLESSRRVNDAVARFFPENRVYRIDHYLGKETVQNLIALRFANSLFETQWNQNSISHVEITVAEKVGIEGRWGYFDKAGQLRDMIQNHLLQLLCLIAMDPPSELSADAIRDEKVKVLKALAPITGEGLSTQVVRGQYIAGYSEGKPVPGYLEEDNANARSDTETFVALRADIRNWRWSGVPFYLRTGKRMPQKLSQIVIHFKETPHYIFAPEQRLQIGNKLIIRLQPDEGISLRVMTKEQGLDKGMQLRSGPLQLNFSDTWRSTRIPDAYERLLLEVMRGNQNLFVRKDEIEYAWKWCDQLIAGWRNAGDAPKPYAAGSWGPMSSIALITRDGRAWYGDI

SEQ ID NO: 17227 - DNA, 1782 bp, Nicotiana tabacum
  CDS (1)..(1782)
atggtgaccctttattcttctccttcaacccattcttctggggctgttgcttcttactctaattcctctattgggctctataattatcatcataataagcagatagcagtttcttcaattttgtcgagaaagtttggttctttgcaaattaatcagaagccattttggaatgccgttcgcatgcaagatggtgcagtagcgactccgcctagcaaaatcgaaaatgaaactcctttgaagaaattaaaaaatggaattttgccagtcgcacctccaaaggagcagaaagatacaattgatttcgacagcaacaaagctaaatcaactgtcagtattactgttgttggtgcttcaggagatcttgccaagaaaaagatatttcctgcactgtttgcactttattatgagggttgcctccctgagcatttcactatctttggctatgcccgaagtaagatgactgatgctgaactacggaacatggttagcaagacccttacttgcaggattgacaagagggaaaattgtggtgaaaagatggaacagtttctagaaaggtgcttctaccacagtggccaatacgattccctggaaaactttgcggagctcgataaaaagctgaaggaacatgaggctggaaggttttccaatcgtctattctacttatccattccaccaaatatttttataaatgcggttcgatgtgctagcctctctgcatcatctgctcatggctggacaagagtcattgtagagaaaccctttggtcgggattctgaatcctctgccgcattgacaagatcacttaagcagtacttgaatgaagatcaaatttttaggatcgatcactatttagggaaggagttggtggaaaacctttctgtccttcgtttctccaacctgatatttgaacccttgtggtcaaggcagtatataaggaatgtgcagtttattttctctgaagattttggcactgaaggacggggaggttattttgatcattatgggataatcagagacatcatgcaaaaccatctgcttcaaattctggccctctttgccatggaaacacctgtgagtttggatgcggaagatatcagaaatgaaaaggtaaaagttctgcgttccatgagacctttacaactagacgatgttatcattgggcagtacaaaagtcacacaaaaggagatgttacctatcccggttataccgacgacaagactgtaccgaaggacagtctaaccccaacttttgctgcagctgctcttttcatagataatgcacggtgggatggggtgcctttccttatgaaagctgggaaagctttacatactaggagtgcggaaataagagtacaattcaggcacgtaccaggaaatttatacaataagaactttggctcagatcttgaccaggcgaccaacgagcttgttatccgtgtccagcctaatgaagctatatacctaaagatcaataacaaagttcctggtctaggaatgagattggatcgcagtaatcttaatctcctttactcggcaagatactcgaaggagatccctgatccatatgagcggctgcttcttgatgctatagaaggtgaaaggcggcttttcatccgcagtgatgagctggatgctgcttggtctcttttcacaccagtgttaaaagaacttgaggataagaaaatagttccagaatattatccctatggaagtcgaggacctattggagcacattatcttgcagcgcgatataaagtaagatggggtgatcttgtgtag

SEQ ID NO: 17228 - protein, 593 aa, Nicotiana tabacum
MVTLYSSPSTHSSGAVASYSNSSIGLYNYHHNKQIAVSSILSRKFGSLQINQKPFWNAVRMQDGAVATPPSKIENETPLKKLKNGILPVAPPKEQKDTIDFDSNKAKSTVSITVVGASGDLAKKKIFPALFALYYEGCLPEHFTIFGYARSKMTDAELRNMVSKTLTCRIDKRENCGEKMEQFLERCFYHSGQYDSLENFAELDKKLKEHEAGRFSNRLFYLSIPPNIFINAVRCASLSASSAHGWTRVIVEKPFGRDSESSAALTRSLKQYLNEDQIFRIDHYLGKELVENLSVLRFSNLIFEPLWSRQYIRNVQFIFSEDFGTEGRGGYFDHYGIIRDIMQNHLLQILALFAMETPVSLDAEDIRNEKVKVLRSMRPLQLDDVIIGQYKSHTKGDVTYPGYTDDKTVPKDSLTPTFAAAALFIDNARWDGVPFLMKAGKALHTRSAEIRVQFRHVPGNLYNKNFGSDLDQATNELVIRVQPNEAIYLKINNKVPGLGMRLDRSNLNLLYSARYSKEIPDPYERLLLDAIEGERRLFIRSDELDAAWSLFTPVLKELEDKKIVPEYYPYGSRGPIGAHYLAARYKVRWGDLV

SEQ ID NO: 17229 - DNA, 1530 bp, Triticum aestivum
  CDS (1)..(1530)
atggcgggaactgactcctcggcgtcatcgagacaaagcagtttcaactcattagcaaaggacctagaacttcctttggagaaagggtgcctcaccatcgttgtacttggggcttctggagatcttgccaagaagaaaacgttcccggcactctaccacctttttgagcaggggttcttacaatctggtgaagtgcatatagtggggtatgcgagaacaaatctttctgatgatgggttgagagggcgcatccgtgcataccttaaaggagcctcagaggaacatgtttcagaattcttgcaattgataaaatatgtcagtggttcctatgacagtggagaaggttttgaaaaactgaacaaggaaatatcagattatgagatgtcaaacaactcaggaagctcccgtaggctcttttatttggcattgcctccatctgtctacccttcagtgtgcaaaatgatccgaacatattgcatgagtccaacttctcgcgctggatggactagagtaattgttgagaagccctttggaaggggcctggactctgcagaagaattgagttcccaacttggggagctattcgaggaagatcaactctacaggattgaccactacttgggaaaagagttggtccaaaacttgcttgtgcttcgttttgcgaaccgtttgttcttaccactttggaaccgtgacaatgttgataatatacagattgtattcagggaggacttcggaactgatggacgtggaggatattttgatcaatatggaatcatccgtggtatcattcagaaccatttgttgcaggttttctgtttggttgcaatggaaaagcctgtatctcttaagcctgagcacatcagagatgagaaagtcaaggttctgcaatccgtgaacccgataaaggacgaagaggtagtccttggacaatatcagggctacaaggaggaccctacagtgccagatgactctaacaccccaacgtttgcatctattgtacttagggtacacaatgaaagatgggaaggtgttcctttcattcttaaagctggtaaagcattaaactcaagaaaagcagaaattcgtgtgcagttcaaggatgttcccggtgacatttttaaatgtaagaagcagggaagaaatgagtttgtcatacgcctccagccatcagaagccatgtacatgaaactaactgtgaagaaacctggattggaaatggctactgaacagagtgaacttgatctgtcatatgggatgcgttaccaagatgtcaaaattccagaggcatacgagcgcctcattttggatacaataagaggagaccagcaacactttgtgcgccgagatgagctgaaggctgcctggcagatcttcactcccttgttgcacgacatcgacgctggcaagctgaaggctgtttcatacaagcctggcagccgaggccccaaggaagctgatgaactgagtgagaaggttgggtacatgcagacccacggttacatctggataccacccacccttgcatag

SEQ ID NO: 17230 - protein, 509 aa, Triticum aestivum
MAGTDSSASSRQSSFNSLAKDLELPLEKGCLTIVVLGASGDLAKKKTFPALYHLFEQGFLQSGEVHIVGYARTNLSDDGLRGRIRAYLKGASEEHVSEFLQLIKYVSGSYDSGEGFEKLNKEISDYEMSNNSGSSRRLFYLALPPSVYPSVCKMIRTYCMSPTSRAGWTRVIVEKPFGRGLDSAEELSSQLGELFEEDQLYRIDHYLGKELVQNLLVLRFANRLFLPLWNRDNVDNIQIVFREDFGTDGRGGYFDQYGIIRGIIQNHLLQVFCLVAMEKPVSLKPEHIRDEKVKVLQSVNPIKDEEVVLGQYQGYKEDPTVPDDSNTPTFASIVLRVHNERWEGVPFILKAGKALNSRKAEIRVQFKDVPGDIFKCKKQGRNEFVIRLQPSEAMYMKLTVKKPGLEMATEQSELDLSYGMRYQDVKIPEAYERLILDTIRGDQQHFVRRDELKAAWQIFTPLLHDIDAGKLKAVSYKPGSRGPKEADELSEKVGYMQTHGYIWIPPTLA

SEQ ID NO: 17231 - DNA, 1542 bp, Triticum aestivum
  CDS (1)..(1542)
atggcgggaactgactcctcggcgtcatcgagacaaagcagtttcaactcattagcaaaggacctagaacttcctttggagcaagggtgcctcaccatcgttgtacttggggcttctggagatcttgccaagaagaaaacgttcccggcactctaccacctttttgagcaggggttcttacaatctggtgaagtgcatatagtggggtatgcgagaacaaatctttctgatgatgggttgagagggcgcatccgtgcataccttaaaggagcctcagaggaacatgtttcagaattcttgcaattgataaaatatgtcagtggttcctatgacagtggagaaggttttgaaaaactgaacaaggaaatatcagattatgagatgtcaaacaactcaggaagctcccgtaggctcttttatttggcattgcctccatctgtctacccttcagtgtgcaaaatgatccgaacatattgcatgagtccaacttctcgcgctggatggactagagtaattgttgagaagccctttggaagggacctggactctgcagaagaattgagttcccaacttggggagctattcgaggaagatcaactctacaggattgaccactacttgggaaaagagttggtccaaaacttgcttgtgcttcgttttgcgaaccgtttgttcttaccactttggaaccgtgacaatgttgataatatacagattgtattcagggaggacttcggaactgatggacgtggaggatattttgatcaatatggaatcatccgtgatatcattcagaaccatttgttgcaggttttctgtttggttgcaatggaaaagcctgtatctcttaagcctgagcacatcagagatgagaaagtcaaggttctgcaatccgtgaacccgataaaggacgaagaggtagtccttggacaatatcagggctacaaggatgaccctacagtgccagatgactctaataccccaacgtttgcatctattgtacttagggtacacaatgaaagatgggaaggtgttcctttcattcttaaagctggtaaagcattaaactcaagaaaagcagaaattcgtgtgcagttcaaggatgttcccggtgacatttttaaatgtaagaagcagggaagaaatgagtttgtcatacgcctccagccatcagaagccatgtacatgaaactaactgaattcgtgcaggtgaagaaacctggattggaaatggctactgaacagagtgaacttgatctgtcatatgggatgcgttaccaagatgtcaaaattccagaggcatacgagcgcctcattttggatacaataagaggggaccagcaacactttgtgcgccgagatgagctgaaggctgcctggcagatcttcactcccttgttgcacgacatcgacgctggcaagctgaaggctgtttcatacaagcctggcagccgaggccccaaggaagctgatgaactgagtgagaaggttgggtacatgcagacccacggttacatctggataccacccacccttgcatag

SEQ ID NO: 17232 - protein, 513 aa, Triticum aestivum
MAGTDSSASSRQSSFNSLAKDLELPLEQGCLTIVVLGASGDLAKKKTFPALYHLFEQGFLQSGEVHIVGYARTNLSDDGLRGRIRAYLKGASEEHVSEFLQLIKYVSGSYDSGEGFEKLNKEISDYEMSNNSGSSRRLFYLALPPSVYPSVCKMIRTYCMSPTSRAGWTRVIVEKPFGRDLDSAEELSSQLGELFEEDQLYRIDHYLGKELVQNLLVLRFANRLFLPLWNRDNVDNIQIVFREDFGTDGRGGYFDQYGIIRDIIQNHLLQVFCLVAMEKPVSLKPEHIRDEKVKVLQSVNPIKDEEVVLGQYQGYKDDPTVPDDSNTPTFASIVLRVHNERWEGVPFILKAGKALNSRKAEIRVQFKDVPGDIFKCKKQGRNEFVIRLQPSEAMYMKLTEFVQVKKPGLEMATEQSELDLSYGMRYQDVKIPEAYERLILDTIRGDQQHFVRRDELKAAWQIFTPLLHDIDAGKLKAVSYKPGSRGPKEADELSEKVGYMQTHGYIWIPPTLA

SEQ ID NO: 17233 - DNA, 1530 bp, Triticum aestivum
  CDS (1)..(1530)
atggcgggaactgactcctcggcgtcatcgagacaaagcagtttcaactcattagcaaaggacctagaacttcctttggagcaagggtgcctcaccatcgttgtacttggggcttctggagatcttgccaagaagaaaacgttcccggcactctaccacctttttgagcaggggttcttacaatctggtgaagtgcatatagtggggtatgcgagaacaaatctttctgatgatgggttgagagggcgcatccgtgtataccttaaaggagcctcagaggaacatgtttcagaattcttgcaattgataaaatatgtcagtggttcctatgacagtggagaaggttttgaaaaactgaacaaggaaatatcagattatgagatgtcaaacaactcaggaagctcccgtaggctcttttatttggcattgcctccatctgtctacccttcagtgtgcaaaatgatccgaacatattgcatgagtccaacttctcgcgctggatggactagagtaattgttgagaagccctttggaagggacctggactctgcagaagaattaagttcccaacttggggagctattcgaggaagatcaactctacaggattgaccactacttgggaaaagagttggtccaaaacttgcttgtgcttcgttttgcgaaccgtttgttcttaccactttggaaccgtgacaatgttgataatatacagattgtattcagggaggacttcggaactgatggacgtggaggatattttgatcaatatggaatcatccgtgatatcattcagaaccatttgttgcaggttttctgtttggttgcaatggaaaagcctgtatctcttaagcctgagcacattagagatgagaaagtcaaggttctgcaatccgtgaacccgataaaggacgaagaggtagtccttggacaatatcagggctacaaggatgaccctacagtgccagatgactctaataccccaacgtttgcatctattgtacttagggtacacaatgaaagatgggaaggtgttcctttcattcttaaagctggtaaagcattaaactcaagaaaagcagaaattcgtgtgcagttcaaggatgttcccggtgacatttttaaatgtaagaagcagggaagaaatgagtttgtcatacgcctccagccatcagaagccatgtacatgaaactaactgtgaagaaacctggattggaaatggctactgaacagagtgaacttgatctgtcatatgggatgcgttaccaagatgtcaaaattccagaggcatatgagcgcctcattttggatacaataggaggagaccagcaacactttgtgcgccgagatgagctgaaggctgcctggcagatcttcactcccttgttgcacgacatcgacgccggcaagctgaaggctgtttcatacaagcctggcagccgaggccccaaggaagctgatgaactgagtgagaaggttgggtacatgcagacccacggttacatctggataccacccacccttgcatag

SEQ ID NO: 17234 - protein, 509 aa, Triticum aestivum
MAGTDSSASSRQSSFNSLAKDLELPLEQGCLTIVVLGASGDLAKKKTFPALYHLFEQGFLQSGEVHIVGYARTNLSDDGLRGRIRVYLKGASEEHVSEFLQLIKYVSGSYDSGEGFEKLNKEISDYEMSNNSGSSRRLFYLALPPSVYPSVCKMIRTYCMSPTSRAGWTRVIVEKPFGRDLDSAEELSSQLGELFEEDQLYRIDHYLGKELVQNLLVLRFANRLFLPLWNRDNVDNIQIVFREDFGTDGRGGYFDQYGIIRDIIQNHLLQVFCLVAMEKPVSLKPEHIRDEKVKVLQSVNPIKDEEVVLGQYQGYKDDPTVPDDSNTPTFASIVLRVHNERWEGVPFILKAGKALNSRKAEIRVQFKDVPGDIFKCKKQGRNEFVIRLQPSEAMYMKLTVKKPGLEMATEQSELDLSYGMRYQDVKIPEAYERLILDTIGGDQQHFVRRDELKAAWQIFTPLLHDIDAGKLKAVSYKPGSRGPKEADELSEKVGYMQTHGYIWIPPTLA

SEQ ID NO: 17235 - DNA, 1749 bp, Solanum tuberosum
  CDS (1)..(1749)
atggtaaccctttattcttccccttccactaactgttctggggccttttcatcatactccaattcttctattgggttctacaattatcattacaacttccctatttcatccagaaagtttggttctcacaagatttctttgcaaattaatgccgttcgcatgcaagatggtgctgtagtggctcaacctagcaaaacccaagatgaaactcctttgaagaaattaaaagatggaattttgtcaaaggagcagaaacatacatttgattttgattgcaacaaagataaatcaactgtcagtattactgttgttggtgcttcaggagatcttgccaaaaaaaagatatttcctgcactttttgcactttattatgagggttgcttaccggagcatttcactatttttggctatgcccggagtaagatgtctgatgacgaactcaggaacatggtcagcaagacacttacttgcaggattgataagagggaaaattgtggtgaaaagatggaacagtttctagaaaggtgtttctaccatagtggacaatatgattcccaggaacactttgcagagcttgataaaaagctgaaagaacatgaggctggaaggttttccaatcgtctgttctacttgtccattccaccaaatatttttataaatgctgtacgatgtgcaagcctctctgcatcatctgctcatggatggactagagtcattgtagagaaaccctttggtcgggattctgaatcctctgctgcattaacaggagcacttaagcagtacttgaaggaagatcaaattttcaggattgatcactatttagggaaggagcttgtggaaaacctttctgtccttcgtttcttcaacttgatatttgaacccttatggtcaaggcagtatataaggaacgtgcagtttattttctctgaagattttggcactgaaggaaggggaggttattttgatcattatgggataattagagacattatgcaaaaccatttgcttcaaattcttgccctctttgccatggaaacacctgtcagtttggatgcagaagatatcaggaatgaaaaggtaaaagttctgcgttctatgagacctttacaactagatgatgttatcgtcgggcagtacaaaagtcacacaaaagggggtgttaactatcctggttataccgacgacaagactgtacccaaggacagtctaaccccaacttttgctgcagctgctcttttcatagataatgcaagatgggatggggtgcctttccttatgaaggctggaaaagctttacataccaggagtgcggaaataagagtacaattcaggcacgtgccgggaaatttatacaataagaactttggctcagatctagatcaggcaacaaacgagcttgttatccgtgttcaacctgatgaagctatatacctaaagatcaataacaaagttcctggtctaggaatgagactggatcgcagtaatcttaatctgctttactcagcaagatacgcgaaggagatccctgatgcatatgagcggctacttcttgatgccatagaaggtgaacgtaggctttttattcgcagtgatgaactggatgctgcgtggtctcttttcacaccagtgttgaaagaacttgagcataagaaaatagtaccggaaagctacccctatggaagtcgaggacctattggagcacattaccttgcagcacgatataaagtaagatggggtgatcttgcttag

SEQ ID NO: 17236 - protein, 582 aa, Solanum tuberosum
MVTLYSSPSTNCSGAFSSYSNSSIGFYNYHYNFPISSRKFGSHKISLQINAVRMQDGAVVAQPSKTQDETPLKKLKDGILSKEQKHTFDFDCNKDKSTVSITVVGASGDLAKKKIFPALFALYYEGCLPEHFTIFGYARSKMSDDELRNMVSKTLTCRIDKRENCGEKMEQFLERCFYHSGQYDSQEHFAELDKKLKEHEAGRFSNRLFYLSIPPNIFINAVRCASLSASSAHGWTRVIVEKPFGRDSESSAALTGALKQYLKEDQIFRIDHYLGKELVENLSVLRFFNLIFEPLWSRQYIRNVQFIFSEDFGTEGRGGYFDHYGIIRDIMQNHLLQILALFAMETPVSLDAEDIRNEKVKVLRSMRPLQLDDVIVGQYKSHTKGGVNYPGYTDDKTVPKDSLTPTFAAAALFIDNARWDGVPFLMKAGKALHTRSAEIRVQFRHVPGNLYNKNFGSDLDQATNELVIRVQPDEAIYLKINNKVPGLGMRLDRSNLNLLYSARYAKEIPDAYERLLLDAIEGERRLFIRSDELDAAWSLFTPVLKELEHKKIVPESYPYGSRGPIGAHYLAARYKVRWGDLA

SEQ ID NO: 17237 - DNA, 1773 bp, Dunaliella bioculata
  CDS (1)..(1773)
atgttgggtggaaggcagttgggtatggacaagctgtcccggaagctgtccggtgctcaacctgttgcgaactactcgcgtcgcccgatttcgcgcccatttcgcgcagcgcctgttcctcgagtcgcgcagaattcccaagatgctgtgacccagaatggcagcgggacaagcgaggcacccacctcctggcagaacccagcactcaagaaggccatccccactgtggtttctctctcagatgaggctgcagccatggcagctgatgactggagccaatctagcttgtcggttgttgtggtgggcgccagcggcgacctggccaagaagaaaatttttcctgcactttttgcccttttctatgagggcctgctgccaccggacttccagctctttggatatgcacgcagcaagatgactgatgaggagttccgagacctcatcggcaacaccctgacgtgccgcattgatgccaggtcccgctgcgaagactcccaggccgccttcttgtcgcgctgcttctactgcccaggccagtatgatgcccctgagggctatgccaacttggacaagaagtgcaaggagcaggaggccctgactggcaagatggtagccaaccgcatgttcttcctgtccatccctcccaacgtgtttgtgcaagcagcaggcggcgcagccgacaactgctcttctcccaccggctggacgcgcgtcattgtggagaagccctttggcagggacagcgccagcagtgctgagcttggcaggggtctggccaggcatttgacagaggaccagatctaccgtattgaccactacctggggaaggagctgattgagaacctgacagtgctgcgcttttcaaaccttgtgtttgagcccttgtggagcaggcagtacatccgcaatgtgcaggtgatcttctcagaagactttggcactgaaggccgcggaggctacttcgaccggtacggcatcatccgcgatgtcatgcagaaccacttgctccagattgtggcattgttcgccatggagccaccggtgtccctggatggagaggccatccgtaatgagaaggtcaaggtcctgcagtctatgtctcaagtggcgctggaggatgtcacactgggccaataccgcggcaggtctggcgctggccgttccggtggtgctgatttgcctggctacctggatgatgcaacagtgcccaagggctccctgtgccccacctttgctgccattgcgctgcacatcaacaatgcacgctgggatggtgtgccattcctgctcaaggctggcaaggcgctgcacacgcgcggcgctgagatccgtgtgcagttcaggcatgtgcccggcaacattttcaagcacaaagtgggccccaacatcgacatgaccaccaacgagcttgtgatccgcattcagccgcgggagtccatctacctcaagatcaacaacaaggtccctggcttgggcatgcgcctggataccaccaagctggacctggtgtacaacgacgcatactccaaggagttgccagatgcgtatgagcgcctcctgttggatgtggtgaacggcgataagcgcttgttcatccgcgatgatgagctggagcaggcctggaacatctttaccccagtgctgcatgagatcgagcgcagaaaggtggcacctgagctgtacccctacggcagcagaggccctgtgggggcacactacttggctgccaagtacaacgtgcgctggggagacttgacggaggatgagatctga

SEQ ID NO: 17238 - protein, 590 aa, Dunaliella bioculata
MLGGRQLGMDKLSRKLSGAQPVANYSRRPISRPFRAAPVPRVAQNSQDAVTQNGSGTSEAPTSWQNPALKKAIPTVVSLSDEAAAMAADDWSQSSLSVVVVGASGDLAKKKIFPALFALFYEGLLPPDFQLFGYARSKMTDEEFRDLIGNTLTCRIDARSRCEDSQAAFLSRCFYCPGQYDAPEGYANLDKKCKEQEALTGKMVANRMFFLSIPPNVFVQAAGGAADNCSSPTGWTRVIVEKPFGRDSASSAELGRGLARHLTEDQIYRIDHYLGKELIENLTVLRFSNLVFEPLWSRQYIRNVQVIFSEDFGTEGRGGYFDRYGIIRDVMQNHLLQIVALFAMEPPVSLDGEAIRNEKVKVLQSMSQVALEDVTLGQYRGRSGAGRSGGADLPGYLDDATVPKGSLCPTFAAIALHINNARWDGVPFLLKAGKALHTRGAEIRVQFRHVPGNIFKHKVGPNIDMTTNELVIRIQPRESIYLKINNKVPGLGMRLDTTKLDLVYNDAYSKELPDAYERLLLDVVNGDKRLFIRDDELEQAWNIFTPVLHEIERRKVAPELYPYGSRGPVGAHYLAAKYNVRWGDLTEDEI

SEQ ID NO: 17239 - DNA, 1551 bp, Mesembryanthemum crystallinum
  CDS (1)..(1551)
atggggtcaggcgagtggcacgtggaaaaaagatcgagcttgaagagtgaattatctaaagacataggagagtctgaaagttcacaagaatgtggctctctttctatcattgttctaggtgcctctggtgatcttgccaagaagaagaccttccctgctctgtttaatctttaccgccagggatttcttcctcccagtgaggttcacatatttggttatgcaaggtcaaagatgacagatgatgacttgagagatcgcatacgtggacatctgattcccaggaatgtaacagcggagatatctgaggatgttttgaactttctgcatctgattaaatatgttagtgggtcttatgacactgaggacggttttcacttgttagatgatgaaatatcaaagtatgagtgtcaaaagaacagccaggaacattctaagagactcttttatcttgctcttcctccatcagtatatccatcagtctgcagaatgataaagctttgctgtatgaataaatctgatcttgggtggactcggattgttgttgagaagccttttggaagagacttagaatcagcagaacaacttagtgctcagattggagagttgtttgatgagtcacagatttaccgaattgatcactatttggggaaggagttggtgcagaacttgctggtgatgcgcttcgcgaatcgtctttttctacctctctggaatcgggacaatattgcgaatgtgcagattgtcttcagggaagattttggaacacaaggtcgtggtgggtactttgatcaatatggaataatccgtgacattattcaaaaccaccttttgcaggttctttgtttagttgccatggagaagcctgtctcaatcaaaccagagcacattcgtgatgagaaagtgaaggttctccaagctgttaatctaataaaagatgaagaggttgttcttgggcaatatgaaggctacaaggatgatccaactgttcccgaagactcaaacactccgacatttgcgactatggttttgcggatacacaatgaaagatgggaaggtgttccatttatactaaaggcagggaaagcattgaattcacgaaaagcagaaatacgtgttcagttcaaagatgttcctggtgacatattcaaatgtaacaagcaggggagaaatgagtttgtaatacggctacagccttcagaagcactctatatgaagcttacggtgaagcagcctgggcttgaaatgtcaactatacaaagtgagctggatttgtcgtatgggcagcggtatcagggagtcgttattccagaggcctatgagcgtctgattctggacacgataaaaggcgatcaacaacattttgtccgtagagatgagttgaaggctgcgtgggagatctttactcctcttctacacagaattgataagggagaattcaagccaatttcatacaagcctggaactcgaggcccagcagaagcagatgagctactggcaaaggctggatacgttcaaactcatgggtacatctggattccacccaccttatag

SEQ ID NO: 17240 - protein, 516 aa, Mesembryanthemum crystallinum
MGSGEWHVEKRSSLKSELSKDIGESESSQECGSLSIIVLGASGDLAKKKTFPALFNLYRQGFLPPSEVHIFGYARSKMTDDDLRDRIRGHLIPRNVTAEISEDVLNFLHLIKYVSGSYDTEDGFHLLDDEISKYECQKNSQEHSKRLFYLALPPSVYPSVCRMIKLCCMNKSDLGWTRIVVEKPFGRDLESAEQLSAQIGELFDESQIYRIDHYLGKELVQNLLVMRFANRLFLPLWNRDNIANVQIVFREDFGTQGRGGYFDQYGIIRDIIQNHLLQVLCLVAMEKPVSIKPEHIRDEKVKVLQAVNLIKDEEVVLGQYEGYKDDPTVPEDSNTPTFATMVLRIHNERWEGVPFILKAGKALNSRKAEIRVQFKDVPGDIFKCNKQGRNEFVIRLQPSEALYMKLTVKQPGLEMSTIQSELDLSYGQRYQGVVIPEAYERLILDTIKGDQQHFVRRDELKAAWEIFTPLLHRIDKGEFKPISYKPGTRGPAEADELLAKAGYVQTHGYIWIPPTL

SEQ ID NO: 17241 - DNA, 1731 bp, Arabidopsis thaliana
  CDS (1)..(1731)
atggcgacacattctatgatcattccttctccttcttcttcttcctcgtctctcgctactgctgcgtctccgtttaaagagactctaccactctttagtagatctctcacattcccgagaaaatccttgttttctcaggttcgcttgagattcttcgccgagaaacattctcagcttgatacttcaaatgggtgtgccactaatttcgcttctttacaagattctggagatcaacttacagaggaacatgttacaaaaggagagtctactcttagtattacagttgttggagcgtcaggggacttagccaagaagaagatatttcctgcattgtttgctctcttttatgagggttgtcttcctcaggacttttctgtttttggttatgctcggactaaactcactcatgaagagcttcgtgacatgattagtagtactttaacttgccggattgatcagagggaaaaatgtggggataagatggagcagttcttgaaaagatgcttttaccattcgggtcagtataactcggaagaggattttgcggaactaaacaagaagctcaaagagaaagaggcaggaaagatatcaaacaggctgtactatttgtcgatacccccaaacatattcgttgatgtggttaggtgtgcaagtcttagagcctcctcagagaatggctggacaagggtcattgtggaaaagccatttggtcgtgactctgaatcatccggagagttaactagatgtctgaaacagtatcttacagaggagcaaatcttcaggattgatcactatttgggaaaggagcttgttgagaacctttcagtgctccgattctcaaatcttgttttcgagcctctgtggtcaagaaattacatacgcaacgttcagctgattttttctgaggatttcggaacagaagggcgtggaggttactttgatcaatatggaatcatacgagacatcatgcaaaaccatctcttgcaaatacttgcactttttgcaatggagacgccagtgagcttagatgctgaggacataagaagtgaaaaggtgaaagttttgagatcaatgaaaccgttgcggcttgaagatgtggttgttggtcaatacaaaggccataacaagggaggaaaaacttatccaggttatacagacgatccaacggttccaaatcacagtctcactcctacatttgctgcagcagccatgttcatcaacaatgcgagatgggacggtgttccttttcttatgaaagctggaaaagctctccataccagaggagcagagatcagagttcagttcagacatgtcccaggaaacttgtacaagaaaagttttgctactaatttagacaatgcaacaaatgaactagtgattagagttcagcctgatgaagggatatacctgaggatcaacaacaaagttcctggtcttggaatgagactagatcgcagcgaccttaaccttctatatcgatccaggtatccaagagagataccagatgcatatgaaagactgcttctcgatgcaatcgaaggagagaggaggttgtttatcagaagtgatgagctagatgcagcatgggatctattcacaccggctttgaaggaactagaggagaagaaaatcattcctgagctctatccatatggaagcagaggtcctgttggtgcacattaccttgcatctaagtacaatgtgagatggggagatcttggagaagcttaa

SEQ ID NO: 17242 - protein, 576 aa, Arabidopsis thaliana
MATHSMIIPSPSSSSSSLATAASPFKETLPLFSRSLTFPRKSLFSQVRLRFFAEKHSQLDTSNGCATNFASLQDSGDQLTEEHVTKGESTLSITVVGASGDLAKKKIFPALFALFYEGCLPQDFSVFGYARTKLTHEELRDMISSTLTCRIDQREKCGDKMEQFLKRCFYHSGQYNSEEDFAELNKKLKEKEAGKISNRLYYLSIPPNIFVDVVRCASLRASSENGWTRVIVEKPFGRDSESSGELTRCLKQYLTEEQIFRIDHYLGKELVENLSVLRFSNLVFEPLWSRNYIRNVQLIFSEDFGTEGRGGYFDQYGIIRDIMQNHLLQILALFAMETPVSLDAEDIRSEKVKVLRSMKPLRLEDVVVGQYKGHNKGGKTYPGYTDDPTVPNHSLTPTFAAAAMFINNARWDGVPFLMKAGKALHTRGAEIRVQFRHVPGNLYKKSFATNLDNATNELVIRVQPDEGIYLRINNKVPGLGMRLDRSDLNLLYRSRYPREIPDAYERLLLDAIEGERRLFIRSDELDAAWDLFTPALKELEEKKIIPELYPYGSRGPVGAHYLASKYNVRWGDLGEA

SEQ ID NO: 17243 - DNA, 2112 bp, Arabidopsis thaliana
  CDS (142)..(1932)
gatctcaaaaggttctcttatttgcagtatcgccccttaaatcctttttcgatgtttcttatgttcatcattattttttaactaaaaatctcatctttagacaacaattcaatttgccatctctctgttgtatctttgacgatggcggctttgtcttcctccgtcaccacccgatcatatcattccggttatttggcttctttctcaccggttaacggtgaccgacatcgatcactctcgttcctgtctgcttctcctcaaggattgaatcctcttgacctctgtgttagattccagaggaagtctggtcgtgcttctgtctttatgcaagatggtgcaatagtcactaattcaaattcatcagagagtaaaacttctcttaagggattgaaagatgaggtgctatcagctttatctcaagaagcagccaaggttggagtagaatctgatggtcaaagccagtcaacagttagtattacggtggttggagcctctggtgatcttgctaagaagaagattttcccggctcttttcgccctttactatgaaggttgtctccctgagcattttacaatatttggatattctaggagtaagatgacagatgttgaacttagaaacatggtcagcaaaaccctcacttgcagaattgataagagggcaaactgtggtgaaaagatggaagaatttctcaagagatgtttttaccattctggtcagtatgattctcaggaacattttactgaattggataagaagctcaaggaacatgaggctggaagaatctcaaaccgcctcttttatttgtctatccctccaaatatatttgtagatgctgtgaaatgtgcaagcacttctgcttcatctgtcaatggatggactagggttatcgtcgagaaaccttttggtcgagattctgaaacctcggctgctttaacgaaatccctcaagcagtatttggaggaagatcaaatttttaggatagaccattacctaggaaaggagctagtcgagaacttatctgttcttcgattctcaaaccttatatttgagccgctatggtcaaggcagtacataaggaacgtgcaatttatattttctgaggatttcggcactgaaggacgtggagggtactttgacaattacggaataataagagatataatgcagaatcatctgcttcaaatcttagccctctttgccatggaaacgcctgttagtttggatgcagaggatatcagaaatgaaaaggttaaggtgttacgttcaatgaggccaattcgagttgaagatgtggtaataggacaatacaagagccacacaaagggaggagtcacatatcctgcctacaccgatgataaaactgtaccaaaaggtagtctgactccaacatttgcagctgctgctcttttcatcgacaatgcaagatgggacggtgtgccctttttaatgaaagcgggcaaagcactacacaccaggagtgcagagataagggtgcagttcaggcatgttccggggaatttgtataaccggaatactggttctgatcttgatcaagctacaaatgagcttgtgatccgtgtccaaccagatgaagcaatctatttgaaaatcaacaacaaggtccctggtttaggaatgagattagatcgcagtaacttgaatcttctatactcagcaaggtattcaaaggagataccagatgcatatgagaggcttctgttagatgcaatagaaggagaaagaagattgttcataagaagtgacgagcttgatgcagcttggtcgctattcactccattgcttaaagagattgaagagaagaagagaatccctgagtactatccttatggtagccgtggtcctgttggtgctcattatctagctgctaaacacaaggtgcaatggggtgacgtcagtattgaccagtaaaacattttcttgtttgtattctcttttttttacattgataatagatttatctaggattcaagctttttctacgcctctttttacagctttaatttgtgcaatttggttatgtaccatttaataaataaataaaccaaaggggtttctcttattctctacaaggaaaatgtcttcttttta

SEQ ID NO: 17244 - protein, 596 aa, Arabidopsis thaliana
MAALSSSVTTRSYHSGYLASFSPVNGDRHRSLSFLSASPQGLNPLDLCVRFQRKSGRASVFMQDGAIVTNSNSSESKTSLKGLKDEVLSALSQEAAKVGVESDGQSQSTVSITVVGASGDLAKKKIFPALFALYYEGCLPEHFTIFGYSRSKMTDVELRNMVSKTLTCRIDKRANCGEKMEEFLKRCFYHSGQYDSQEHFTELDKKLKEHEAGRISNRLFYLSIPPNIFVDAVKCASTSASSVNGWTRVIVEKPFGRDSETSAALTKSLKQYLEEDQIFRIDHYLGKELVENLSVLRFSNLIFEPLWSRQYIRNVQFIFSEDFGTEGRGGYFDNYGIIRDIMQNHLLQILALFAMETPVSLDAEDIRNEKVKVLRSMRPIRVEDVVIGQYKSHTKGGVTYPAYTDDKTVPKGSLTPTFAAAALFIDNARWDGVPFLMKAGKALHTRSAEIRVQFRHVPGNLYNRNTGSDLDQATNELVIRVQPDEAIYLKINNKVPGLGMRLDRSNLNLLYSARYSKEIPDAYERLLLDAIEGERRLFIRSDELDAAWSLFTPLLKEIEEKKRIPEYYPYGSRGPVGAHYLAAKHKVQWGDVSIDQ

SEQ ID NO: 17245 - DNA, 1800 bp, Arabidopsis thaliana
  CDS (1)..(1800)
atgtcgtctctctcctgccctacctaccgctcccgcacttcgtcttcgtctcctttcttgtcgaatcatcatcattcttcgctgatcaatgttgttgacccacgccgctcactctccttccactacgcttctcctcaggggcttaatctagctgagctctgtgttgttagatcgcagaggaggtccgttcagagttctgttgtcgtgcaagatggatcagtagccaccgagtcaagctcgtccgaggaggcgaaagatgtaggggtgttaacgattccttcacttgaagctgacaaggttgtagcagagtctgatggcggtgaacaactttcaacagttagtatcacggtggtgggagcttctggtgatcttgccaagaagaaaatattcccagctcttttcgcactttactatgaaggctgtcttcctgagcattttaccatttttggctatgcaaggagtaagatgacagatgctgaacttagagttatggtcagcaaaacattgacatgtagaattgataagagggcaaactgcggtgaaaagatggaagagtttctcaagagatgtttttaccattcgggtcagtatgattctcaggaacattttgttgcattggacgagaagctcaaggagcatgagggtggaagactttcgaaccgtcttttctatctttcaatccctccaaatatctttgttgacgcggtgaaatgtgcaagctcatctgcttcatctgtcaatggatggactagggtcattgtcgagaaaccttttggccgggactccaaaacctcggctgcattaacaaagtctcttaagcagtacctggaggaagaccaaatatttaggatagaccattacttagggaaggagctggttgagaacttgtcggttcttcgattctcaaatcttatatttgaaccgctatggtcaaggcagtatataaggaacgtgcaattcattttttctgaggatttcggcactgaaggacgcggagggtacttcgacaattacggaataataagagatataatgcagaatcatctgcttcagatattagctcttttcgccatggaaacacctgtgagtttggatgcagaggatatcagaaatgaaaaggtaaaggtactacgttcaatgagaccaataaaacttgaagatgtggtgataggacagtacaagagccacagcataggaggagtcacttatccaagctatactgatgataaaactgtgccaaaaggtagtctgaccccgacatttgcagctgctgcactcttcatcgacaatgcaagatgggatggtgtaccttttctaatgaaagctgggaaagcactaaacacccgaagtgcggagataagagtccagttcaggcatgtgcctggaaatttatataaccggaattctggtactgatcgtgatcagaccacaaatgagcttgtcatccgcgtccaacctgatgaagctatctatttgaaaatcaacaacaaggtccctggtttaggaatgagattagatcagagtaacttaaatcttctctattcagcaaggtattcaaaggagattccagatgcatatgagaggcttttgttagatgcgatcgaaggtgaacgcagattgttcataagaagcgatgaacttgacgctgcttgggcgcttttcactccattgctcaaagagatagaagaaaagaagacaaccccagaattctatccttacggcagtcgtggtccagtcggtgcccattatctagccgcaaaacacaaggtccaatggggagacctaagtcttgatcagtga

SEQ ID NO: 17246 - protein, 599 aa, Arabidopsis thaliana
MSSLSCPTYRSRTSSSSPFLSNHHHSSLINVVDPRRSLSFHYASPQGLNLAELCVVRSQRRSVQSSVVVQDGSVATESSSSEEAKDVGVLTIPSLEADKVVAESDGGEQLSTVSITVVGASGDLAKKKIFPALFALYYEGCLPEHFTIFGYARSKMTDAELRVMVSKTLTCRIDKRANCGEKMEEFLKRCFYHSGQYDSQEHFVALDEKLKEHEGGRLSNRLFYLSIPPNIFVDAVKCASSSASSVNGWTRVIVEKPFGRDSKTSAALTKSLKQYLEEDQIFRIDHYLGKELVENLSVLRFSNLIFEPLWSRQYIRNVQFIFSEDFGTEGRGGYFDNYGIIRDIMQNHLLQILALFAMETPVSLDAEDIRNEKVKVLRSMRPIKLEDVVIGQYKSHSIGGVTYPSYTDDKTVPKGSLTPTFAAAALFIDNARWDGVPFLMKAGKALNTRSAEIRVQFRHVPGNLYNRNSGTDRDQTTNELVIRVQPDEAIYLKINNKVPGLGMRLDQSNLNLLYSARYSKEIPDAYERLLLDAIEGERRLFIRSDELDAAWALFTPLLKEIEEKKTTPEFYPYGSRGPVGAHYLAAKHKVQWGDLSLDQ

SEQ ID NO: 17247 - DNA, 1878 bp, Arabidopsis thaliana
  CDS (1)..(1878)
atgtctctctccagttgcttgcttcccttttctcaatcagcgacggctccgtcttcctccgtctgctcttgccatctcgccgcctctttttctaattttccggtttcgtcaagagactatagtttctccagaagtggaagccttgttctcaacggaggaggctcgaatctctgccggagattctgtggtttgaaactgtggatacttaagagcttgaatcgtagacaaggcaacaacagaaaacatcagcctgtaaacgagcttacaacacactcaaagcacactttcctcagcgatgatgaacgaggttttgctgaagaaactagagctgaagatttacgaccagaagagaatattctgggaacggatttgaatgatgggtttcacaatgttggagacttaccacctgtgtcaaaacaactctcggatgatctttcagatgttcgaagaagggcctcactttgcattgctgttgtaggagccactggtgagctagcaagagggaagattttcccggcattgtttgcgttgtattatagcggctaccttcctgaggatgttgctatatttggggtttcaagaaagaatctgacagatgaagacctcagatccatcattgcatcaacgctgacttgccgtgttgatcatcaggagaattgtgggggcaagatggatgcatttcagagtagaacatactatatcaatggaggttataataacagggatgggatgtcccgacttgccgagagaatgaaacagattgagggagaatcagaagcaaatagaatcttttacctctcagtacctcaagaagctctggtggatgtggcatgcaccattggagataacgctcaggcaccacgaggctggactcgaataatagttgagaaaccttttggttttaactcacattcgtctcatcagttaacaaagtcacttctctctaagtttgaagagaagcaaatctacaggatagatcacatgttaggaagaaacctcattgaaaatctgacagtgttaaggttttcaaatctagtttttgaaccactatggaacagaacatacatacgcaatatacaggttattatatcagaatcaattgcgcaaacagaaaagttttctgatggatatggaataatacgggacatagtgcacagccatatacttcagacaatcgcattacttgccatggaacctccgataagtctcgatggtgaagatatccgaaatgaaaaggtgaaggttttaagatcaattcgcaagatagacccgcgtgatgtcatccttggccagtataaatccagttcccgagacaagaacggtgtgatcttgaacggtgtagaccctacatattgtgcagcagccttgtatattgataatgcacgttgggatggtgtacctttccttgtaagagttggcactggcctcattaaacacagagtggagattcatgtgcaattccggcatgttcctggaaacctataccgagaaaatattggaataaacatagatttggggacaaatgagcttattctacgtgacgaacctgatgaggccatcctggtgaaaatcaacaacaaggttcctggtttaggtcttcagctagacgcttctgaacttaacttgctctataaagacaggtataaaaccgaagtaccagactcatatgaacacctaattcatgatgtaattgacggagacaatcatctgttcatgagaagcgatgaggttgcagcagcatggaacattcttagtccggttctagaagagatagacaagcatcacacagctccggagttgtatgaatttggtggacgaggaccagttgcggcatactatctttgggccaagcacggtgtcccatgggcagatgactga

SEQ ID NO: 17248 - protein, 625 aa, Arabidopsis thaliana
MSLSSCLLPFSQSATAPSSSVCSCHLAASFSNFPVSSRDYSFSRSGSLVLNGGGSNLCRRFCGLKLWILKSLNRRQGNNRKHQPVNELTTHSKHTFLSDDERGFAEETRAEDLRPEENILGTDLNDGFHNVGDLPPVSKQLSDDLSDVRRRASLCIAVVGATGELARGKIFPALFALYYSGYLPEDVAIFGVSRKNLTDEDLRSIIASTLTCRVDHQENCGGKMDAFQSRTYYINGGYNNRDGMSRLAERMKQIEGESEANRIFYLSVPQEALVDVACTIGDNAQAPRGWTRIIVEKPFGFNSHSSHQLTKSLLSKFEEKQIYRIDHMLGRNLIENLTVLRFSNLVFEPLWNRTYIRNIQVIISESIAQTEKFSDGYGIIRDIVHSHILQTIALLAMEPPISLDGEDIRNEKVKVLRSIRKIDPRDVILGQYKSSSRDKNGVILNGVDPTYCAAALYIDNARWDGVPFLVRVGTGLIKHRVEIHVQFRHVPGNLYRENIGINIDLGTNELILRDEPDEAILVKINNKVPGLGLQLDASELNLLYKDRYKTEVPDSYEHLIHDVIDGDNHLFMRSDEVAAAWNILSPVLEEIDKHHTAPELYEFGGRGPVAAYYLWAKHGVPWADD

SEQ ID NO: 17249 - DNA, 1551 bp, Arabidopsis thaliana
  CDS (1)..(1551)
atgggttctggtcaatggcatatggagaagaggtctactttaaagaatgattcgtttgtaaaagaatacaatccagtcacggaaactgggagtctctctatcattgttcttggtgcttctggtgatcttgctaagaagaagacttttcctgcacttttcaatctatttcatcagggatttcttaatccagatgaagttcatatatttggatatgcaaggagtaagattactgatgaggagcttagagataaaatccgcggatatcttgttgatgagaagaatgcatctaagaaaacagaagctttgtccaagtttctaaagctgattaagtatgtgagtggaccttatgattctgaggaagggtttaagagattagacaaggcgattttggagcacgagatatctaaaaagactgctgaaggatcttcgaggagattgttttatcttgcacttcctccgtctgtataccctcctgtaagcaagatgatcaaggcatggtgcactaacaaatctgatcttggtggatggactaggattgttgttgagaaaccatttggaaaggatttggaatctgcagagcagctgagttctcagattggagccttgtttgaagaaccacagatttatcgtattgatcactatctgggaaaagagttagttcaaaacatgttggttcttcggtttgccaatcgcttgtttttgccactatggaaccgcgacaatattgcaaacgtacagatcgttttcagagaagattttggaactgaaggtcgcggtggatattttgatgaatacggaatcattcgtgatattattcaaaaccacttgctccaggttctttgccttgtcgccatggagaaaccaatctctcttaaacccgagcacatccgggatgagaaagtgaaggttcttcaatctgtgattcccataaaagatgaagaggtggttcttggacaatatgaaggatatagagatgatccaactgttccaaatgactcaaacactccaacgtttgccacaacaattcttcgcattaacaatgaaagatgggaaggtgttccttttatactgaaggccggaaaggcaatgagttcaaagaaggcagatattcgcattcagtttaaagatgttcctggcgacatattcaaatgtcaaaaccaagggaggaacgagtttgttatacgcttgcagccttcagaggccatgtacatgaagctaactgtgaagcaaccgggtctggagatgcaaaccgtgcagagtgaactagacctatcgtacaagcagcgttaccaagatgtctcaattccagaggcttacgaacgccttattcttgacacaatcagaggcgaccaacaacactttgttcgcagagacgaattaaaggcagcttgggaaatcttcactccactgcttcacaggatcgacaagggagaagtgaaatcggtcccatacaaacaaggtagccgtggcccagcggaagcagatcagctacttaagaaagctggttatatgcagactcatggctacatttggatccctcctacattgtaa

SEQ ID NO: 17250 - protein, 516 aa, Arabidopsis thaliana
MGSGQWHMEKRSTLKNDSFVKEYNPVTETGSLSIIVLGASGDLAKKKTFPALFNLFHQGFLNPDEVHIFGYARSKITDEELRDKIRGYLVDEKNASKKTEALSKFLKLIKYVSGPYDSEEGFKRLDKAILEHEISKKTAEGSSRRLFYLALPPSVYPPVSKMIKAWCTNKSDLGGWTRIVVEKPFGKDLESAEQLSSQIGALFEEPQIYRIDHYLGKELVQNMLVLRFANRLFLPLWNRDNIANVQIVFREDFGTEGRGGYFDEYGIIRDIIQNHLLQVLCLVAMEKPISLKPEHIRDEKVKVLQSVIPIKDEEVVLGQYEGYRDDPTVPNDSNTPTFATTILRINNERWEGVPFILKAGKAMSSKKADIRIQFKDVPGDIFKCQNQGRNEFVIRLQPSEAMYMKLTVKQPGLEMQTVQSELDLSYKQRYQDVSIPEAYERLILDTIRGDQQHFVRRDELKAAWEIFTPLLHRIDKGEVKSVPYKQGSRGPAEADQLLKKAGYMQTHGYIWIPPTL

SEQ ID NO: 17251 - DNA, 1548 bp, Arabidopsis thaliana
  CDS (1)..(1548)
atgggatctggtcaatggcacgttgagaaaaggtctacgtttaggaatgattcgtttgtgagagaatatggtatagttccagaaactggttgtctttcaatcatagttcttggtgcttctggtgatcttgctaagaagaagacttttcctgctctttttaacttataccgtcagggatttctcaatccagatgaagttcatattttcgggtatgcgaggactaagatttctgatgaagagctgagagataggattcgtggatatcttgttgatgagaagaatgctgagcaagctgaagctttgtcaaagtttctgcagctgattaagtatgtgagtggcccttatgatgctgaggaggggttccagagattagacaaggcaatttcagagcacgaaatctccaaaaatagtactgaagggtcttccagaagactgttttatcttgcacttccaccgtctgtttatccttctgtatgcaagatgatcaagacgtgctgcatgaacaaatctgatcttggtggatggacacggattgttgtggagaagccatttggcaaggaccttgaatctgcagagcaactgagttctcagattggagagttatttgatgaatcacagatctatcgtatagaccattatcttgggaaggaattagttcaaaacatgttggtcctccggtttgcaaatcgctttttcttgccactttggaaccgtgacaatatcgagaacgtgcagattgttttcagggaagattttggaactgaagggcgtggcggatattttgacgaatatggaataatccgtgatattattcaaaaccatctgctacaggttctttgccttgttgccatggagaaaccaatatctcttaaacctgagcatatccgggatgagaaagtgaaggtgcttcaatctgtggttccgataagcgatgacgaggtagttcttggacaatacgaaggatatagggatgatgatactgttccaaacgactcaaacactccaacatttgccacaacaatccttcgcatacacaacgaaagatgggaaggtgttccatttatattaaaggccggaaaagcgttgaattcaaggaaggcagaaattcgcattcaattcaaggatgtcccaggcgacatattcagatgtcaaaagcaaggaaggaacgagtttgtgatacgcttgcaaccttcagaggcaatgtacatgaaactaactgttaagcaaccaggtctagatatgaatactgtgcaaagtgaactagacttgtcgtatgggcaacggtatcaaggtgtcgctatccctgaggcatacgagcgcttaattcttgacacaatcaaaggcgatcaacaacatttcgttcgtagagacgaattaaaggttgcgtgggagatcttcacgccgctactccacaggatcgacaaaggagaagtaaagtcaatcccatacaaaccaggaagccgaggaccgaaagaagctgatcagctactagagaaagctggttatcttcagactcacggctatatctggatccctcctacactataa

SEQ ID NO: 17252 - protein, 515 aa, Arabidopsis thaliana [sequence omitted]

SEQ ID NO: 17253 - DNA, 1734 bp, Solanum tuberosum
  CDS (1)..(1734)
atgggtgtgcaattgagattgaacccttgttcttcatcttcagctgcaacttctccttcaactttccataatgggacaccatatttctgcaaaaagtttaactttttaccatttagaacccaacccctcaattgggtatctggaatttactcaagaatccaaccaagaaagcattttgaagtcttttcctcaaatgggtttccacttaatgctgtgtctgtgcaagatgtacaagtgcctttgacagagttaggaagtggagataccactgtcagcataactgttattggagcttcaggtgacctagccaagaagaagattttaccagctttatttgctcttttctatgaagattgtctgcctgagaattttgtagtttttggctactcacgaacaaaattgagtgatgaagagctgagaaatatgatcagtacaaccttaacttgtcgaattgataagagagagaattgcgatgccaaaatggagcattttctggaaagatgcttttatcattcgggtcagtacaattctgaggatgattttgcagaactggattacaaattaaaggaaaaggagggttgtagggtttctaataggttgttttacttatcaatacctccaaatatattcgtggatgtggtgcgatgtgcaagtcttaaagcttcttcaacaagtgggtggacaagggtcattgttgagaaaccatttggtcgtgatttagaatcatctagtgagctgaccagatccctaaagaagtacctaactgaggagcaaattttccgaattgaccattacttgggaaaggaacttgttgagaatctctcagttcttcggttctcgaatcttgtctttgagcctctttggtccagaaactacatccgcaatgtccaatttatattttccgaagattttggtaccgagggacgaggagggtactttgaccactacggcatcatccgtgatattatgcaaaatcatctccttcaaatattagcattgtttgctatggaaacacctgtcagcttggatgctgaggacatcagaaatgagaaggttaaagttttaaggtcaatgaggccattgcaacttgaagatgttgttcttggacagtataagggtcatagcaatggtgctaaatcatatccagcttacacagatgatccaactgtgccaaatggcagtatcactccaacattttctgctgctgcactcttcattgataatgcacgttgggacggggttcctttcctcatgaaagcaggaaaagctctccatacgaagagggcagagatcagggtccagttcagacatgttcccggaaatttgtacaaaaggaactttggaactgacatggataaagcaaccaatgagctagttctgcgcctacaacctgatgaagccatatatctgaaaattaacaacaaggtccctggtcttgggatgagacttgaccggagtgaccttaatcttctttataaagcaaagtatcgaggtgaaataccagatgcatatgagcggcttttgttagatgcaatagaaggagagcgaagattgttcataagaagcgatgaacttgatgctgcatgggctctatttacaccgttgctgaaggagctggaagagaagaagattgcaccagagctttatccatacggaagtagggggccagtgggagcacattatctagctgcaaagcacaacgttcgttggggagatctatctggtgatgattga

SEQ ID NO: 17254 - protein, 577 aa, Solanum tuberosum
MGVQLRLNPCSSSSAATSPSTFHNGTPYFCKKFNFLPFRTQPLNWVSGIYSRIQPRKHFEVFSSNGFPLNAVSVQDVQVPLTELGSGDTTVSITVIGASGDLAKKKILPALFALFYEDCLPENFVVFGYSRTKLSDEELRNMISTTLTCRIDKRENCDAKMEHFLERCFYHSGQYNSEDDFAELDYKLKEKEGCRVSNRLFYLSIPPNIFVDVVRCASLKASSTSGWTRVIVEKPFGRDLESSSELTRSLKKYLTEEQIFRIDHYLGKELVENLSVLRFSNLVFEPLWSRNYIRNVQFIFSEDFGTEGRGGYFDHYGIIRDIMQNHLLQILALFAMETPVSLDAEDIRNEKVKVLRSMRPLQLEDVVLGQYKGHSNGAKSYPAYTDDPTVPNGSITPTFSAAALFIDNARWDGVPFLMKAGKALHTKRAEIRVQFRHVPGNLYKRNFGTDMDKATNELVLRLQPDEAIYLKINNKVPGLGMRLDRSDLNLLYKAKYRGEIPDAYERLLLDAIEGERRLFIRSDELDAAWALFTPLLKELEEKKIAPELYPYGSRGPVGAHYLAAKHNVRWGDLSGDD

SEQ ID NO: 17255 - DNA, 1725 bp, Spinacia oleracea
  CDS (1)..(1725)
atggaggaacttgtttcttgccaccatcttccattattatgcctccaaagctctgttcctccaaatgggtgtctcacattctttcaagattctgcctgccaaaggtgttcccattctgaattttcaaatgggcatcctttaaatgatgtctctcttcaaaatgatgtggctgtaaacccaattgttgcaaaaagtattgatccgtcagcagatcttcagttgcttcccctattggagtccgtcaaagaagagcccacactgagcataattgtagttggtgcctcaggagatcttgccaaaaagaagatatttcctgccctttttgctctcttttatgaaaactgtcttcctgagaacttcacagtctttggtttttcacgaacggaaatgaatgatgaagagctgcggactatgatcagtaaaaccttaacctgtagaatagaccagagggaaaactgtggtgaaaaaatggatcattttttgcaaagatgcttttaccattctggtcagtataattctgaggatgacttttcaggattggactgtaagcttaaagaaaaagaggctggtagactgcaaaataggctattctacctttcaataccaccaaacatttttgtggatgtggtgagatgtgttagccatcgagcttcttctgcaagtggatggacaagggttatagtagaaaagccttttggacgtgactcggattcttctcgtgagctaactagaagcttcaagcagtacttgagcgaggaccagatattcaggattgaccattacttggggaaggagttggtggagaatttatctgttctacgcttttcaaatctagtttttgaacctctatggtcaaggaactacatccgaaatgtccagctgatattctctgaagattttggtacagagggacgagggggatactttgataattatggaataatccgagatataatgcaaaaccatcttcttcaaattctagccttgtttgcaatggagacacctgttagcttagatgctgaggacattaggaatgaaaaggtgaaagtgcttaggtcaatgaaaccacttaaactgcaagatgtggtagtgggtcagtacaagggtcacagcaaagggaacaaatcatattctggttacacagatgatccaacggtgccaaacaatagtgtgactccaacatttgcagctgcagcgttgttcatcgacaatgctcgatgggatggagttcctttcctgatgaaagctggaaaagctcttcatacgaagagagctgaaatccgagtgcagtttagacatgttcctggaaacttgtacaagaaaacttttgggacggatttggacaaagctacgaatgagcttgtactacgggtacaacctgatgaagcaatatacttgaagatcaataacaaggttcctggccttgggatgagattggaccgtactgaccttaatttgtgttacagtactaggtaccggggagaaatacctgacgcgtatgagaggctacttctggacgcaatagaaggagagcgtagattgttcatcagaagtgataaactggatgcggcttggtcattgttcacgccgttgttaaaggaactagaggagaaaaaggtagcaccagagctgtacccttacggtagcaggggaccagtcggagctcattatcttgccgccaagcacaatgtccggtggggggatcttagtggtgaagactcgtga

SEQ ID NO: 17256 - protein, 574 aa, Spinacia oleracea
MEELVSCHHLPLLCLQSSVPPNGCLTFFQDSACQRCSHSEFSNGHPLNDVSLQNDVAVNPIVAKSIDPSADLQLLPLLESVKEEPTLSIIVVGASGDLAKKKIFPALFALFYENCLPENFTVFGFSRTEMNDEELRTMISKTLTCRIDQRENCGEKMDHFLQRCFYHSGQYNSEDDFSGLDCKLKEKEAGRLQNRLFYLSIPPNIFVDVVRCVSHRASSASGWTRVIVEKPFGRDSDSSRELTRSFKQYLSEDQIFRIDHYLGKELVENLSVLRFSNLVFEPLWSRNYIRNVQLIFSEDFGTEGRGGYFDNYGIIRDIMQNHLLQILALFAMETPVSLDAEDIRNEKVKVLRSMKPLKLQDVVVGQYKGHSKGNKSYSGYTDDPTVPNNSVTPTFAAAALFIDNARWDGVPFLMKAGKALHTKRAEIRVQFRHVPGNLYKKTFGTDLDKATNELVLRVQPDEAIYLKINNKVPGLGMRLDRTDLNLCYSTRYRGEIPDAYERLLLDAIEGERRLFIRSDKLDAAWSLFTPLLKELEEKKVAPELYPYGSRGPVGAHYLAAKHNVRWGDLSGEDS

SEQ ID NO: 17257 - DNA, 1782 bp, Nicotiana tabacum
  CDS (1)..(1782)
atggtgaccctttattcttctccttcaacccattcttctgggccagttgcttcttactctaattcctctattgggctctataattatcatcataataagcagatagcagtttcttcaattttgtcgagaaagtttggttctttgcaaattaatcagaagccattttggaatgccgttcgcatgcaagatggtgcagtagcgactccgcctagcaaaatcgaaaatgagactcctttgaagaaattaaaaaatggaattttgccagtcgcacctccaaaggagcagaaagatacaattgatttcgacagcaacaaagctaaatcaactgtcagtattactgttgttggtgcttcaggagatcttgccaagaaaaagatatttcctgcactgtttgcactttattatgagggttgcctccctgagcatttcactatctttggctatgcccggagtaagatgactgatgctgaactacggaacatggttagcaagacccttacttgcaggattgacaagagggaaaattgtggtgaaaagatggaacagtttttagaaaggtgcttctaccacagcggccaatacgattccctggaaaactttgcggagctcgataaaaagctgaaggaacatgaggctggaaggttttccaatcgtctattctacttatccattccaccaaatatttttataaatgcggttcgatgtgctagcctctctgcatcatctgctcatggctggacaagagtcattgtagagaaaccctttggtcgggattctgaatcctctgctgcattgacaagatcacttaagcagtacttgaatgaagaccaaatttttaggatcgatcactatttagggaaggagcttgtggaaaacctttctgtccttcgtttctccaacttgatatttgaacccttgtggtcaaggcagtgtataaggaatgtgcagtttattttctcagaagattttggcactgaaggacggggaggttattttgatcattatgggataatcagagacatcatgcaaaaccatctgcttcaaattctggccctctttgccatggaaacacctgtgagtttggatgcggaagatatcagaaatgaaaaggtaaaagttctgcgttccatgagacctttacaactagacgatgttatcattgggcagtacaaatgtcacacaaaaggagatgttacctatcccggttatactgacgacaagactgtaccgaaggacagtctaaccccaacttttgctgcagctgctcttttcatagataatgcacgatgggatggggtgcctttccttatgaaagctgggaaagctttacatactaggagtgcggaaataagagtacaattcaggcacgtaccaggaaatttatacaataagaactttggctcagatcttgaccaggcgaccaacgagcttgttatccgtgtccagcctaatgaagctatatacctaaagatcaataacaaagttcctggtctaggaatgagattggatcgcagtaatcttaatcttctttactcggcaagatactcgaaggagatccctgatgcatatgagcggctgcttcttgatgctatagaaggtgaaaggcggcttttcatccgcagtgatgagctggatgctgcttggtctcttttcactccagtgttaaaagaacttgaggataagaaaatagttccagaatattacccctatggaagtcgaggacctattggagcacattatctcgcagcacgatataaagtaagatggggtgatcttgtgtag

SEQ ID NO: 17258 - protein, 593 aa, Nicotiana tabacum
MVTLYSSPSTHSSGPVASYSNSSIGLYNYHHNKQIAVSSILSRKFGSLQINQKPFWNAVRMQDGAVATPPSKIENETPLKKLKNGILPVAPPKEQKDTIDFDSNKAKSTVSITVVGASGDLAKKKIFPALFALYYEGCLPEHFTIFGYARSKMTDAELRNMVSKTLTCRIDKRENCGEKMEQFLERCFYHSGQYDSLENFAELDKKLKEHEAGRFSNRLFYLSIPPNIFINAVRCASLSASSAHGWTRVIVEKPFGRDSESSAALTRSLKQYLNEDQIFRIDHYLGKELVENLSVLRFSNLIFEPLWSRQCIRNVQFIFSEDFGTEGRGGYFDHYGIIRDIMQNHLLQILALFAMETPVSLDAEDIRNEKVKVLRSMRPLQLDDVIIGQYKCHTKGDVTYPGYTDDKTVPKDSLTPTFAAAALFIDNARWDGVPFLMKAGKALHTRSAEIRVQFRHVPGNLYNKNFGSDLDQATNELVIRVQPNEAIYLKINNKVPGLGMRLDRSNLNLLYSARYSKEIPDAYERLLLDAIEGERRLFIRSDELDAAWSLFTPVLKELEDKKIVPEYYPYGSRGPIGAHYLAARYKVRWGDLV

SEQ ID NO: 17259 - DNA, 1485 bp, Actinobacillus actinomycetemcomitans
  CDS (1)..(1485): transl_table=11
atgaaagcagaaaactgttgtattgtaattttcggcgcctccggcgatctcacttatcgtaaacttattccggctttatataacctctataaaattgatcgactgggtgaagatttctccgttctcggcgtggcacgtaccgaactgaatgacaaatcattccgtgagaaaatgcgccaaacgctgatcaaaaatgaaggcgcgaaaggcgagtgcttggagcaattttgcagccacctgtattatcaggcggtcaatacggcggacaaagcggattacgccaaactggttccgcgtcttgacgaactgcacgacacctatcgcaccgaaggcaacaccttgtattatctttccacgccgccgagcctatatggcgtgattccggaatgtttgggcgaacatggcttaaataaagaagatcgcggctggaagcgtcttattgtggaaaaaccgttcggttatgaccgtgaaaccgccgaagcgctggatattcaaattcaccgtttctttgaagaacatcaaatttaccgtatcgaccattatcttggtaaagaaaccgtccaaaacctgcttgtgttgcgcttttccaacggttggtttgagccgttgtggaaccgtaatttcattgattacattgaaatcaccggcgcggaatctatcggtgtagaagagcgtggcggctattatgacggttccggcgcgatgcgcgatatgttccaaaaccatttattacaagtgctggcaatggtggcgatggagccgccggtgattatcaacgccaattccatgcgtgacgaagtggcgaaagtgctgcattgtttgcgcccgttgacccaggaagacgtggagcataatctggtgttgggacaatatgtcgcaggcgaagtggacggcgaatgggtgaaaggctatttagaggaaaaaggcgtgccgccgtattccaccaccgaaacctacatggcgctacgctgtgaaatcgaaaactggcgttgggcgggcgtgcctttctacgtgcgcaccggtaaacgtctgccggcacgcgtcacggaaatcgtgattcacttcaaaaccaccccgcacccggtattcagccaaaatgcgccggaaaataaactgattatccgtattcaaccggacgaaggcatttctatgcgttttggcttgaaaaaaccgggcgccggctttgaagccaaagaagtgtcgatggatttccgctatgccgatcttgcgggtgccaccgtcatgaccgcttatgagcgtttattgcttgatgccatgaaaggcgacgcgaccctatttgcgcgtaccgatgccgtacacgccgcctggaaattcgttcaaccgattttgaactataaagcccaaggcggcagactttatgattacgaggccggcacctggggaccgacggcagccgataaactcatcgccaaaagcggtcgtgtatggcgccgcccaagcgggttgatgaagaaaaaagtgtaa

SEQ ID NO: 17260 - protein, 494 aa, Actinobacillus actinomycetemcomitans
MKAENCCIVIFGASGDLTYRKLIPALYNLYKIDRLGEDFSVLGVARTELNDKSFREKMRQTLIKNEGAKGECLEQFCSHLYYQAVNTADKADYAKLVPRLDELHDTYRTEGNTLYYLSTPPSLYGVIPECLGEHGLNKEDRGWKRLIVEKPFGYDRETAEALDIQIHRFFEEHQIYRIDHYLGKETVQNLLVLRFSNGWFEPLWNRNFIDYIEITGAESIGVEERGGYYDGSGAMRDMFQNHLLQVLAMVAMEPPVIINANSMRDEVAKVLHCLRPLTQEDVEHNLVLGQYVAGEVDGEWVKGYLEEKGVPPYSTTETYMALRCEIENWRWAGVPFYVRTGKRLPARVTEIVIHFKTTPHPVFSQNAPENKLIIRIQPDEGISMRFGLKKPGAGFEAKEVSMDFRYADLAGATVMTAYERLLLDAMKGDATLFARTDAVHAAWKFVQPILNYKAQGGRLYDYEAGTWGPTAADKLIAKSGRVWRRPSGLMKKKV

SEQ ID NO: 17261 - DNA, 1533 bp, Aspergillus niger
  CDS (1)..(1533)
atggccagcacaatagcacgcactgaggaacgccagaatgctggcaccatggagctcaaagatgacactgtcatcatagtactgggtgcctccggagatcttgcaaagaagaagaccttcccggcccttttcggcctttatcgcaacaagttcctccccaagggaatcaagatcgtcggatatgcccggacaaacatggaccatgaggagtacctgaggcgtgtgcgctcatacatcaagacccctaccaaggaaatcgaagagcagctggacagcttctgccagttctgcacctacatttccggtcaatatgacaaggatgactcgttcatcaacctcaacaagcacctcgaggagattgagaagggccagaaggagcagaacagaatctactacatggccctcccccccagcgttttcaccaccgtttccgaccaacttaagcgcaactgctaccccaagaacggcgttgcccgtatcatcgtagagaagcctttcggcaaggaccttcagagctcgcgcgatctccaaaaagccctggagcctaactggaaggaagaggagatcttccgtatcgaccactacctgggtaaggagatggtcaagaacatccttatcatgcgcttcggaaacgaattcttcaacgccacctggaaccgtcaccacatcgataacgttcagatcacattcaaggagcccttcggcactgagggacgtggtggttacttcgatgaattcggcatcatccgtgatgtcatgcagaaccaccttctccaggtgttgacgctgctcgctatggagcgccccatttccttctccgccgaggacatccgtgacgagaaggttcgtgtcctccgtgcgatggacgccattgagcccaagaacgtcattattggccagtacggaaagtctctggatggcagcaagcccgcctacaaggaggacgagaccgttccccaggattcccgctgccccaccttctgcgctatggtcgcctacatcaagaacgagaggtgggacggtgttcctttcatcatgaaggctggcaaggccttgaacgagcagaagaccgagatccgtatccagttccgtgacgttacctccggaattttcaaggacatccctcgcaacgagctcgttatccgcgtccagcccaacgagtccgtgtacatcaagatgaactccaagctgcctggcctgtccatgcagacggttgtgactgagctcgacctcacctaccgccgccgcttctccgacctcaagatccccgaagcctacgagtctctgatcctggatgctctgaagggcgaccactccaacttcgtccgtgacgatgagctggatgccagctggaggatcttcacccctctcctgcactacctggatgacaacaaggagatcatccccatggaatacccctacggctcccgcggacccgccgtccttgatgacttcaccgcgtccttcggctacaagttcagcgatgctgctggctaccagtggcccttgacttccacccccaaccgtctgtaa

SEQ ID NO: 17262 - protein, 510 aa, Aspergillus niger
MASTIARTEERQNAGTMELKDDTVIIVLGASGDLAKKKTFPALFGLYRNKFLPKGIKIVGYARTNMDHEEYLRRVRSYIKTPTKEIEEQLDSFCQFCTYISGQYDKDDSFINLNKHLEEIEKGQKEQNRIYYMALPPSVFTTVSDQLKRNCYPKNGVARIIVEKPFGKDLQSSRDLQKALEPNWKEEEIFRIDHYLGKEMVKNILIMRFGNEFFNATWNRHHIDNVQITFKEPFGTEGRGGYFDEFGIIRDVMQNHLLQVLTLLAMERPISFSAEDIRDEKVRVLRAMDAIEPKNVIIGQYGKSLDGSKPAYKEDETVPQDSRCPTFCAMVAYIKNERWDGVPFIMKAGKALNEQKTEIRIQFRDVTSGIFKDIPRNELVIRVQPNESVYIKMNSKLPGLSMQTVVTELDLTYRRRFSDLKIPEAYESLILDALKGDHSNFVRDDELDASWRIFTPLLHYLDDNKEIIPMEYPYGSRGPAVLDDFTASFGYKFSDAAGYQWPLTSTPNRL

SEQ ID NO: 17263 - DNA, 1470 bp, Bacillus subtilis
  CDS (1)..(1470): transl_table=11
gtgaaaacaaaccaacaaccaaaagcagtaattgtcatattcggtgcaactggagatttagcaaaacgaaaattgtatccgtctattcaccgtttatatcaaaacggacaaatcggagaagagtttgcagtggtaggagttggaagaagaccttggtctaatgaggatcttcgccaaactgttaaaacatccatttcctcatctgcagataagcatatagatgatttcacgtctcatttttactatcacccgtttgacgtgacaaaccctggttcttatcaagagctaaacgtattgcttaaccagctggaagatacatatcaaattcctaacaacagaatgttctacttggcaatggctcctgaattcttcggaacgattgcaaaaacattaaaatcagagggtgtaacagctacaaccggctggtcccgccttgtcatcgaaaaaccgttcggccatgatctgccaagcgcacaggcattgaataaagaaatccgcgaagcatttacggaagatcaaatttacagaatcgaccattatctaggcaaacaaatggttcagaacattgaagtgattcgatttgccaatgcgattttcgaaccgctttggacaaaccgctacatttcaaacattcaaatcacatctagcgaatcactaggcgttgaagaccgcgcaagatattacgaaaaatcaggcgcccttcgcgacatggtgcaaaaccatattatgcagatggttgcccttcttgcaatggagccgcctatcaaattgaacacagaagaaatccgcagcgagaaagtgaaggtgctgagagcactgcgtcctattgcaaaagacgaagtggatgaatactttgtgcgcggacaatatcatgctggtgaaattgacggtgtaccggttcctgcttatacagatgaagataatgtcgctcctgactccaatacagaaacctttgttgccggcaagctcttgatcgacaacttcagatgggctggtgttccattctacatcagaaccggaaaacgaatgagagaaaagtccacaaaaattgtcgttcaatttaaggacattccgatgaacctgtactacggtaatgaaaacaacatgaatccgaacttgcttgtcattcatattcagcctgacgaaggcattacgctttacttaaatgctaaaaagcttggcggagcagcacacgcacagccaatcaaactcgattattgcagcaattgcaatgacgagttgaacacccctgaagcatatgaaaaactaattcacgactgtcttcttggcgatgcaacaaactttgcacactgggatgaagttgccctttcttggagctttgtcgactctatttctgaaacatgggcagcaaacaaaaccttatctcctaactacgaatcaggctcaatgggaccgaaagaatctgatgatcttttggtgaaagacggcttacactggtggaacatataa

SEQ ID NO: 17264 - protein, 489 aa, Bacillus subtilis
MKTNQQPKAVIVIFGATGDLAKRKLYPSIHRLYQNGQIGEEFAVVGVGRRPWSNEDLRQTVKTSISSSADKHIDDFTSHFYYHPFDVTNPGSYQELNVLLNQLEDTYQIPNNRMFYLAMAPEFFGTIAKTLKSEGVTATTGWSRLVIEKPFGHDLPSAQALNKEIREAFTEDQIYRIDHYLGKQMVQNIEVIRFANAIFEPLWTNRYISNIQITSSESLGVEDRARYYEKSGALRDMVQNHIMQMVALLAMEPPIKLNTEEIRSEKVKVLRALRPIAKDEVDEYFVRGQYHAGEIDGVPVPAYTDEDNVAPDSNTETFVAGKLLIDNFRWAGVPFYIRTGKRMREKSTKIVVQFKDIPMNLYYGNENNMNPNLLVIHIQPDEGITLYLNAKKLGGAAHAQPIKLDYCSNCNDELNTPEAYEKLIHDCLLGDATNFAHWDEVALSWSFVDSISETWAANKTLSPNYESGSMGPKESDDLLVKDGLHWWNI

SEQ ID NO: 17265 - DNA, 1581 bp, Ceratitis capitata
  CDS (1)..(1581)
atggccactcagcatttcaccaatggcagcgccaccgacgatggggagaccgcactcgaacatatcatcaaatcattggagactccaacaatgaagtgcgagggtacacatttcgattcccatgtgccgcacacgtttgtcatctttggtgcttcgggtgatttggccaaaaagaaaatctatccaaccttgtggtggctttaccgtgataatttactgccgaaatcaactaaattctgcggttatgcacgttcgaagttaacgattgaggagttgcgggcgaagtgtcatcaatacatgaaggtgcaaccggacgagcaggcaaaatatgaggaattctggcagaatcatgactacgctgcgggtagctatgatcagcgcagtgattttgtggctttaaaagaacgtttgagcagtttggagagctgcaattgtagttgtaatcgcatattttatttggccttaccgccgtccgtctttgagcgagttactgtgaacattaaggacatttgtttggctgaacgcggctggaatcgcgttattatcgaaaaaccttttggtcgcgacgatgtcacttcaaagaaactaagcgatcatcttgcatcactcttccacgaggaccaactctatcgtatcgatcattatctgggcaaggaaatggtgcaaaatctaatgaccattcgctttgccaataaaattctcaactccacatggaatcgggaaaatatcgcctcagtgctgatcacattcaaggaacccttcggcacacaaggacgcggcggctactttgacgagtttggcattatacgcgatgtcatgcaaaatcacctgctgcaaatattgtctttggtcgccatggagaaacccacctcctgccagccggatgatatacgcgatgaaaaagttaaagtattgaaaagcattccagcacttacattggacgatatggttttgggtcaatatgtgggcaatccaaatggcgttggtgagcaacgcgaggggtatctcgacgatccgacagtgtcgaacgactccaacacacccacttacgcgcagggtgtattgcgtatcaataatgaacgttgggacggcgtacccttcatcttacgttgcggtaaagcgctggacgaacggaaagccgtggtgcgtatacaatatcgtgatgtgcctggcgatattttcgagggcaatagcaaacgtaatgagttagttatacgtgtgcaacccggcgaggcgttgtatttcaaaatgatgaccaaaagtccgggtataactttcgatatagaggagaccgagttggacttaacctatgagcatcgctacaaaaactcctacctgccagatgcctacgaacgtctcattttggatgtattctgtggttcgcaaatgcatttcgtgcgttccgatgagctgagcgaggcgtggcgcatcttcacgccggtcttgaatgaaatcgaaaacaacaaggttaaacccataccttatgtatttggttcacgtggtcccaaggaggcggatcagaagacgtcggagaataacttcaaatattacggttcctacaagtggattggaaagaaatag

SEQ ID NO: 17266 - protein, 526 aa, Ceratitis capitata
MATQHFTNGSATDDGETALEHIIKSLETPTMKCEGTHFDSHVPHTFVIFGASGDLAKKKIYPTLWWLYRDNLLPKSTKFCGYARSKLTIEELRAKCHQYMKVQPDEQAKYEEFWQNHDYAAGSYDQRSDFVALKERLSSLESCNCSCNRIFYLALPPSVFERVTVNIKDICLAERGWNRVIIEKPFGRDDVTSKKLSDHLASLFHEDQLYRIDHYLGKEMVQNLMTIRFANKILNSTWNRENIASVLITFKEPFGTQGRGGYFDEFGIIRDVMQNHLLQILSLVAMEKPTSCQPDDIRDEKVKVLKSIPALTLDDMVLGQYVGNPNGVGEQREGYLDDPTVSNDSNTPTYAQGVLRINNERWDGVPFILRCGKALDERKAVVRIQYRDVPGDIFEGNSKRNELVIRVQPGEALYFKMMTKSPGITFDIEETELDLTYEHRYKNSYLPDAYERLILDVFCGSQMHFVRSDELSEAWRIFTPVLNEIENNKVKPIPYVFGSRGPKEADQKTSENNFKYYGSYKWIGKK

SEQ ID NO: 17267 - DNA, 1575 bp, Drosophila melanogaster
  CDS (1)..(1575)
atggcaacgcaaaaggaagatcacaccgccctggatctcataatcaagtcactcaagtcgcctacaatggtctgcgagggaacccactttgacggcaagattccgcacacgttcgtcatctttggggcgtcgggcgatctggccaagaagaagatctaccccacgctctggtggctctaccgcgatgacctgctgcccaagccgaccaagttctgcggctatgcccgttccatgctgaccgtcgatagcatcaaggagcagtgtctgccgtacatgaaggtccagccgcacgagcagaagaagtacgaggagttctgggccctcaatgagtacgtgtccggcagatatgacggacgcactggcttcgagctgcttaaccagcagctggagattatggagaacaagaacaaggccaaccgcatcttctatctggccctgccgcccagcgtcttcgaggaggtgactgtcaacatcaagcagatctgcatgtcggtctgcggttggaaccgcgtgatcatcgagaagcctttcggccgggatgacgcctcctcgcaggcgctgagcgaccatctggccggtctgttccaggaggatcagctgtaccgcatcgatcactacctgggcaaggagatggtgcagaacctgatgaccatacgcttcggcaacaagatcctcagctcgacgtggaaccgcgagaacatcgcctccgtgctgatcacgttcaaggagcccttcggcacgcagggtcgtggcggctacttcgacgagttcggcatcatacgcgacgtgatgcagaaccatctgctgcagatcctctcgctggtggccatggagaagccggtgagctgccacccggacgacattcgtgacgagaaggtcaaggtgctgaagagcatcgaggccctgacgctggatgacatggtgctgggccagtacctgggcaatccgcagggtacaaacgatgatgcgcgcacgggctacgtggaggaccccaccgttagcaacgattcgaacacgcccacctacgccctcggcgtgctcaagatcaacaacgagcgctggcagggagtgcccttcatcctgcgctgcggcaaggcgctgaacgagcgcaaggcggaggtgcgcatccagtaccaggacgtgctcggcgacatcttcgagggcaatacgaagcgcaacgagctggtcatacgcgtccagccgggcgaggccctgtactttaagatgatgaccaagagccccggcatcacgttcgacatcgaggagacggagctggacctcacctacgagcaccgctacaaggactcctacctgccggacgcgtacgagcgtctcatcctcgacgtcttctgcggctcccagatgcacttcgtccgctcggacgagctgcgcgaggcgtggcgcatcttcacgcccattctgcaccagatcgagaaggagcacattcgtccaatcacctaccagtacggatcgcgcggtcccaaggaggcggaccgcaagtgcgaggagaacaatttcaagtactccggctcctacaagtggcacggcggcaaggcggccacgtccaatcactga

SEQ ID NO: 17268 - protein, 524 aa, Drosophila melanogaster
MATQKEDHTALDLIIKSLKSPTMVCEGTHFDGKIPHTFVIFGASGDLAKKKIYPTLWWLYRDDLLPKPTKFCGYARSMLTVDSIKEQCLPYMKVQPHEQKKYEEFWALNEYVSGRYDGRTGFELLNQQLEIMENKNKANRIFYLALPPSVFEEVTVNIKQICMSVCGWNRVIIEKPFGRDDASSQALSDHLAGLFQEDQLYRIDHYLGKEMVQNLMTIRFGNKILSSTWNRENIASVLITFKEPFGTQGRGGYFDEFGIIRDVMQNHLLQILSLVAMEKPVSCHPDDIRDEKVKVLKSIEALTLDDMVLGQYLGNPQGTNDDARTGYVEDPTVSNDSNTPTYALGVLKINNERWQGVPFILRCGKALNERKAEVRIQYQDVLGDIFEGNTKRNELVIRVQPGEALYFKMMTKSPGITFDIEETELDLTYEHRYKDSYLPDAYERLILDVFCGSQMHFVRSDELREAWRIFTPILHQIEKEHIRPITYQYGSRGPKEADRKCEENNFKYSGSYKWHGGKAATSNH

SEQ ID NO: 17269 - DNA, 1476 bp, Escherichia coli O157
  CDS (1)..(1476): transl_table=11
atggcggtaacgcaaacagcccaggtctgtgacttggtcattttcggcgcgaaaggcgaccttgcgcgtcgtaaattgctgccttccctgtatcaactggaaaaagccggtcagctcaacccggacacccggattatcggcgtagggcgtgctgactgggataaagcggcatataccaaagttgtccgcgaggcgctcgaaactttcatgaaagaaaccattgatgaaggtttatgggacaccctgagcgcacgtctggatttttgtaatctcgatgtcaatgacactgctgcattcagccgtctcggcgcgatgctggatcaaaaaaatcgtatcaccattaactactttgccatgccgcccagcacttttggcgcaatttgcaaagggcttggcgaggcaaaactgaatgctaaaccggcacgcgtagtcatggagaaaccgctggggacgtcgctggcgacctcgcaggaaatcaatgatcaggttggcgaatacttcgaggagtgccaggtttaccgtatcgaccactatcttggtaaagaaacggtgctgaacctgttggcgctgcgttttgctaactccctgtttgtgaataactgggacaatcgcaccattgatcatgttgagattaccgtggcagaagaagtggggatcgaagggcgctggggctattttgataaagccggtcagatgcgcgacatgatccagaaccacctgctgcaaattctttgcatgattgcgatgtctccgccgtctgacctgagcgcagacagcatccgcgatgaaaaagtgaaagtactgaagtctctgcgccgcatcgaccgctccaacgtacgcgaaaaaaccgtacgcgggcaatatactgcgggcttcgcccagggcaaaaaagtgccgggatatctggaagaagagggcgcgaacaagagcagcaatacagaaaccttcgtggcgatccgcgtcgacattgataactggcgctgggccggtgtgccattctacctgcgtactggtaaacgtctgccgaccaaatgttctgaagtcgtggtctatttcaaaacacctgaactgaatctgtttaaagagtcgtggcaggatctgccgcagaataaactgactatccgtctgcaacctgatgaaggcgtggatatccaggtactgaataaagttcctggccttgaccacaaacataacctgcaaatcaccaagctggatctgagctattcagaaacctttaatcagacgcatctggcggatgcctatgaacgtttgctgctggaaaccatgcgtggtattcaggcactgtttgtacgtcgcgatgaagtggaagaagcctggaaatgggtagactccattactgaggcgtgggcgatggacaatgatgcgccgaaaccgtatcaggccggaacctggggacccgttgcctcggtggcgatgattacccgtgatggtcgttcctggaatgagtttgagtaa

SEQ ID NO: 17270 - protein, 491 aa, Escherichia coli O157
MAVTQTAQVCDLVIFGAKGDLARRKLLPSLYQLEKAGQLNPDTRIIGVGRADWDKAAYTKVVREALETFMKETIDEGLWDTLSARLDFCNLDVNDTAAFSRLGAMLDQKNRITINYFAMPPSTFGAICKGLGEAKLNAKPARVVMEKPLGTSLATSQEINDQVGEYFEECQVYRIDHYLGKETVLNLLALRFANSLFVNNWDNRTIDHVEITVAEEVGIEGRWGYFDKAGQMRDMIQNHLLQILCMIAMSPPSDLSADSIRDEKVKVLKSLRRIDRSNVREKTVRGQYTAGFAQGKKVPGYLEEEGANKSSNTETFVAIRVDIDNWRWAGVPFYLRTGKRLPTKCSEVVVYFKTPELNLFKESWQDLPQNKLTIRLQPDEGVDIQVLNKVPGLDHKHNLQITKLDLSYSETFNQTHLADAYERLLLETMRGIQALFVRRDEVEEAWKWVDSITEAWAMDNDAPKPYQAGTWGPVASVAMITRDGRSWNEFE

SEQ ID NO: 17271 - DNA, 1536 bp, Emericella nidulans
  CDS (1)..(1536)
atgtccgccacgatagcccgcgccgaggagcagcagaatgggagcactgtcgaactcaaagatgacaccgtcattgtcgtactaggtgcctccggggatcttgcaaagaagaagactttcccagctctttttggcctttttcgcaacaagttccttcccaagggtatcaagatcgtcggatatgcccggacacagatggaccacaatgaataccttaagcgagtgcgctcatacattaagaccccgacaaaggagatcgaagagcaattgaacagcttttgcgagctttgcacatacatcagcggccaatacgaccaggatgactcattcaagaacctcgccaagcaccttgaggagattgagaaaaaccaaaaggaacagaacagagtcttttacatggcgttgccccccagcgttttcatcacagtctcagagcaactaaaacgcaactgctaccccaaaaatggtgtcgctcgtattattgtcgagaaacctttcggcaaggacctccagagctctcgtgatctccagaaggcccttgagcccaactggaaagaagaagagatcttccgtattgaccactacctcggcaaggagatggttaagaacatccttatcatgcgctttggcaacgagttcttcaatgccacctggaaccgccatcacatcgacaacgttcagatcacgttcaaggaaccattcggtacggagggccgtggaggttactttgatgaattcggcatcatccgtgacgttatgcagaaccaccttctgcaagttctcacactgcttgctatggagcgacccatctctttctccgccgaagacatccgtgacgagaaggttcgcgtcttgcgcgccatggaccccattcaacccaaggatgtcatcatcggccagtacggcagatcactagatggtagcaaacccgcatataaggaggatgatacagtgccacaggactctcgctgccccaccttctgtgcgctggtcgctcacatcaagaacgagagatgggatggtgttcctttcatcatgaaggcgggtaaagccctcaacgaacagaagaccgaaatccgtattcagttcaaggacgtcacttctggcatcttcaaggatatcccccgcaacgagcttgtcatccgtgtccaacccaacgaatctgtctacatcaagatgaactcgaaacttcctggactttccatgcagaccgtggttactgagctggatctcacctaccgtcgtcgattctccgacctcaagattcctgaagcctacgaatctttgatcttggatgctctcaaaggagaccactccaactttgtccgtgacgacgagctcgatgctagctggaggatgttcactcctctgctccactacctcgatgacaacaaggagatcatccctatggaatacccctacggttcccgcgggccctccgttcttgacgacttcaccgcttcctatggctacaagttcagtgatgctgcgggataccagtggccgttgacgcacactacgcctaacaggctgtag

SEQ ID NO: 17272 - protein, 511 aa, Emericella nidulans
MSATIARAEEQQNGSTVELKDDTVIVVLGASGDLAKKKTFPALFGLFRNKFLPKGIKIVGYARTQMDHNEYLKRVRSYIKTPTKEIEEQLNSFCELCTYISGQYDQDDSFKNLAKHLEEIEKNQKEQNRVFYMALPPSVFITVSEQLKRNCYPKNGVARIIVEKPFGKDLQSSRDLQKALEPNWKEEEIFRIDHYLGKEMVKNILIMRFGNEFFNATWNRHHIDNVQITFKEPFGTEGRGGYFDEFGIIRDVMQNHLLQVLTLLAMERPISFSAEDIRDEKVRVLRAMDPIQPKDVIIGQYGRSLDGSKPAYKEDDTVPQDSRCPTFCALVAHIKNERWDGVPFIMKAGKALNEQKTEIRIQFKDVTSGIFKDIPRNELVIRVQPNESVYIKMNSKLPGLSMQTVVTELDLTYRRRFSDLKIPEAYESLILDALKGDHSNFVRDDELDASWRMFTPLLHYLDDNKEIIPMEYPYGSRGPSVLDDFTASYGYKFSDAAGYQWPLTHTTPNRL

SEQ ID NO: 17273 - DNA, 1494 bp, Kluyveromyces lactis
  CDS (1)..(1494)
atggctactcagtttgacgagaacactgtgatcactatttttggtgcttcaggtgatttatcaaagaagaaaacgtttcctgcattattcgggttatatcgtgaaggatatttgaatccaactacaaaaattattgggtatgcgcgttccaagttgagcaacgaggatttaagagaaaaggtaaagccatttttaaagaaacctaacggagctaaggatgatgctaaagtcaatgaatttttatcgatggtttcttaccatgctggtccgtatgattctgatgaaggttacttggagttgaaaaagattatcgaagagtttgaggctgaaaaaaaggtcgatgaacctcatagactcttttacttagccttgcctcctagtattttcattgacgtgtgttcgaaactaaaggaaaacctatacacagaatctggaattcaaagggttattgtggaaaagccttttggtcacgatctacagtctgctactgaattacaggagaagttggcgccattgttttccgaggacgaattgttcagaattgatcattatttgggtaaagagatggtaaaaaatctattgttgatgagattcggtaacactttcttgaacgccgcttggaacaaagaaaatatacaatctgttcaggtggttttcaaggaaccatttggaactgaaggtcgtggtggttacttcgattcaattggtattataagagatgtgatgcagaatcatttgctacaagtgttaactctattgacgatggaaagaccagtatctttcgacccagaatctgtacgtgacgaaaaggtcaaggttttgaaagcattctctccaattgatcatgacgatatattgataggccaatacggaagatctgtggatggtagcaagcctagctacctagatgatgaaactgtcaaagaggactccaagtgtgtcacctttgcagcaatcggattcaaaattgcaaatgaacgttgggatggagttcccatcgttatgagagcaggaaaagcgttgaacgaaggtaaagtagaaatcagaatccagttcagaagagttgcatctggcatgttcactgatattcctaataatgaattggttattagaattcaaccaaatgaagccatctacttgaagtgtaatgccaaaacacctggtcttgcgaatgaaaaccaaaccacagaactagacttgacttactcagagagatacaaaaactattggattcctgaagcatatgaatctttgataagagatgcccttttaggagatcattcaaatttcgtcagagacgatgaattagacgtaagctggaagctatttactccattgcttaattacttggaaggaccagatggacctcaaccaaagatctatccatatggctgtagaagccctgacggactcgttgagtttttagcagaccatggttacaccttttccaaaccaggatcctaccaatggcctgtcaccactcctaaaatgtaa

SEQ ID NO: 17274 - protein, 497 aa, Kluyveromyces lactis
MATQFDENTVITIFGASGDLSKKKTFPALFGLYREGYLNPTTKIIGYARSKLSNEDLREKVKPFLKKPNGAKDDAKVNEFLSMVSYHAGPYDSDEGYLELKKIIEEFEAEKKVDEPHRLFYLALPPSIFIDVCSKLKENLYTESGIQRVIVEKPFGHDLQSATELQEKLAPLFSEDELFRIDHYLGKEMVKNLLLMRFGNTFLNAAWNKENIQSVQVVFKEPFGTEGRGGYFDSIGIIRDVMQNHLLQVLTLLTMERPVSFDPESVRDEKVKVLKAFSPIDHDDILIGQYGRSVDGSKPSYLDDETVKEDSKCVTFAAIGFKIANERWDGVPIVMRAGKALNEGKVEIRIQFRRVASGMFTDIPNNELVIRIQPNEAIYLKCNAKTPGLANENQTTELDLTYSERYKNYWIPEAYESLIRDALLGDHSNFVRDDELDVSWKLFTPLLNYLEGPDGPQPKIYPYGCRSPDGLVEFLADHGYTFSKPGSYQWPVTTPKM

SEQ ID NO: 17275 - DNA, 1461 bp, Leuconostoc mesenteroides
  CDS (1)..(1461): transl_table=11
atggtttcagaaatcaagacgttagtaactttctttggtggcactggtgacttggccaagcgtaagctttacccatcagttttcaatctttataaaaaaggctacttgcaaaagcattttgccattgttggaacggcccgtcaagccctcaatgatgacgaattcaaacaattggttcgtgattcaattaaagatttcactgacgatcaagcacaagctgaggcgttcatcgaacatttctcataccgtgcacacgacgtaacagatgctgcttcatacgctgttttaaaagaggcgattgaagaagctgccgacaaatttgatatcgatggcaaccgcattttctatatgtcagttgcgccacgtttctttggtacaattgccaaatatcttaagtcagaaggcctactagctgacactggttacaaccgtttgatgattgaaaagcctttcggtacatcatatgacacagctgccgaactccaaaatgacttggaaaacgcatttgatgataaccaactattccgtattgaccactaccttggtaaggaaatggttcaaaacattgctgcccttcgctttggtaacccaattttcgatgctgcttggaacaaggattacatcaagaacgttcaagtaacattgtcagaagtcttgggtgtcgaagaacgtgccggctactatgacacagccggtgcattgcttgacatgattcaaaaccacaccatgcaaattgttggttggttagccatggaaaaaccagaatcattcactgacaaagacattcgtgccgctaaaaacgcagcctttaatgctttgaagatctatgatgaagcagaagttaacaaatactttgttcgtgcacaatatggtgccggtgattcagctgacttcaagccataccttgaagaattagacgtacctgctgattctaaaaacaataccttcatcgccggcgaattgcaatttgatttgccacgttgggagggtgtcccattctatgtccgttcaggtaagcgcttagctgctaaacagacacgggttgatatcgtctttaaggctggcacgtttaactttggttcagaacaagaagcacaagaagctgtcttgtcaattatcattgatccaaagggtgctatcgaattgaagttgaacgccaagtcagttgaagatgctttcaacacacgtacaattgacttaggttggactgtatctgacgaagataagaagaacacgccagaaccatacgaacgtatgattcacgacactatgaatggtgatggctctaacttcgctgactggaatggcgtttcaatcgcttggaagttcgttgatgctatttcagccgtttataccgcagataaagcaccacttgaaacttacaagtcgggctcaatgggtcctgaagcatccgataaattattggctgccaatggtgatgcttgggtgtttaaaggttaa

SEQ ID NO: 17276 - protein, 486 aa, Leuconostoc mesenteroides
MVSEIKTLVTFFGGTGDLAKRKLYPSVFNLYKKGYLQKHFAIVGTARQALNDDEFKQLVRDSIKDFTDDQAQAEAFIEHFSYRAHDVTDAASYAVLKEAIEEAADKFDIDGNRIFYMSVAPRFFGTIAKYLKSEGLLADTGYNRLMIEKPFGTSYDTAAELQNDLENAFDDNQLFRIDHYLGKEMVQNIAALRFGNPIFDAAWNKDYIKNVQVTLSEVLGVEERAGYYDTAGALLDMIQNHTMQIVGWLAMEKPESFTDKDIRAAKNAAFNALKIYDEAEVNKYFVRAQYGAGDSADFKPYLEELDVPADSKNNTFIAGELQFDLPRWEGVPFYVRSGKRLAAKQTRVDIVFKAGTFNFGSEQEAQEAVLSIIIDPKGAIELKLNAKSVEDAFNTRTIDLGWTVSDEDKKNTPEPYERMIHDTMNGDGSNFADWNGVSIAWKFVDAISAVYTADKAPLETYKSGSMGPEASDKLLAANGDAWVFKG

SEQ ID NO: 17277 - DNA, 1548 bp, Medicago sativa
  CDS (1)..(1548)
atgggaacaaatgaatggcatgtagaaagaagagatagcataggtactgaatctcctgtagcaagagaggtacttgaaactggcacactctctattgttgtgcttggtgcttctggtgatcttgccaagaagaagacttttcctgcactttttcacttatataaacaggaattgttgccacctgatgaagttcacatttttggctatgcaaggtcaaagatctccgatgatgaattgagaaacaaattgcgtagctatcttgttccagagaaaggtgcttctcctaaacagttagatgatgtatcaaagtttttacaattggttaaatatgtaagtggcccttatgattctgaagatggatttcgcttgttggataaagagatttcagagcatgaatatttgaaaaatagtaaagagggttcatctcggaggcttttctatcttgcacttcctccttcagtgtatccatccgtttgcaagatgatcaaaacttgttgcatgaataaatctgatcttggtggatggacacgcgttgttgttgagaaaccctttggtagggatctagaatctgcagaagaactcagtactcagattggagagttatttgaagaaccacagatttatcgtattgatcactatttaggaaaggaactagtgcaaaacatgttagtacttcgttttgcaaatcggttcttcttgcctctgtggaaccacaaccacattgacaatgtgcagatagtatttagagaggattttggaactgatggtcgtggtggatattttgaccaatatggaattatccgagatatcattccaaaccatctgttgcaggttctttgcttgattgctatggaaaaacccgtttctctcaagcctgagcacattcgagatgagaaagtgaaggttcttgaatcagtactccctattagagatgatgaagttgttcttggacaatatgaaggctatacagatgacccaactgtaccggacgattcaaacaccccgacttttgcaactactattctgcggatacacaatgaaagatgggaaggtgttcctttcattgtgaaagcagggaaggccctaaattctaggaaggcagagattcgggttcaattcaaggatgttcctggtgacattttcaggagtaaaaagcaagggagaaacgagtttgttatccgcctacaaccttcagaagctatttacatgaagcttacggtcaagcaacctggactggaaatgtctgcagttcaaagtgaactagacttgtcatatgggcaacgatatcaagggataaccattccagaggcttatgagcgtctaattctcgacacaattagaggtgatcaacaacattttgttcgcagagacgaattaaaggcatcatggcaaatattcacaccacttttacacaaaattgatagaggggagttgaagccggttccttacaacccgggaagtagaggtcctgcagaagcagatgagttattagaaaaagctggatatgttcaaacacccggttatatatggattcctcctaccttatag

SEQ ID NO: 17278 - protein, 515 aa, Medicago sativa
MGTNEWHVERRDSIGTESPVAREVLETGTLSIVVLGASGDLAKKKTFPALFHLYKQELLPPDEVHIFGYARSKISDDELRNKLRSYLVPEKGASPKQLDDVSKFLQLVKYVSGPYDSEDGFRLLDKEISEHEYLKNSKEGSSRRLFYLALPPSVYPSVCKMIKTCCMNKSDLGGWTRVVVEKPFGRDLESAEELSTQIGELFEEPQIYRIDHYLGKELVQNMLVLRFANRFFLPLWNHNHIDNVQIVFREDFGTDGRGGYFDQYGIIRDIIPNHLLQVLCLIAMEKPVSLKPEHIRDEKVKVLESVLPIRDDEVVLGQYEGYTDDPTVPDDSNTPTFATTILRIHNERWEGVPFIVKAGKALNSRKAEIRVQFKDVPGDIFRSKKQGRNEFVIRLQPSEAIYMKLTVKQPGLEMSAVQSELDLSYGQRYQGITIPEAYERLILDTIRGDQQHFVRRDELKASWQIFTPLLHKIDRGELKPVPYNPGSRGPAEADELLEKAGYVQTPGYIWIPPTL

SEQ ID NO: 17279 - DNA, 1545 bp, Mycobacterium bovis
  CDS (1)..(1545): transl_table=11
atgaaaccggcccacgccgcggcgtcgtggcgcaacccgctacgagacaagcgggacaagcgattacccagaatcgccggcccgtgcggcatggtgattttcggcgtcaccggcgacctggcccgcaagaaggtgatgccggccgtctacgatttggccaaccgcggcctgctgccgcccacattctcgctggtggggtttgcccgccgagactggagcacccaggatttcggtcaagtggtgtacaacgccgtccaagagcactgccgaacaccgtttcggcaacagaactgggaccggctggccgagggattccgttttgtgccaggcactttcgacgacgacgacgcgttcgcccaactcgccgagacgctggagaagctcgacgccgagcgcggcaccggcggcaaccacgccttctacctggcgatcccgcccaaatccttcccggtggtgtgtgagcagctgcacaagtccggcctggcccgcccgcaaggcgaccggtggagccgagtcgtgatagagaagccgttcggccacgacctggccagcgcacgcgagctgaacaaggcggtcaacgcggtcttcccggaggaagcggtcttccgcatcgaccactacctgggcaaagagacggtgcagaacatcctggcgctgcggttcgccaaccagctgttcgacccgatctggaatgcgcactacgtcgaccacgtacagatcaccatggccgaagacatcggcctgggcgggcgcgcgggctattacgacggcatcggcgcggcccgcgatgtcatccagaaccatctcatgcagctgctggcgctgaccgcgatggaggagccggtcagcttccacccggcagcgttgcaggccgagaagatcaaggtgctctcggccacccgccttgccgagccactcgaccagaccaccagccgcggccagtacgccgccggctggcaaggcggggagaaggtggttgggctgctcgacgaggaggggttcgccgaggactccaccaccgaaaccttcgccgctatcaccctggaagtcgatacgcgccggtgggccggcgtgccgttctatctgcgaacgggaaaacgattgggccgccgggtgaccgagatcgctctggtcttcaggcgggcgccgcatctgccgttcgacgccaccatgaccgacgagctgggcaccaacgcgatggtcatccgcgtgcagcccgacgaaggtgtcacattgcggttcggctccaaggtgccgggcaccgccatggaagtccgcgacgtcaacatggacttctcctacggctcggcattcgccgaagattcaccggaggcctacgagcggctcatcctcgacgtcctgctcggcgagccctcgctgtttccggtcaacgcggaggtcgaactggcgtgggagatcctcgatccagcgttggaacattgggcggcacacgggacgcccgacgcctacgaggcaggtacctggggtccggaatcatccttggagatgctgcgccgcaccggccgggaatggcggcggccatag

SEQ ID NO: 17280 - protein, 514 aa, Mycobacterium bovis
MKPAHAAASWRNPLRDKRDKRLPRIAGPCGMVIFGVTGDLARKKVMPAVYDLANRGLLPPTFSLVGFARRDWSTQDFGQVVYNAVQEHCRTPFRQQNWDRLAEGFRFVPGTFDDDDAFAQLAETLEKLDAERGTGGNHAFYLAIPPKSFPVVCEQLHKSGLARPQGDRWSRVVIEKPFGHDLASARELNKAVNAVFPEEAVFRIDHYLGKETVQNILALRFANQLFDPIWNAHYVDHVQITMAEDIGLGGRAGYYDGIGAARDVIQNHLMQLLALTAMEEPVSFHPAALQAEKIKVLSATRLAEPLDQTTSRGQYAAGWQGGEKVVGLLDEEGFAEDSTTETFAAITLEVDTRRWAGVPFYLRTGKRLGRRVTEIALVFRRAPHLPFDATMTDELGTNAMVIRVQPDEGVTLRFGSKVPGTAMEVRDVNMDFSYGSAFAEDSPEAYERLILDVLLGEPSLFPVNAEVELAWEILDPALEHWAAHGTPDAYEAGTWGPESSLEMLRRTGREWRRP

SEQ ID NO: 17281 - DNA, 1476 bp, Rhizobium meliloti
  CDS (1)..(1476): transl_table=11
atgagcagccagatcattcccgtcgaaccgtttgactatgtggtgttcgggggcaccggcgatcttgcggagcgcaagctgctgccggcactttatcaccgtcagatggaaggtcagttcacggaaccgacgcggatcatcggcgcatcgcgcgcgagcctttcccatgacgaataccgcaggttcgcgagcgacgccctgaaagaacacctgaagtccggggagttcaacgaggcggaagtcgagaaattcacctcgcgtctctattacgtctccgtcgacgccaagtccgagcagggctgggacgatctgaagaagctcctggaagagggcaaggatcgtacccgtgccttctatctcgccgtcgggccggcgattttcagcgacatttccgaaaagatccgcgatcacaagcttatcacgaggaacacccgcatcgtcgtcgagaagccgatcggccgcgacctcgcttccgcgacggagctcaacgacacgatcggcaaggtcttccgcgaagagcagattttccgcatcgaccactatctcggcaaggaaacggtgcagaatctgatggcactgcgcttcgccaacgcactttacgagccattgtggaattccgcccacatcgaccacgtgcagatcaccgtttccgaagccgtcgggctcgagaatcgcgcaggctactacgacaaggcgggcgcgctgcgcgacatggtgcagaaccatatcctccagcttctctgtttcgtcgcaatggaggcgccgacgtcgatggacgcggaggccgtgcgcgacgagaagctcaaggtgcttcgcgcgctgaagccgatcaccgcctccaatgtcgagcaggtgacggtccggggccaataccgcgcgggcgcatcgtccggaggcccggtcaagggctatctcgaagagctcgaaggaggcgtttccaacacggaaaccttcgtcgcgatcaaggccgagatcagcaattggcgctgggcaggcgtgcccttctatctgcgtaccggaaagcgcatggcgggccgcatgtcggagatcgtcatcaccttcaagcagatcccgcactcgatcttcgatcagagtgccggccggatttcggccaaccagctgatgatccgcctgcagccgaatgaaggcgtcaagcagtcgctgatgatcaaggatcccggaccgggcggcatgcggctgaggaacgtgcccctcgacatgagcttcgccgaggccttcgcggtccgcaatgccgatgcctatgaacgcctgttgctggacgtcatccgcaacaaccagaccctgttcgtgcgccgcgacgaagtggaagcggcctggcaatggatcgacccgatcctcaaggcctgggaagcaaccggacagcaggtgcaaggatataccgccggaacctggggcccgagccagtcgatcgcgctgatcgagcgcgacggccgcacttggaacgatgcgatctag

SEQ ID NO: 17282 - protein, 491 aa, Rhizobium meliloti
MSSQIIPVEPFDYVVFGGTGDLAERKLLPALYHRQMEGQFTEPTRIIGASRASLSHDEYRRFASDALKEHLKSGEFNEAEVEKFTSRLYYVSVDAKSEQGWDDLKKLLEEGKDRTRAFYLAVGPAIFSDISEKIRDHKLITRNTRIVVEKPIGRDLASATELNDTIGKVFREEQIFRIDHYLGKETVQNLMALRFANALYEPLWNSAHIDHVQITVSEAVGLENRAGYYDKAGALRDMVQNHILQLLCFVAMEAPTSMDAEAVRDEKLKVLRALKPITASNVEQVTVRGQYRAGASSGGPVKGYLEELEGGVSNTETFVAIKAEISNWRWAGVPFYLRTGKRMAGRMSEIVITFKQIPHSIFDQSAGRISANQLMIRLQPNEGVKQSLMIKDPGPGGMRLRNVPLDMSFAEAFAVRNADAYERLLLDVIRNNQTLFVRRDEVEAAWQWIDPILKAWEATGQQVQGYTAGTWGPSQSIALIERDGRTWNDAI

SEQ ID NO: 17283 - DNA, 1503 bp, Schizosaccharomyces pombe
  CDS (1)..(1503)
atgagttctgcaaatttatctatcaaggaaaatggcgcaatggtcgttttcggcgcttccggtgatctatccaagaaaaagacgtttccagctcttttctctttgtttagcgaaggacgtctccccaaagatattagaatcgttggctatgcgcgctccaagattgaacatgaagactttttagatcgcattacccaaaacatcaaaattgatgaagaggattcccaggccaaagagaagcttgaggaatttaaaaagagatgctcttactatcgtggctcttacgacaagcctgaagatttcgagggcttgaactctcatttgtgtgagagggaaggcgaccgttctacccacaaccgcattttctatctcgcgttacctcccgacgttttcgtatctgtagctacaaaccttaaaaaaaaatgtgtgcccgaaaaaggtattgctcgtcttgtaatcgagaagccatttggcgtcgatttgaaatccgcccaggaactccaatcccaattagctcccctttttgatgagaaggaaatttatcgtattgatcactatttaggcaaggagatggttcaaaatttggttcatcttcgtttttgcaatcctgttatttctcatctttgggacaaaaacagtatttccagtgttcaaattacattcaaagagcctattggtacggaaggccgtggtgggtactttgactctagtactattgtccgtgatatcgtgcaaaaccaccttgtccaaattctgacccttttgaccatggaaaccccgaccactttctctgcagacgatcttcgtgacgagaaagtcaaggtattgcgtcgcactcgattgggagatctcaaagatattgttcttggtcaatatgtcaaaagcaaggacggtaaaaaacctggctaccttgatgacgagactgttcccaagggtagtaggtgtcccacttactcagctattccctgttttattgataccgaaagatggcgcggcgttcctttcttacttaaagctggtaaagccatggatattggcaaggtagagattcgtgttcagttcaaagctgctgcaaatggtttatttaaggacgcatatcataatgagctcgtaatccgtgttcagccagacgaagctatttacttcaagatgaacattaagcaacccggtcttagtgaggctcccctccttactgatttggacttgacttactctcgtagatttaagaacatgaagctccatgaagcatatgaagcattgtttttggacgcgtttgccggtgaccaatcccgttttgctcgtatcgacgaattagaatgtgcctggtctttagttgatcctcttttgaaatatatggaggaagagaaacctgtacccgagccttacgagtatggttccgatggtcccgaatgtttatactcttttttgaaaaagttcggatatatttatgattcccctgattactatgattatccagtcatgtccgttccttccgatcactaa

SEQ ID NO: 17284 - protein, 500 aa, Schizosaccharomyces pombe
MSSANLSIKENGAMVVFGASGDLSKKKTFPALFSLFSEGRLPKDIRIVGYARSKIEHEDFLDRITQNIKIDEEDSQAKEKLEEFKKRCSYYRGSYDKPEDFEGLNSHLCEREGDRSTHNRIFYLALPPDVFVSVATNLKKKCVPEKGIARLVIEKPFGVDLKSAQELQSQLAPLFDEKEIYRIDHYLGKEMVQNLVHLRFCNPVISHLWDKNSISSVQITFKEPIGTEGRGGYFDSSTIVRDIVQNHLVQILTLLTMETPTTFSADDLRDEKVKVLRRTRLGDLKDIVLGQYVKSKDGKKPGYLDDETVPKGSRCPTYSAIPCFIDTERWRGVPFLLKAGKAMDIGKVEIRVQFKAAANGLFKDAYHNELVIRVQPDEAIYFKMNIKQPGLSEAPLLTDLDLTYSRRFKNMKLHEAYEALFLDAFAGDQSRFARIDELECAWSLVDPLLKYMEEEKPVPEPYEYGSDGPECLYSFLKKFGYIYDSPDYYDYPVMSVPSDH

SEQ ID NO: 17285 - DNA, 1536 bp, Solanum tuberosum
  CDS (1)..(1536)
atggcggcatcatggtgtattgagaaaaggggttctattaggaatgactcttttagagacaatgataatatacctgaaactgggtgtctttctattattgttcttggtgcttctggtgatcttgccaagaagaaaacttttcctgctctcttcaacctctaccgccagggatttcttcaatccaatgaagttcacatttttggctacgcaaggacaaaaatttctgatgatgacttgagaagccgtatccgtgggtatctttctcaggggaaagaaaatgaaggagaagtatcagagtttctgcaactgattaaatacgtcagtggttcttatgattctgctgagggatttacgtcactggataaggcaatatctgagcacgaattctcaaaaaatagcacagaaggatcatccagaagactcttctattttgctcttcctccatcagtatatccctctgtttgcagaatgataaaaagttattgtatgaacaaatctgatcttggtggttggacacggactgttgttgagaagcccttcggcaaggatttagcttcatctgaacaactaagttcccagatcggagaactatttgacgaaccccaaatttatcgcattgaccattatttggggaaggagttggttcagaatttgttggtgctgcgttttgcaaatcgcttctttttgccgctctggaatcgtgacaacattgataatatacagattgtctttagagaggactttggaactgagggccgcggtggatattttgatgaatatgggattatacgtgacattattcagaaccatctattgcaggtcctttgccttgttgccatggagaagcctgtttctcagaagcccgaacacattcgggacgagaaagttaaggttcttcaatcaatgcttccaattgaagatgaagaggttgttcttggacaatatgaaggctataaggatgatccaacggttcctaacaactcaaatactcctacttttgctactatggttttacgcatacacaatgaaagatgggaaggtgtcccctttataatgaaggctggaaaagcactaaattcaagaaaggcagaaatacgagtgcagtttaaggatgttcctggtgatatatttagatgtcaaaagcaggggagaaatgagtttgtgatacgcctccaaccttcagaagccatgtacatgaagcttacggtcaagaaacctgggcttgaaatgtcaactgttcaaagtgaattagacctgtcgtatgggcagcgttaccaaggggtcgtcattccagaggcttatgaacgtctgattctcgacacaataagaggggatcagcagcattttgtgcgtagggatgagctcaaggcggcttgggagatttttacccctcttttgcatagaattgacaatggagaggtgaagccaattccatacaagccaggcagcagaggccctgctgaagcagatgagttgttgcaaaatgccggttacgttcaaactcatggctatatatggatccctcccacactataa

SEQ ID NO: 17286 - protein, 511 aa, Solanum tuberosum
MAASWCIEKRGSIRNDSFRDNDNIPETGCLSIIVLGASGDLAKKKTFPALFNLYRQGFLQSNEVHIFGYARTKISDDDLRSRIRGYLSQGKENEGEVSEFLQLIKYVSGSYDSAEGFTSLDKAISEHEFSKNSTEGSSRRLFYFALPPSVYPSVCRMIKSYCMNKSDLGGWTRTVVEKPFGKDLASSEQLSSQIGELFDEPQIYRIDHYLGKELVQNLLVLRFANRFFLPLWNRDNIDNIQIVFREDFGTEGRGGYFDEYGIIRDIIQNHLLQVLCLVAMEKPVSQKPEHIRDEKVKVLQSMLPIEDEEVVLGQYEGYKDDPTVPNNSNTPTFATMVLRIHNERWEGVPFIMKAGKALNSRKAEIRVQFKDVPGDIFRCQKQGRNEFVIRLQPSEAMYMKLTVKKPGLEMSTVQSELDLSYGQRYQGVVIPEAYERLILDTIRGDQQHFVRRDELKAAWEIFTPLLHRIDNGEVKPIPYKPGSRGPAEADELLQNAGYVQTHGYIWIPPTL

SEQ ID NO: 17287 - DNA, 1488 bp, Streptococcus pneumoniae
  CDS (1)..(1488): transl_table=11
atgtcatctaaggttattgttacaattttcggtgcgagtggagacctggctaaacgcaagctctacccttccctttttagactatatcaatccggcaatctttccaagcactttgccgttattggaactgcccgtagaccttggagtaaggaatattttgaatctgtagttgtcgagtccatccttgatttggcagatagtaccgagcaagcccaagaatttgctagccacttctactatcaaagccatgatgtcaatgattcggaacattatattgctttgcgtcaattacaagctgagcttaatgaaaaataccaagctgaacacaataagctcttcttcttgtctatggcacctcagttctttggaaccattgccaaacacctcaaatctgaaaacattgtcgatggcaaaggttttgagcgcttgatcgttgaaaaaccatttggtacagattacgcaactgcaagcaagttgaatgacgaactcctagcaacatttgacgaagaacaaattttccgtatcgaccattatcttggtaaggaaatgatccaaagcatctttgcagttcgctttgcaaacttgatttttgaaaacgtttggaacaaggattttatcgacaatgttcaaattacctttgcggagcgcttgggtgtagaagaacgtggtggctactatgaccaatccggtgccctccgtgacatggtccaaaaccacactctacaacttctttcgctcctcgccatggacaaaccagcaagcttcacaaaagacgagattcgtgctgaaaagattaaggtctttaaaaacctctatcatccaactgatgaagaactcaaagaacactttatccgtgggcaataccgctctggtaagattgatggcatgaaatacatctcttatcgtagcgagccaaatgtgaatccagaatcaacaactgaaacctttacatctggtgccttctttgtagacagcgatcgattccgtggtgttcctttctttttccgtacaggtaaacgactgactgaaaaaggaactcatgtcaacatcgtctttaaacaaatggattctatctttggagaaccacttgctccaaatattttgaccatctatattcaaccaacagaaggcttctctcttagcctaaatgggaagcaagtaggagaagaatttaacttggctcctaactcacttgattaccgtacagatgcgactgcaactggtgcttctccagaaccatacgaaaaattgatttatgatgtcctaaataacaactcaactaactttagccactgggatgaagtttgtgcgtcatggaagttgattgaccgtattgaaaagctctgggctgaaaatggtgccccacttcatgactataaagctggaagcatgggacctcaagccagctttgacctacttgaaaaattcggtgccaaatggacttggcaaccagatatcacctatcgtcaagatggtcgcttagaataa

SEQ ID NO: 17288 - protein, 495 aa, Streptococcus pneumoniae
MSSKVIVTIFGASGDLAKRKLYPSLFRLYQSGNLSKHFAVIGTARRPWSKEYFESVVVESILDLADSTEQAQEFASHFYYQSHDVNDSEHYIALRQLQAELNEKYQAEHNKLFFLSMAPQFFGTIAKHLKSENIVDGKGFERLIVEKPFGTDYATASKLNDELLATFDEEQIFRIDHYLGKEMIQSIFAVRFANLIFENVWNKDFIDNVQITFAERLGVEERGGYYDQSGALRDMVQNHTLQLLSLLAMDKPASFTKDEIRAEKIKVFKNLYHPTDEELKEHFIRGQYRSGKIDGMKYISYRSEPNVNPESTTETFTSGAFFVDSDRFRGVPFFFRTGKRLTEKGTHVNIVFKQMDSIFGEPLAPNILTIYIQPTEGFSLSLNGKQVGEEFNLAPNSLDYRTDATATGASPEPYEKLIYDVLNNNSTNFSHWDEVCASWKLIDRIEKLWAENGAPLHDYKAGSMGPQASFDLLEKFGAKWTWQPDITYRQDGRLE

SEQ ID NO: 17289 - DNA, 1491 bp, Thermotoga maritima
  CDS (1)..(1491): transl_table=11
atgaagtgcagtctgggattggagaaatgtccggatgataccctccggtgttttccaaagatcgaacaacctttcggaattgtgatcttcggtgcttctggtgacctcacaaaaagaaagctcattcccgctttgaacaggttgttcgaggcaggtattctgcccgaacgctttttcgttctcggtgcggcacgaacgaaaatggacgataagaaattcagatccagattcgatgccaaccctgattttttggaacattgcagttacatcagcgtggattatcaggatcctgagagcttcaaacagttgaaaaacaccatcgagactctcataaaaaggatcgattccagcaatctggtcttctatctcgctgttcctccggatctttacatccctattctggaaaacctctcgaaaactggattgaacgaaaaacctgcgcgcgttgtgatcgaaaaaccgttcgggaaagacctggaatcggccagaagactggaagacactcttcagaaatacttccaggaagatcagattttcagaatcgatcattaccttggaaaagaaaccgttcagaacatactggtgttcaggtttgccaacttcatattcgaggaaatctggaacaacaagttcgtggatcacgttcagatcacgatggccgaagacataggtgttgaacacagggcaggatacttcgaaaacgtgggactcctcagggatatcttccagaaccacatgcttcagatcctcgcactgatcgccatggaacctccttcttctttcaatggagagaatttcagaaacgagcgggtgaagcttctcagatcgatcagaccgttccctgtggaggaactggaaagctggatcgtcagaggccagtatggaagaggggttgtgaacggaaaagaagtgccggcttacagagaggaaccgggtgtggccaaagactccaacgtggaaaccttcgttgccatgaaactcttcatagacaactggagatggagcggtgtacccttctatctgaggtccgggaagagactccccaagaaaataaccgaggttgctgttgttttcaagaagattcctcattcgatctttgccggtgtaccttctgatgaactggagccgaacacgatagttttcaccttgcagccaaacgagggaatctctcttgagtttcaggtgaaaaggccctgtcccggcatgtttccacagcttctcagtatggacttcagatacgaggattactttggagtgaaactgcccgacgcttacgaaagactccttctggacgtgatacttggagatcctacacttttcatgagaagagacgacctcgaagtttcctgggaacttctcgatcccgttctcaaagcctgggaaaacgatcccgttcgcttttcaccttatgtgtatccggcgggaacgtggggaccgagagaagccgatctactcatagaaagggacggtagaaaatggagaaaactgtga

SEQ ID NO: 17290 - protein, 496 aa, Thermotoga maritima
MKCSLGLEKCPDDTLRCFPKIEQPFGIVIFGASGDLTKRKLIPALNRLFEAGILPERFFVLGAARTKMDDKKFRSRFDANPDFLEHCSYISVDYQDPESFKQLKNTIETLIKRIDSSNLVFYLAVPPDLYIPILENLSKTGLNEKPARVVIEKPFGKDLESARRLEDTLQKYFQEDQIFRIDHYLGKETVQNILVFRFANFIFEEIWNNKFVDHVQITMAEDIGVEHRAGYFENVGLLRDIFQNHMLQILALIAMEPPSSFNGENFRNERVKLLRSIRPFPVEELESWIVRGQYGRGVVNGKEVPAYREEPGVAKDSNVETFVAMKLFIDNWRWSGVPFYLRSGKRLPKKITEVAVVFKKIPHSIFAGVPSDELEPNTIVFTLQPNEGISLEFQVKRPCPGMFPQLLSMDFRYEDYFGVKLPDAYERLLLDVILGDPTLFMRRDDLEVSWELLDPVLKAWENDPVRFSPYVYPAGTWGPREADLLIERDGRKWRKL

SEQ ID NO: 17291 - DNA, 1548 bp, Treponema pallidum
  CDS (1)..(1548): transl_table=11
atggggaaaatcagtggcagcggcacggtcgcgccgcacatcctggttatctttggcgcttcaggcgaccttgccgcgcggaagcttatcccctcgctttgggatctctttgagcaagagctcctgccccgtacattcggtatactcggcgcagggcgtacggctctgtctacagagtcttttcgcgcacggcttgcagaggcggtcacaaagcatgcagtgcgcacaccgcacgacccggcgcgcctcaccgaattcctgcagaagatccactacttctcgttcgatcccaccgactctgtcgcctttgccgactttgccacgtacgtgcgcaccctcgaccagtcgctgcacaccgagggcaactttatcttctatcttgccactccccctagcctgtacgaaactatccccacgcagcttgctatgcaccacttgaaccgggaacagggtaattttcgcagggtagttattgaaaaaccctttggctacaacctagaaaccgcgcagcaccttaatgcgagcttgcgtgcccactttcaggaaaaccaaacctatcgcatcgatcactatctgggtaaggaaacggtccaaaacatcctggtcactcgctttgccaatccccttttcgagcccacatggaaccggacccatatcgattacgttgaaattactgcaagcgaatcactaggtgtcgaaaaccgcggcggttactacgaccagtccggtgcattgcgcgatatgatccaaaaccacttgttactcctcttgggtattatcgcgatggaggcgcccgccgtcgtgagttcaagtcgtctacgggatgaaatcgtaaaggtctttgactgcctgcgccctatgggagaacgcgacgtcatgcagcatacggtgcgtgcccaatacgtcgccggcaagatacgcggtgtagccgtccccggctaccttgaggagtcaggcgttgaccctcgctcgtgcactgaaacctttgccgcactcaagtgctacatcgacaattggcggtggatggacgttcccttctacctgcggacgggtaagcgtttgcccacgggcgtcactgaggtgatcgtccattaccgaacgctccccatcgcgcttttcgagcacatcgaacgcccgtgcgcacgcgagggcaacgcgcttgtcattcgcattcaacccgacgaaggaattcagcttaaaatcgacctcaaagagcccggcgcggggttcaagactattcccgtcagtgttgattttcagtattcggctcttacctattcgcacttacccagcgcgtatgagcggctattgcttgactgcatgaatggagacaacacgctctaccatcgagatgacgcggtggagtctgcatggcgcttcatagatcctattcttgccgcatggaaatcaaacaagagtcctctacttacgtaccctgcaggaagctggggtccgaaggctgcagacgacctgatcaaagggagtgctccacggtggcatcacccctcttctacgctgctcagcgatgattttgcctgccgactctag

SEQ ID NO: 17292 - protein, 515 aa, Treponema pallidum
MGKISGSGTVAPHILVIFGASGDLAARKLIPSLWDLFEQELLPRTFGILGAGRTALSTESFRARLAEAVTKHAVRTPHDPARLTEFLQKIHYFSFDPTDSVAFADFATYVRTLDQSLHTEGNFIFYLATPPSLYETIPTQLAMHHLNREQGNFRRVVIEKPFGYNLETAQHLNASLRAHFQENQTYRIDHYLGKETVQNILVTRFANPLFEPTWNRTHIDYVEITASESLGVENRGGYYDQSGALRDMIQNHLLLLLGIIAMEAPAVVSSSRLRDEIVKVFDCLRPMGERDVMQHTVRAQYVAGKIRGVAVPGYLEESGVDPRSCTETFAALKCYIDNWRWMDVPFYLRTGKRLPTGVTEVIVHYRTLPIALFEHIERPCAREGNALVIRIQPDEGIQLKIDLKEPGAGFKTIPVSVDFQYSALTYSHLPSAYERLLLDCMNGDNTLYHRDDAVESAWRFIDPILAAWKSNKSPLLTYPAGSWGPKAADDLIKGSAPRWHHPSSTLLSDDFACRL

SEQ ID NO: 17293 - DNA, 1518 bp, Saccharomyces cerevisiae
  CDS (1)..(1518)
atgagtgaaggccccgtcaaattcgaaaaaaataccgtcatatctgtctttggtgcgtcaggtgatctggcaaagaagaagacttttcccgccttatttgggcttttcagagaaggttaccttgatccatctaccaagatcttcggttatgcccggtccaaattgtccatggaggaggacctgaagtcccgtgtcctaccccacttgaaaaaacctcacggtgaagccgatgactctaaggtcgaacagttcttcaagatggtcagctacatttcgggaaattacgacacagatgaaggcttcgacgaattaagaacgcagatcgagaaattcgagaaaagtgccaacgtcgatgtcccacaccgtctcttctatctggccttgccgccaagcgtttttttgacggtggccaagcagatcaagagtcgtgtgtacgcagagaatggcatcacccgtgtaatcgtagagaaacctttcggccacgacctggcctctgccagggagctgcaaaaaaacctggggcccctctttaaagaagaagagttgtacagaattgaccattacttgggtaaagagttggtcaagaatcttttagtcttgaggttcggtaaccagtttttgaatgcctcgtggaatagagacaacattcaaagcgttcagatttcgtttaaagagaggttcggcaccgaaggccgtggcggctatttcgactctataggcataatcagagacgtgatgcagaaccatctgttacaaatcatgactctcttgactatggaaagaccggtgtcttttgacccggaatctattcgtgacgaaaaggttaaggttctaaaggccgtggcccccatcgacacggacgacgtcctcttgggccagtacggtaaatctgaggacgggtctaagcccgcctacgtggatgatgacactgtagacaaggactctaaatgtgtcacttttgcagcaatgactttcaacatcgaaaacgagcgttgggagggcgtccccatcatgatgcgtgccggtaaggctttgaatgagtccaaggtggagatcagactgcagtacaaagcggtcgcatcgggtgtcttcaaagacattccaaataacgaactggtcatcagagtgcagcccgatgccgctgtgtacctaaagtttaatgctaagacccctggtctgtcaaatgctacccaagtcacagatctgaatctaacttacgcaagcaggtaccaagacttttggattccagaggcttacgaggtgttgataagagacgccctactgggtgaccattccaactttgtcagagatgacgaattggatatcagttggggcatattcaccccattactgaagcacatagagcgtccggacggtccaacaccggaaatttacccctacggatcaagaggtccaaagggattgaaggaatatatgcaaaaacacaagtatgttatgcccgaaaagcacccttacgcttggcccgtgactaagccagaagatacgaaggataattag

SEQ ID NO: 17294 - protein, 505 aa, Saccharomyces cerevisiae
MSEGPVKFEKNTVISVFGASGDLAKKKTFPALFGLFREGYLDPSTKIFGYARSKLSMEEDLKSRVLPHLKKPHGEADDSKVEQFFKMVSYISGNYDTDEGFDELRTQIEKFEKSANVDVPHRLFYLALPPSVFLTVAKQIKSRVYAENGITRVIVEKPFGHDLASARELQKNLGPLFKEEELYRIDHYLGKELVKNLLVLRFGNQFLNASWNRDNIQSVQISFKERFGTEGRGGYFDSIGIIRDVMQNHLLQIMTLLTMERPVSFDPESIRDEKVKVLKAVAPIDTDDVLLGQYGKSEDGSKPAYVDDDTVDKDSKCVTFAAMTFNIENERWEGVPIMMRAGKALNESKVEIRLQYKAVASGVFKDIPNNELVIRVQPDAAVYLKFNAKTPGLSNATQVTDLNLTYASRYQDFWIPEAYEVLIRDALLGDHSNFVRDDELDISWGIFTPLLKHIERPDGPTPEIYPYGSRGPKGLKEYMQKHKYVMPEKHPYAWPVTKPEDTKDN

SEQ ID NO: 17295 - DNA, 1554 bp, Oryza sativa
  CDS (1)..(1554)
atgtcaggaggatctggtgattcttccccttcatcagggcgggctagcttcagttctttgtcaggtttgaaggacctagaactgtcttcagagtctggttgcttgtccattgtggtcctaggtgcttctggagaccttgctaagaagaaaacattcccagcgctgtttcacctctttcagcagggatttctacaatctggagaagtccatatatttgggtatgcaagatcaaatatttcggatgatggattaagagaacgcattcgtggatacctcaaaggagcttcagatgaacatatttcacaatttttgcaattaattaaatatgttagtggttcctacaatagcggggaaggatttgcatcattaaataacgccatttcagagaatgaaacttcgaagaacaacaaaccaggaagctcacgtagactattttatttggcattgcctccatcagtctacccctcagtatgcaaaatgataagatcatactgcatgaatccatcttctcattctggctggacaagggttattgttgaaaagccctttgggaaggacttggagtctgcagaggaactcagtgcccagcttggagagctgtttaatgaacaacagctgtacagaattgaccactatttaggaaaagaattggtccaaaatctgcttgtgcttcgctttgcaaaccgtttgttcctacctctttggaatcgtgataacattgctaatgtacagattgtattcagagaggactttgggactgaaggacgtggagggtactttgatcaatatggcatcattcgtgatatcattcagaaccatttgttgcaggtcttctgtttggtggctatggaaaagcctgtctctcttaagcctgagcacataagagatgaaaaagtcaaggttcttcagtcagtgacacctataaagcatgatgaggtggtccttgggcaatatgatggctacaaggatgactctacggtaccagatgactccaacacacctacttttgcatctcttgtattgagggtaaacaatgaaagatgggaaggagttcctttcattctcaaggctggcaaagcactgaacaataggaaagcagagatacgtgtgcagttcaaggatgctcctggtgacatttttaaatgcaagaagcaaggaaggaatgaattcgttatacggttgcagccatcggaagccatgtatatgaaattaactgtcaagaaacccggactagaaatggcaaccgaacaaagcgagctggatctgtcatatgggctacgctaccaagacgtgaagatcccagaagcgtatgaacgcctcatcctggatacgataagaggggatcagcagcactttgttcgccgagacgaactgaaggctgcgtgggagatcttcactccgctgctgcacgacatcgacgacggcaaggtgaaggccctgccgtacaagccgggaacccggggacccccagaggccgacgagctgagcaagaggatgggctacgtgcagacccatggctacgtttggatacctccaaccctttcaaaattctag

SEQ ID NO: 17296 - protein, 517 aa, Oryza sativa
MSGGSGDSSPSSGRASFSSLSGLKDLELSSESGCLSIVVLGASGDLAKKKTFPALFHLFQQGFLQSGEVHIFGYARSNISDDGLRERIRGYLKGASDEHISQFLQLIKYVSGSYNSGEGFASLNNAISENETSKNNKPGSSRRLFYLALPPSVYPSVCKMIRSYCMNPSSHSGWTRVIVEKPFGKDLESAEELSAQLGELFNEQQLYRIDHYLGKELVQNLLVLRFANRLFLPLWNRDNIANVQIVFREDFGTEGRGGYFDQYGIIRDIIQNHLLQVFCLVAMEKPVSLKPEHIRDEKVKVLQSVTPIKHDEVVLGQYDGYKDDSTVPDDSNTPTFASLVLRVNNERWEGVPFILKAGKALNNRKAEIRVQFKDAPGDIFKCKKQGRNEFVIRLQPSEAMYMKLTVKKPGLEMATEQSELDLSYGLRYQDVKIPEAYERLILDTIRGDQQHFVRRDELKAAWEIFTPLLHDIDDGKVKALPYKPGTRGPPEADELSKRMGYVQTHGYVWIPPTLSKF

SEQ ID NO: 17297 - DNA, 1890 bp, Oryza sativa
  CDS (1)..(1890)
atggcggggctcgcggtgtcggcttccccagctccggcgccggcgtccttccggccggcggcggcggcctcgcgcttcggcccgtgtgcacaggttgcaggacctgctgccaattttagaacacgagtttgtggactgagatgtttgatcgctgcaaagctgaagttccggaaggccttgaagaggcatggatggcagcttcgaaggaatctagaagtccgagccaatgataaagtgcctgattggttggaggctacaccactgactgagaatataatgtctcgggacgtacaactcgcgtatgattctggaggtgaaacatcaaatacatgccctgatactttggacagttcagtcattgagcaaagttcaatgcatcacaaacttaacccctctgaaacccatcctcctgtgctgaaggaagaccctgttctattcgacgacccacctgaaagcgcagcgcctctttgcattgctgtaattggagcaactggtgaactggcaaaaaataaagtgttccctgcactatttgctctgtattacagtggttttcttcctcagaatgtcggtatatttgggtattctaggaagacactaacggatgaagatttaagatccatgattgaagccaatttgacctgccgggttgaccaccacgaaaactgtgatgaaaagttaaatgaatttcttaaaaggacatactatatagatgcaggatatgacaacaaagatgggatggtgaaactaaattccaaaatgtcacagatagagggtaattgtgcagcaaacaggatattttaccttgctgttccccaagaggcacttcttgatgttgcactgtcactagctgacagtgcccaaactatgcaaggctggaataggataataattgagaaaccatttggcttcactggtttgtcttcacatcgggtaacacaatcactgctgtcaagatttgaggaggagcagatttacaggattgatcatcttttggggaaggatctgattgaaaatctcaccgtcttgagattttctaatttggtgtttgaacctttgtggagtcgcacctatatacgcaatgtacaggtcatattttctgaagaaacagcagcagaaatccaagggagatactttggaaattatggcataattcgtgacatagtgcatagtcacattcttcaaacaatagcactatttgcgatggaaccacctgtaagccttgatggagaggatatccgagatgaaaaggtgaaggtgctcagatcaattcgacaggtgaaccttgaggatgttgttcttggtcaactgaaagatacctctgtgaaagttgacagatatacaaaatcattgacaccaacctattttgctgctgccatgtacattgacaattcgcgttgggatggagtaccatttttgatcaagacaggaattgggctcatggaaaatagagctgagattcgtattcagtttcgccatgttcctggcaatatctatcgtgaacgctttggccatgacatagatcttgacacaaatgagctgatcttgcgtgatcaacctgaagaagccatccttttgaaagtcaacaataaggtcccaggacttgggctccagttagatgcttcagaactcaacctgctttacagggataggtacaatgtcgaactgccagattcgtatgagcatcttcttcttgatgtgcttgatggagacagtcatctattcatgcgcagtgatgaagtagctgctgcatggaacgtgctaactccactaatccatgagattgatcagaatagaatagctcctgagctctacgaggctgggggtagaggacccgttaatgcgtactaccttgctgctaaacatggggtcagattggatgatgaatggtga

SEQ ID NO: 17298 - protein, 629 aa, Oryza sativa
MAGLAVSASPAPAPASFRPAAAASRFGPCAQVAGPAANFRTRVCGLRCLIAAKLKFRKALKRHGWQLRRNLEVRANDKVPDWLEATPLTENIMSRDVQLAYDSGGETSNTCPDTLDSSVIEQSSMHHKLNPSETHPPVLKEDPVLFDDPPESAAPLCIAVIGATGELAKNKVFPALFALYYSGFLPQNVGIFGYSRKTLTDEDLRSMIEANLTCRVDHHENCDEKLNEFLKRTYYIDAGYDNKDGMVKLNSKMSQIEGNCAANRIFYLAVPQEALLDVALSLADSAQTMQGWNRIIIEKPFGFTGLSSHRVTQSLLSRFEEEQIYRIDHLLGKDLIENLTVLRFSNLVFEPLWSRTYIRNVQVIFSEETAAEIQGRYFGNYGIIRDIVHSHILQTIALFAMEPPVSLDGEDIRDEKVKVLRSIRQVNLEDVVLGQLKDTSVKVDRYTKSLTPTYFAAAMYIDNSRWDGVPFLIKTGIGLMENRAEIRIQFRHVPGNIYRERFGHDIDLDTNELILRDQPEEAILLKVNNKVPGLGLQLDASELNLLYRDRYNVELPDSYEHLLLDVLDGDSHLFMRSDEVAAAWNVLTPLIHEIDQNRIAPELYEAGGRGPVNAYYLAAKHGVRLDDEW

SEQ ID NO: 17299 - DNA, 1734 bp, Oryza sativa
  CDS (1)..(1734)
atggccggcaccggcttacgattccggcagggcgccatcttcttctcaggagctcatgctgctgctcatccaagaacaaggactcctcaccaccattgctcacctcagaggacgcacgatgcgagaggaaggtgccgcctcacggctaagtccgcaaatggacgcccacagatcagtgcctccttcagagatgtggcgatagatggggcacagtctgaagatggggcgccagagcagggaggatccaccgtcagcatcaccgtcgtcggcgcctccggcgatctcgccaagaagaagatctttcccgcgcttttcgccctgtactacgaggactgcctcccggagcattttacagtttttggttatgctcgtagcaagatgagcgatgaagagctcaggaacatgattagcttgactctgacatgccggattgatcagagggagaactgcagtgacaagatggaacagtttctgaagagatgcttttatcaatctgggcagtacaattcagaggaagggttttctgaactggacagaaagctaaaagaaaaggaggctggcaaggtaccaaacaggctcttttacctgtcgattccaccgaacatatttgtcgatgtggtgagatctgctagtcgcacagcatcatctcaagacggatggacaaggttcatagtggagaagccattcggccgcgattccgagtcgtcaggggagctcactcgaaacttgaagaagtacttggccgaggagcagatattcaggattgaccattatttggggaaggagctggttgagaacctctcggtgctccgtttctccaatctcgtcttcgagccactgtggtcgaggaactacatcaggaatgtgcagctcatattttctgaagatttcggcacggagggtcgaggcggctacttcgacaactacgggatcatcagggacataatgcagaaccacctgctgcagatcctggccctgttcgccatggagactccggtcagcctcgacgccgaggacatccgcaacgagaaggtgaaagtgctgaggtcgatgaggcagctgaggctggaggacgtggtggtgggtcagtacaaggggcacagcaagggcgggaagacgtacccggcgtacgtggacgacccgacggtgccgagcggcagcatcacgccgacgttcgccgccgccgccctcttcatcgacaacgcccgctgggacggcgtccccttcctcatgaaggccggcaaggccctgcacacgcgacgggcggagatcagggtgcagttccggcgggtgccggggaacctgtacgggcggcggagccggagcgtgggcggcggcgggacgacagcgacgagggagctggagaaggcgacgaacgagctggtgctgcgggtgcagcccgacgaggcgatctacctcaagatcaacagcaaggtgcccgggctggggatgaggctggacagcagcgacctcaacctgctctactccgagcgctaccccgccgagatccccgacgcctacgagcgcctgctgctcgacgccatcgagggcgagcgccgcctcttcatccgcagcgacgagctcgacgccgcctgggccatcttcacccccgtcctcgccgacctcgaggccaacaaggtggcacccgagctctacccgtacggcagccggggacccgtcggagcgcactacctcgccgccaaccacaacgtccgctggggtgacattagctag

SEQ ID NO: 17300 - protein, 577 aa, Oryza sativa
MAGTGLRFRQGAIFFSGAHAAAHPRTRTPHHHCSPQRTHDARGRCRLTAKSANGRPQISASFRDVAIDGAQSEDGAPEQGGSTVSITVVGASGDLAKKKIFPALFALYYEDCLPEHFTVFGYARSKMSDEELRNMISLTLTCRIDQRENCSDKMEQFLKRCFYQSGQYNSEEGFSELDRKLKEKEAGKVPNRLFYLSIPPNIFVDVVRSASRTASSQDGWTRFIVEKPFGRDSESSGELTRNLKKYLAEEQIFRIDHYLGKELVENLSVLRFSNLVFEPLWSRNYIRNVQLIFSEDFGTEGRGGYFDNYGIIRDIMQNHLLQILALFAMETPVSLDAEDIRNEKVKVLRSMRQLRLEDVVVGQYKGHSKGGKTYPAYVDDPTVPSGSITPTFAAAALFIDNARWDGVPFLMKAGKALHTRRAEIRVQFRRVPGNLYGRRSRSVGGGGTTATRELEKATNELVLRVQPDEAIYLKINSKVPGLGMRLDSSDLNLLYSERYPAEIPDAYERLLLDAIEGERRLFIRSDELDAAWAIFTPVLADLEANKVAPELYPYGSRGPVGAHYLAANHNVRWGDIS

SEQ ID NO: 17301 - DNA, 1767 bp, Oryza sativa
  CDS (1)..(1767)
atggcgctctcctgcatgaggtgctccccggccgccggcgccgtacgacgaggattggcatcggcggctccgccggcggcgctctccttcgccagatgcggcctccgtagagcggccgcgctcgggtggcgcgtcgccgccgtcaccactacgggagtgcaaggtgccaaggatgctggtctggagaaggctgccagaagtgcttcccaatcaaaggtggaaaatggctcaccttcagaaatcattttagatgattttgaagacttgagccctctatcagaaaatgatgactccactgttagtatcactgtagtcggagcatctggtgaccttgccaagaagaagatatttcctgcactttttgctctatactatgaagattgtcttccaaagcatttcactatcttcggatatgcacgcagcaagatgacagatgctgaattgagaaacatggtcagcaaaacactgacatgcagaatagataaaagggaaaactgtaatgagaagatggaagagtttttaaagagatgcttctatcattcaggccaatatgattcagaggagcatttcatggaccttgacaagaagctgaaacaacatgagggttccagagtttctaaccgtcttttctacttgtcaataccaccaaatatattccttgatgttgtaaaatgtgcaagcaaatcagcatcatctgggaatggttggacaagggtaattgttgagaaaccttttggtcgtgactcagattcatcttctgcattaacaaggggtctgaagcagtacctggtagaggaccaaatcttcaggattgaccactacttgggaaaggaactagtggagaacctgtctgtccttcgcttctcaaatcttgtttttgaacctctatggtcaaggcagtatataaggaatgtgcagctgatattctcagaggatttcggcactgaaggacgaggagggtactttgataggtatggtattatccgtgacataatgcagaatcatcttcttcagatactagccctatttgcaatggaaactcctgttagcttggaggcagaggacataagaaacgaaaaggttaaagttctgcgttccatgaagcccctgcaactggaagatgtggtgataggacagtacaaaagtcatacaaagggtggtaccacataccctggatacactgaagataagacggtgcccaaggatagtgtaaccccaacatttgctgcagctgcacttttcataaataatgctagatgggatggagttccttttcttatgaaagctgggaaggctttacatacaaagggggctgagattagagtacagttccgacatgttcctggtaatctttataagaggagttttgggactgatcttgatacagccactaatgaacttgtcatacgtgtgcaacctgatgaagctatctacttgaagattaacaacaaaattcctggtcttggtatgagactagatagaagtaatttgaatcttcactatgcagcaaggtactccaaggagataccagatgcttatgagaggctcttacttgatgccattgaaggagagcgaaggctttttatccgttctgatgagttggatgccgcatgggagctcttcactcccttactcaaggagctggaagagaagcggatagcccctgagctatacccttatggaagccgcggtcctgtaggggctcactaccttgcagcaaagtacaacgtcagatggggtgatttgaccacagaacagaaggcatga

SEQ ID NO: 17302 - protein, 588 aa, Oryza sativa
MALSCMRCSPAAGAVRRGLASAAPPAALSFARCGLRRAAALGWRVAAVTTTGVQGAKDAGLEKAARSASQSKVENGSPSEIILDDFEDLSPLSENDDSTVSITVVGASGDLAKKKIFPALFALYYEDCLPKHFTIFGYARSKMTDAELRNMVSKTLTCRIDKRENCNEKMEEFLKRCFYHSGQYDSEEHFMDLDKKLKQHEGSRVSNRLFYLSIPPNIFLDVVKCASKSASSGNGWTRVIVEKPFGRDSDSSSALTRGLKQYLVEDQIFRIDHYLGKELVENLSVLRFSNLVFEPLWSRQYIRNVQLIFSEDFGTEGRGGYFDRYGIIRDIMQNHLLQILALFAMETPVSLEAEDIRNEKVKVLRSMKPLQLEDVVIGQYKSHTKGGTTYPGYTEDKTVPKDSVTPTFAAAALFINNARWDGVPFLMKAGKALHTKGAEIRVQFRHVPGNLYKRSFGTDLDTATNELVIRVQPDEAIYLKINNKIPGLGMRLDRSNLNLHYAARYSKEIPDAYERLLLDAIEGERRLFIRSDELDAAWELFTPLLKELEEKRIAPELYPYGSRGPVGAHYLAAKYNVRWGDLTTEQKA

SEQ ID NO: 17303 - DNA, 1551 bp, Brassica napus
  CDS (1)..(1551)
atggattctgggcagtggcacgttgagaagaggtccactttgaggaacgaatcgtttttaaaagagtacggtccagtctccgaaactggtagcctctccatcgtagttcttggtgcttctggtgatctcgccaagaagaagacttttcctgctcttttcaatctctaccaccaggggttccttaatccagatgaagttcatatctttggatatgcaaggagtaagatttctgatcaggagctgagagacaagatccatggatatcttgttgatgagaagaatgcttctgagaaagcggaagctttgtccaagtttctccagctgattaagtatgtgagtggtccttatgattctgaggacgggttcaaaaggctagaaaaggcaatctccgagcacgaaatctcgaaaaagacctctgaaggatcttcgaggagattgttttatcttgctctccctccctctgtataccctcctgtatgcaagatgatcaaggcatggtgcactaacacatctgatcttggtggatggacacgtgtcgtcgttgagaagccatttggaaaggacttggaatctgcagagcagcttagttcccagattggagcactgtttgatgagcctcagatttaccgtattgatcattacctgggaaaggaactagtccaaaacatgctggtccttaggtttgccaaccggttatttctgccgctatggaaccgtgacaacatagctaacgtccagattgttttcagggaagattttggaactgaaggccgtgggggatactttgatgaatacggaatcatccgtgatattattcaaaaccacttgctccaggttctttgccttgttgcaatggagaaaccagtctctcttaaacctgagcacatccgtgatgagaaagtgaaggttcttcaatcagtgatgcctataaaagatgaagaggtggttcttggacagtacgaaggttatagagatgatccaactgttccaaacgactcaaacactccaacctttgccacaacaattcttcgcatagacaatgaaagatgggaaggtgttccgtttatactgaaagccggaaaggcaatgagttcaaagaaggcagatattcggattcagtttaaggatgttcctggcgacatattcaaatgtcaaaagcaagggaggaacgagtttgtcatacgcttgcaaccttcggaggccatgtacatgaagctaactgtgaagcaaccgggtctagagatgcaaaccgtgcagagtgaactagacctatcttacaagcaacgttaccaagatgtcccgattccagaggcttacgagcgcctcattctcgacacaatcaaaggtgaccagcaacactttgttcgcagagatgagctgaaggcagcttgggaaatcttcactccactacttcacaggataggtaacggagaagtgaaatcgatcccatacaaaccaggaagccgagggccaacggaagcagatcagctgctagagaaaactggttatttgcagacccatggctacatatggatccctcctacgctgtaa

SEQ ID NO: 17304 - protein, 516 aa, Brassica napus
MDSGQWHVEKRSTLRNESFLKEYGPVSETGSLSIVVLGASGDLAKKKTFPALFNLYHQGFLNPDEVHIFGYARSKISDQELRDKIHGYLVDEKNASEKAEALSKFLQLIKYVSGPYDSEDGFKRLEKAISEHEISKKTSEGSSRRLFYLALPPSVYPPVCKMIKAWCTNTSDLGGWTRVVVEKPFGKDLESAEQLSSQIGALFDEPQIYRIDHYLGKELVQNMLVLRFANRLFLPLWNRDNIANVQIVFREDFGTEGRGGYFDEYGIIRDIIQNHLLQVLCLVAMEKPVSLKPEHIRDEKVKVLQSVMPIKDEEVVLGQYEGYRDDPTVPNDSNTPTFATTILRIDNERWEGVPFILKAGKAMSSKKADIRIQFKDVPGDIFKCQKQGRNEFVIRLQPSEAMYMKLTVKQPGLEMQTVQSELDLSYKQRYQDVPIPEAYERLILDTIKGDQQHFVRRDELKAAWEIFTPLLHRIGNGEVKSIPYKPGSRGPTEADQLLEKTGYLQTHGYIWIPPTL

SEQ ID NO: 17305 - DNA, 1713 bp, Brassica napus
  CDS (1)..(1713)
atggcgacgcatactatgatcgttcgttcctcatcctctgctctcgctgcttcgtctccattaacagagactctaccactcttcactactagatctctcacattcccgagaaaatcctccttctctcgtcttcgcttgagattctttgccgaaaaactttctcagctcgactcctctaatcgctgtgcctctttacaagactctggagaacatcttacagaggagcatgacacaaaagaagagtcatccactcttagtattacagtggttggagcctctggagatttggccaataagaaaatattccctgcattgtttgctctcttttacgagggttgtcttcctcaggacttctctgtttttggttatgctcggaccaaactcacccatgaggagcttcgtgtcatgatcagtagaactttaacttgtcggatagaccaaagggagaactgtgtggacaaaatggatcagttcttaaagagatgcttttaccattcgggtcagtataactctgaagatgattttgcagaactaaacaccaagctcaaagagaaagaggaaggaaagctatcaaacaggctgtactatttgtcaattccaccaaacatattcgtggatgtggtaaggtgtgcaagccttagagcctcctcagtgaatggctggacaagagtcattgtcgaaaagccattcggtcgcgactctgaatcatctggagagttaaccagatgtcttaaacagtatctcacagaggagcaaatcttcaggatcgaccactatttgggaaaagaactcgttgagaacctttcagtgcttcgattctcaaatcttgttttcgagcctctttggtctagaaattacatacgcaacgttcaactcattttctctgaagactttggtacagaaggacgcggaggttactttgatcaatatggaatcatacgagacatcatgcaaaaccatctcttgcaaattcttgcacttttcgcaatggagacacctgtgagcttagacgctgaggacataaggagcgaaaaggtcaaagttctgaggtcaatgaaaccgttgctgcttcaagatatgattgtgggtcagtacaaaggtcatagcaagggtggaaaggcttatcctggttatacggacgacccaacagttcccacaaacagtctcactcctacatttgctgcagccgctatgttcatcaacaacgcgagatgggacggtgtccctttccttatgaaagctggaaaagctctgcataccagaggtgcagagatcagagttcagttcagacatgtcccggggaacttgtacaagaagaatttcgccactgatttagacaaggcaactaatgagctagtgatcagagttcaacctgatgaaggtatatacctgaggatcaacaacaaagtccctggtctcggaatgagactcgaccgaagcgaccttaaccttctctatcggtccaggtatccaagagagatcccagatgcatatgaaaggctgcttcttgatgctattgaaggagaaaggaggttgtttataagaagtgatgagttagatgcagcatgggatctattcacaccggctttgaaggagctcgagcacaagaaaatagttcctgagctatatccatatgggagcagaggtcctgttggcgctcattaccttgcatctaagtacaatgtgagatggggagatcttgaagatgcttaa

SEQ ID NO: 17306 - protein, 570 aa, Brassica napus
MATHTMIVRSSSSALAASSPLTETLPLFTTRSLTFPRKSSFSRLRLRFFAEKLSQLDSSNRCASLQDSGEHLTEEHDTKEESSTLSITVVGASGDLANKKIFPALFALFYEGCLPQDFSVFGYARTKLTHEELRVMISRTLTCRIDQRENCVDKMDQFLKRCFYHSGQYNSEDDFAELNTKLKEKEEGKLSNRLYYLSIPPNIFVDVVRCASLRASSVNGWTRVIVEKPFGRDSESSGELTRCLKQYLTEEQIFRIDHYLGKELVENLSVLRFSNLVFEPLWSRNYIRNVQLIFSEDFGTEGRGGYFDQYGIIRDIMQNHLLQILALFAMETPVSLDAEDIRSEKVKVLRSMKPLLLQDMIVGQYKGHSKGGKAYPGYTDDPTVPTNSLTPTFAAAAMFINNARWDGVPFLMKAGKALHTRGAEIRVQFRHVPGNLYKKNFATDLDKATNELVIRVQPDEGIYLRINNKVPGLGMRLDRSDLNLLYRSRYPREIPDAYERLLLDAIEGERRLFIRSDELDAAWDLFTPALKELEHKKIVPELYPYGSRGPVGAHYLASKYNVRWGDLEDA

SEQ ID NO: 17307 - DNA, 1869 bp, Hordeum vulgare
  CDS (1)..(1869)
atggttacgacagtcctcgccgtggcggcttcagcagctccagcgccgcctccgtcgttggctgcgcgcttcagcccggttgcaggacctgctgtcggttttagagcgcattgttggattactgccaagatgaagctccacaaggccctggggaggcatggatggcaagtccagagaaagctggatattcgaggggatggtaaaattcctgactacttcgaggttgcatggcggactggaaatataactcgtcggaatgtacaacctgctggtgaaactggaggtgaaacggcaaatacaagctctgttatgtcagataactcgatcgatgacaaaggtttattgcatctgggactcaacaactctgaagctgatcgtcctgtactagaggaagaccttgttctgtttgataactttaatgaccaacctgaaagtgtaccatctctttgcattgctgtcattggagctactggcgaactggcaagaagtaaagtcttcccagcactatttgctctgtattacagtggttttcttcctcagaatgttgccatatttggatattctagaaagacattggcagacgaggatttaagatccatgattgaatccaatttgacctgtcgggtagatcaccacgaaaactgtgaagacaagttaaatgaattccttaaaaggacatactatgtcgatgcaggacacgataataaagatgggatggcgaaactaaatttgagaatgacacagatagagggcacttgtgcagcaaacaggatattctaccttgctgttccccaagaggcacttcttgatgtggcattgccattatctgacattgcccaaactaagcatggctggaataggataattatcgagaaaccatttggcttcactagtttgtcctcacaacgggtaacacagtctttgttgtcaagatttgaagagaagcaaatttaccgaattgatcatcttttggggaaggatctaattgaaaatctcactgtcttgagattttctaatttggtgtttgaaccattatggagtaggaagtacatacgtaatgtgcaggtcgttttttcagaagaaacatcaacagaaacacaagggaggtacttcggaaactatgggataatccgtgatatagtgcacagccacattcttcaaacgatagcactatttgctatggaaccacctgtaagtcttgatggggaggatatccgcgatgagaaggtgaaggtgctcagatcaattagaaaagtggacattgatgatgtcgtccttggtcaactcaaaaatacctgtggtaaagttgaccaatatacaaaatcaatgacacctacctacttggctgccgcaatgtacattgacaatgcacgttgggatggggtaccttttttgatcaagactggaatgggacttatggagaatagagctgagattcgtattcaatttcatcacgtccctggcaatatctaccgtgaacgttttggtcatgacatagatcttgacacaaatgagctggttttacgtgacctacccgaagaagccattctcttgaaagtcaacaataaggtcccgggtcttgggctccagttggatgcttcagagctcaacctactttacagagacaggtacgatgttgaagttccagattcatatgagcatcttcttttggatgttctagatggcgatagtcatctgttcatgcgaagtgatgaattagctgctgcatggagcgtgttggcgccaatactccatgagatcgaccagaagagggttgctcctgagctctacgaggctggggataaaggaccgattaatgcttactatctcgctgctaaacatggagtccgatgggatgatggctgctga

SEQ ID NO: 17308 - protein, 622 aa, Hordeum vulgare
MVTTVLAVAASAAPAPPPSLAARFSPVAGPAVGFRAHCWITAKMKLHKALGRHGWQVQRKLDIRGDGKIPDYFEVAWRTGNITRRNVQPAGETGGETANTSSVMSDNSIDDKGLLHLGLNNSEADRPVLEEDLVLFDNFNDQPESVPSLCIAVIGATGELARSKVFPALFALYYSGFLPQNVAIFGYSRKTLADEDLRSMIESNLTCRVDHHENCEDKLNEFLKRTYYVDAGHDNKDGMAKLNLRMTQIEGTCAANRIFYLAVPQEALLDVALPLSDIAQTKHGWNRIIIEKPFGFTSLSSQRVTQSLLSRFEEKQIYRIDHLLGKDLIENLTVLRFSNLVFEPLWSRKYIRNVQVVFSEETSTETQGRYFGNYGIIRDIVHSHILQTIALFAMEPPVSLDGEDIRDEKVKVLRSIRKVDIDDVVLGQLKNTCGKVDQYTKSMTPTYLAAAMYIDNARWDGVPFLIKTGMGLMENRAEIRIQFHHVPGNIYRERFGHDIDLDTNELVLRDLPEEAILLKVNNKVPGLGLQLDASELNLLYRDRYDVEVPDSYEHLLLDVLDGDSHLFMRSDELAAAWSVLAPILHEIDQKRVAPELYEAGDKGPINAYYLAAKHGVRWDDGC

SEQ ID NO: 17309 - DNA, 1800 bp, Brassica napus
  CDS (1)..(1800)
atgatggcgtctttgtcttcctccgtcacctcccaatcatatcgtaccggttattctgcttcttgctcaccggttaacggtaacaaacatcgatcactctcgttcctatctgcttctcctcaaggacttaaagctcatgagctctgtgttagattccagaggaagtctagtcgtagttctgtctttatgcaagatggtgcaatagtcaccaattcagattcaacagagagtagtaaatcttctctcaagggattgaaagatgaggtgttatcagtaatagctcaagaagcagccaaggttggagaaggatctaatggtcagaaccagtcaacagttagtatcacagtggttggagcctctggtgatctcgccaagaagaagattttcccggctcttttcgcactttactatgaagactgtcttcctgagcattttacaatatacggttactctaggagtaaaatgacagatggtgaacttagaaacatggtcagcaaaaccctcacctgcaggattgataagagggcaaactgtggtgagaagatggaagaatttctcaagagatgcttttaccattctggtcagtatgattctcaggaacattttactgaactggacaagaagctcaaggaacatgaggctggaagaatctcaaaccgcctcttttacttgtcaatccctccaaatatatttgtagacgctgtgaaatgtgcaagctcttctgcttcatctgtcaatggatggactagagtcattgtcgagaaaccttttggccgagattccaaaacctccgctgctttaacaaaatcccttaagcagtacctggaggaagaccaaatatttaggatagaccattacctaggaaaggagctagttgagaacttatcagttctcagattctcaaacctcatattcgaaccgttatggtcaaggcagtacataaggaacgtgcagttcatattctctgaggactttggcactgaaggacgtggagggtactttgaccattacggaatcataagagatataatgcagaatcatctccttcaaatactagcactcttcgccatggaaacacccgttagcttagacgcagaggacatcagaaacgaaaaggttaaggttctacgttcgatgaggccaattcaaatagaagatgtggtgataggacagtacaagagccacacaaagggaggagtcacatatccaggctacaccgatgataaaactgtaccaaaagatagcctgacaccgacgtttgcagctgctgcactcttcatagacaatgcaagatgggacggtgtgccttttctaatgaaagctggcaaagcactacacaccaggagggcagagataagagtgcagttcaggcatgtgccgggaaacttatataacaggaacaatactggtactaatcttgacaaaaccacaaacgagcttgtcatccgtgtccaaccagatgaagcaatatatctgaaaataaacaacaaggtccctggtttggggatgagactagatcgcagtaacttgaatcttctatattcagcaaggtattcaaaggagataccagatgcatatgagaggcttttgctggatgcaatagaaggagaaagaaggttgttcataagaagcgacgaacttgacgcagcttgggcactattcactccactgctcaaagagattgaagaaaagaagacaataccagagtactatccttacggcagtcgtggtccagttggtgctcattatctagctgcaaaacacaaggtccaatggggagacatgagtctcgaccagtaa

SEQ ID NO: 17310 - protein, 599 aa, Brassica napus
MMASLSSSVTSQSYRTGYSASCSPVNGNKHRSLSFLSASPQGLKAHELCVRFQRKSSRSSVFMQDGAIVTNSDSTESSKSSLKGLKDEVLSVIAQEAAKVGEGSNGQNQSTVSITVVGASGDLAKKKIFPALFALYYEDCLPEHFTIYGYSRSKMTDGELRNMVSKTLTCRIDKRANCGEKMEEFLKRCFYHSGQYDSQEHFTELDKKLKEHEAGRISNRLFYLSIPPNIFVDAVKCASSSASSVNGWTRVIVEKPFGRDSKTSAALTKSLKQYLEEDQIFRIDHYLGKELVENLSVLRFSNLIFEPLWSRQYIRNVQFIFSEDFGTEGRGGYFDHYGIIRDIMQNHLLQILALFAMETPVSLDAEDIRNEKVKVLRSMRPIQIEDVVIGQYKSHTKGGVTYPGYTDDKTVPKDSLTPTFAAAALFIDNARWDGVPFLMKAGKALHTRRAEIRVQFRHVPGNLYNRNNTGTNLDKTTNELVIRVQPDEAIYLKINNKVPGLGMRLDRSNLNLLYSARYSKEIPDAYERLLLDAIEGERRLFIRSDELDAAWALFTPLLKEIEEKKTIPEYYPYGSRGPVGAHYLAAKHKVQWGDMSLDQ

SEQ ID NO: 17311 - DNA, 1800 bp, Brassica napus
  CDS (1)..(1800)
atgatggcgtctttgtcttcctccgtcacctcccaatcatatcgtaccggttattctgcttcttgctcaccggttaacggtaacaaacatcgatcactctcgttcctatctgcttctcctcaaggacttaaagctcatgagctctgtgttagattccagaggaagtctagtcgtagttctgtctttatgcaagatggtgcaatagtcaccaattcagattcaacagagagtagtaaatcttctctcaagggattgaaagatgaggtgttatcagtaatagctcaagaagcagccaaggttggagaaggatctaatggtcagaaccagtcaacagttagtatcacagtggttggagcctctggtgatctcgccaagaagaagattttcccggctctttttgcactttactatgaagactgtcttcctgagcattttacaatatacggttactctaggagtaaaatgacagatggtgaacttagaaacatggtcagcaaaaccctcacctgcaggattgataagagggcaaactgtggtgagaagatggaagaatttctcaagagatgcttttaccattctggtcagtatgattctcaggaacattttactgaactggacaagaagctcaaggaacatgaggctggaagaatctcaaaccgcctcttttacttgtcaatccctccaaatatatttgtagacgctgtgaaatgtgcaagctcttctgcttcatctgtcaatggatggactagagtcattgtagagaagccttttggccgagattctgaaacctctgctgctttaaccaaatcactcaagcagtacttggaggaagatcaaatatttaggatagaccattacttaggaaaggagctagtagagaacttatcagttctcagattctcaaaccttatattcgaaccgttatggtcaaggcagtacataaggaacgtgcagttcatattctctgaggactttggcaccgaaggacgcggagggtactttgaccactacggaataataagagacataatgcagaatcacctccttcaaatactagcactcttcgccatggaaacacctgttagcttagacgcagaggacatcagaaacgaaaaggttaaggttctacgttcgatgaggccaattcaaatagaagatgtggtgataggacagtacaagagccacacaaagggaggagtcacatatccaggctacaccgatgataaaactgtaccaaaagatagcctgacaccgacgtttgcagctgctgcactcttcatagacaatgcaagatgggacggtgtgccttttctaatgaaagctggcaaagcactacacaccaggagggcagagataagagtgcagttcaggcatgtgccgggaaacttatataacaggaacaatactggtactaatcttgacaaaaccacaaacgagcttgtcatccgtgtccaaccagatgaagcaatatatctgaaaataaacaacaaggtccctggtttggggatgagactagatcgcagtaacttgaatcttctatattcagcaaggtattcaaaggagataccagatgcatatgagaggcttttgctggatgcaatagaaggagaaagaaggttgttcataagaagcgacgaacttgacgcagcttgggcactattcactccactgctcaaagagattgaagaaaagaagacaataccagagtactatccttacggcagtcgtggtccagttggtgctcattatctagctgcaaaacacaaggtccaatggggagacatgagtctcgaccagtaa

SEQ ID NO: 17312 - protein, 599 aa, Brassica napus
MMASLSSSVTSQSYRTGYSASCSPVNGNKHRSLSFLSASPQGLKAHELCVRFQRKSSRSSVFMQDGAIVTNSDSTESSKSSLKGLKDEVLSVIAQEAAKVGEGSNGQNQSTVSITVVGASGDLAKKKIFPALFALYYEDCLPEHFTIYGYSRSKMTDGELRNMVSKTLTCRIDKRANCGEKMEEFLKRCFYHSGQYDSQEHFTELDKKLKEHEAGRISNRLFYLSIPPNIFVDAVKCASSSASSVNGWTRVIVEKPFGRDSETSAALTKSLKQYLEEDQIFRIDHYLGKELVENLSVLRFSNLIFEPLWSRQYIRNVQFIFSEDFGTEGRGGYFDHYGIIRDIMQNHLLQILALFAMETPVSLDAEDIRNEKVKVLRSMRPIQIEDVVIGQYKSHTKGGVTYPGYTDDKTVPKDSLTPTFAAAALFIDNARWDGVPFLMKAGKALHTRRAEIRVQFRHVPGNLYNRNNTGTNLDKTTNELVIRVQPDEAIYLKINNKVPGLGMRLDRSNLNLLYSARYSKEIPDAYERLLLDAIEGERRLFIRSDELDAAWALFTPLLKEIEEKKTIPEYYPYGSRGPVGAHYLAAKHKVQWGDMSLDQ

SEQ ID NO: 17313 - DNA, 1551 bp, Brassica napus
  CDS (1)..(1551)
atggattctgggcagtggcacgttgagaagaggtccactttgaggaacgaatcgtttttaaaagagtacggtccagtctccgaaactggtagcctctccatcgtagttcttggtgcctctggtgatctcgccaagaagaagacttttcctgctcttttcaatctctaccaccaggggtttcttaatccagatgaagttcacatctttggatacgcaaggagtaagatctctgatcaggagctgagagacaagatccgtggatatcttgttgatgagaagaatgcttctgagaaagcagaagctttgtccaagtttcttcagctgattaagtatgtgagtggcccttatgattctgaggacgggttcaaaaggctagacaaggcaatctcagagcacgaaatctcgaaaaagacctctgaaggatcttccaggagattgttttatcttgcactccctccctctgtataccctcctgtatgcaagatgatcaaggcatggtgcactaacaaatctgatcttggtggatggacacgtgtcgtcgttgagaagccatttggaaaggacttggaatctgcagagcagcttagttcccagattggagcactgtttgatgagcctcagatttaccgtattgatcattacctgggaaaggaactagtccaaaacatgctggtccttaggtttgccaaccggttatttctgccgctatggaaccgtgacaacatagctaacgtccagattgttttcagggaagattttggaactgaaggccgtgggggatactttgatgaatacggaatcatccgtgatattattcaaaaccacttgctccaggttctttgccttgttgcaatggagaaaccagtctctcttaaacctgagcacatccgcgatgagaaagtgaaggtgcttcaatcagtgatgccaataaaagatgaagaggtggttcttggacaatacgaagggtatagagatgatcctactgttccagacgactcaaatactccaacgtttgccacaacaattcttcgcatacacaacgaaagatgggaaggtgtaccctttatactgaaagctggaaaagcaatgaattcaaagaaggcagaaattcgaattcagttcaaggatgttccaggcgacatattcaaatgtcaaaagcaagggaggaacgagtttgtgatacgcttgcaaccttcggaggccatgtacatgaagctaactgtgaagcaaccgggtctagagatgcaaaccgtgcagagtgaactagacctatcatacaagcaacgttaccaagatgtctcgattccagaggcttacgagcgcctcattcttgacacaatcaaaggtgaccagcaacactttgttcgcagagacgagctgaaggcagcttgggaaatcttcactccactgcttcacaggatagacaaaggagaagtgaaatcgatcccatacaaaccaggaagccgagggccaacggaagcagatcagctgctagagaaagctggttatttgcagactcatggctacatctggatccctcctacattataa

SEQ ID NO: 17314 - protein, 516 aa, Brassica napus
MDSGQWHVEKRSTLRNESFLKEYGPVSETGSLSIVVLGASGDLAKKKTFPALFNLYHQGFLNPDEVHIFGYARSKISDQELRDKIRGYLVDEKNASEKAEALSKFLQLIKYVSGPYDSEDGFKRLDKAISEHEISKKTSEGSSRRLFYLALPPSVYPPVCKMIKAWCTNKSDLGGWTRVVVEKPFGKDLESAEQLSSQIGALFDEPQIYRIDHYLGKELVQNMLVLRFANRLFLPLWNRDNIANVQIVFREDFGTEGRGGYFDEYGIIRDIIQNHLLQVLCLVAMEKPVSLKPEHIRDEKVKVLQSVMPIKDEEVVLGQYEGYRDDPTVPDDSNTPTFATTILRIHNERWEGVPFILKAGKAMNSKKAEIRIQFKDVPGDIFKCQKQGRNEFVIRLQPSEAMYMKLTVKQPGLEMQTVQSELDLSYKQRYQDVSIPEAYERLILDTIKGDQQHFVRRDELKAAWEIFTPLLHRIDKGEVKSIPYKPGSRGPTEADQLLEKAGYLQTHGYIWIPPTL

SEQ ID NO: 17315 - DNA, 1551 bp, Brassica napus
  CDS (1)..(1551)
atggattctgggcagtggcacgttgagaagaggtccactttgaggaacgaatcgtttttaaaagagtacggtccagtctccgaaactggtagcctctccatcgtagttcttggtgcttctggtgatctcgccaagaagaagacttttcctgctcttttcaatctctaccaccaggggttccttaatccagatgaagttcatatctttggatatgcaaggagtaagatttctgatcaggagctgagagacaagatccatggatatcttgttgatgagaagaatgcttctgagaaagcggaagctttgtccaagtttctccagctgattaagtatgtgagtggtccttatgattctgaggacgggttcaaaaggctagaaaaggcaatctccgagcacgaaatctcgaaaaagacctctgaaggatcttcgaggagattgttttatcttgctctccctccctctgtataccctcctgtatgcaagatgatcaaggcatggtgcactaacacatctgatcttggtggatggacacgtgtcgtcgttgagaagccatttggaaaggacttggaatctgcagagcagcttagttcccagattggagcactgtttgatgagcctcagatttaccgtattgatcattacctgggaaaggaactagtccaaaacatgctggtccttaggtttgccaaccggttatttctgccgctatggaaccgtgacaacatagctaacgtccagattgttttcagggaagattttggaactgaaggccgtgggggatactttgatgaatacggaatcatccgtgatattattcaaaaccacttgctccaggttctttgccttgttgcaatggagaaaccagtctctcttaaacctgagcacatccgtgatgagaaagtgaaggttcttcaatcagtgatgcctataaaagatgaagaggtggttcttggacagtacgaaggttatagagatgatccaactgttccaaacgactcaaacactccaacctttgccacaacaattcttcgcatagacaatgaaagatgggaaggtgttccgtttatactgaaagccggaaaggcaatgagttcaaagaaggcagatattcggattcagtttaaggatgttcctggcgacatattcaaatgtcaaaagcaagggaggaacgagtttgtcatacgcttgcaaccttcggaggccatgtacatgaagctaactgtgaagcaaccgggtctagagatgcaaaccgtgcagagtgaactagacctatcttacaagcaacgttaccaagatgtcccgattccagaggcttacgagcgcctcattctcgacacaatcaaaggtgaccagcaacactttgttcgcagagatgagctgaaggcagcttgggaaatcttcactccactacttcacaggataggtaacggagaagtgaaatcgatcccatacaaaccaggaagccgagggccaacggaagcagatcagctgctagagaaagctggttatttgcagacccatggctacatatggatccctcctacgctgtaa

SEQ ID NO: 17316 - protein, 516 aa, Brassica napus
MDSGQWHVEKRSTLRNESFLKEYGPVSETGSLSIVVLGASGDLAKKKTFPALFNLYHQGFLNPDEVHIFGYARSKISDQELRDKIHGYLVDEKNASEKAEALSKFLQLIKYVSGPYDSEDGFKRLEKAISEHEISKKTSEGSSRRLFYLALPPSVYPPVCKMIKAWCTNTSDLGGWTRVVVEKPFGKDLESAEQLSSQIGALFDEPQIYRIDHYLGKELVQNMLVLRFANRLFLPLWNRDNIANVQIVFREDFGTEGRGGYFDEYGIIRDIIQNHLLQVLCLVAMEKPVSLKPEHIRDEKVKVLQSVMPIKDEEVVLGQYEGYRDDPTVPNDSNTPTFATTILRIDNERWEGVPFILKAGKAMSSKKADIRIQFKDVPGDIFKCQKQGRNEFVIRLQPSEAMYMKLTVKQPGLEMQTVQSELDLSYKQRYQDVPIPEAYERLILDTIKGDQQHFVRRDELKAAWEIFTPLLHRIGNGEVKSIPYKPGSRGPTEADQLLEKAGYLQTHGYIWIPPTL

SEQ ID NO: 17317 - DNA, 1713 bp, Brassica napus
  CDS (1)..(1713)
atggcgacgcatactatgatcgttcgttcctcatcctctgctctcgctgcttcgtctccattaacagagactctaccactcttcactactagatctctcacattcccgagaaaatcctccttctctcgtcttcgcttgagattctttgccgagaaactttctcagctcgactcctctaatggctgtgcctctttacaagactctggagaacatcttacagaggagcatgacacaaaagaagagtcatccactcttagtattacagtggttggagcctctggagatttggccaataagaaaatattccctgcattgtttgctctcttttacgagggttgtcttcctcaggacttctctgtttttggttatgctcggaccaaactcacccatgaggagcttcgtgtcatgatcagtagaactttaacttgtcggatagaccaaagggagaactgtgtggacaaaatggatcagttcttaaagagatgcttttaccattcgggtcagtataactctgaagatgattttgcagaactaaacaccaagctcaaagagaaagaggaaggaaagctatcaaacaggctgtactatttgtcaattccaccaaacatattcgtggatgtggtaaggtgtgcaagccttagagcctcctcagtgaatggctggacaagagtcattgtcgaaaagccattcggtcgcgactctgaatcatctggagagttaaccagatgtcttaaacagtatctcacagaggagcaaatcttcaggatcgaccactatttgggaaaagaactcgttgagaacctttcagtgcttcgattctcaaatcttgttttcgagcctctttggtctagaaattacatacgcaacgttcaactcattttctctgaagactttggtacagaaggacgcggaggttactttgatcaatatggaatcatacgagacatcatgcaaaaccatctcttgcaaatccttgcacttttcgcaatggagacacctgtgagcttagacgctgaggacataaggagcgaaaaggtcaaagttctgaggtcaatgaaaccgttgctgcttcaagatatgattgtgggtcagtacaaaggtcatagcaagggtggaaaggcttatcctggttatacggacgacccaacagttcccacaaacagtctcactcctacatttgctgcagccgctatgttcatcaacaacgcgagatgggacggtgtccctttccttatgaaagctggaaaagctctgcataccagaggtgcagagatcagagttcagttcagacatgtcccggggaacttgtacaagaagaatttcgccactgatttagacaaggcaactaatgaactagtgatcagagttcagcctgatgaaggtatatacctgaggatcaacaacaaagtccctggtctcggaatgagactcgaccgaagcgaccttaaccttctctatcgatccaggtatccaagagagatcccagatgcatatgaaaggctgcttcttgatgcaattgaaggagaaaggaggttgtttataagaagtgatgagttagatgcagcatgggatctattcacaccggctttgaaggagctcgagcagaagaaaatagttcctgagctatatccatatgggagcagaggtcctgttggcgctcattaccttgcatctaagtacaatgtgagatggggagatcttgaagatgcttaa

SEQ ID NO: 17318 - protein, 570 aa, Brassica napus
MATHTMIVRSSSSALAASSPLTETLPLFTTRSLTFPRKSSFSRLRLRFFAEKLSQLDSSNGCASLQDSGEHLTEEHDTKEESSTLSITVVGASGDLANKKIFPALFALFYEGCLPQDFSVFGYARTKLTHEELRVMISRTLTCRIDQRENCVDKMDQFLKRCFYHSGQYNSEDDFAELNTKLKEKEEGKLSNRLYYLSIPPNIFVDVVRCASLRASSVNGWTRVIVEKPFGRDSESSGELTRCLKQYLTEEQIFRIDHYLGKELVENLSVLRFSNLVFEPLWSRNYIRNVQLIFSEDFGTEGRGGYFDQYGIIRDIMQNHLLQILALFAMETPVSLDAEDIRSEKVKVLRSMKPLLLQDMIVGQYKGHSKGGKAYPGYTDDPTVPTNSLTPTFAAAAMFINNARWDGVPFLMKAGKALHTRGAEIRVQFRHVPGNLYKKNFATDLDKATNELVIRVQPDEGIYLRINNKVPGLGMRLDRSDLNLLYRSRYPREIPDAYERLLLDAIEGERRLFIRSDELDAAWDLFTPALKELEQKKIVPELYPYGSRGPVGAHYLASKYNVRWGDLEDA

SEQ ID NO: 17319 - DNA, 1842 bp, Glycine max
  CDS (1)..(1842)
atgtctgtgtctttctcttcaacctcggtttcgttctcggaatcctcatttgcattccaaagacctgctccagcacatctttgctcaaattcactcaccgttgcatccaacaactttcattcggtaccaggtggtctcggtcgtcttgtgctgaatgttagaagcaccagcttgtgtcgaaggtttcgtggcttgaaactgtgggtacttgagagactcaacttccaattccagccaccaaagcaacctaagaatagaaatcatcacttcaaaaataatttggaaaatgaaaagggatcggtttctgattcatcctcaaatcttcatgttcctgatgataaggtcactcccatggagtctccatctttgctgcagacaggtttgtctggtgctcccatggatgttagcagaaagccctctctttgtattgcagtcataggggccactggcgagctggcaaagaggaagattttccctgctttatttgccctctactacagtggcttccttcccgagaatgtaggcatttttggttattcaaggaaggatataactgatgaagacctgcaatctattatagcttcaacgttaacatgccgagttgatcatcaagaaaactgtgacgacaaattaaatgctttccttagtagaacatattacattaatggaggctatgacaataaatatgggatgtccatgctgaatgctcgaatggagcaaattgagggaggatccaaaaccaacaggatattctacctttctgtgccacaagaagcacttttggatgttgcgtcatgtcttgcaagcagtgctcagacccagaagggatggaatcgcataatatttgagaagccatttggctttgatgcactttcttcccataggctgacacaatatcttctttcaaactttcaggaaaagcaaatatatagaattgatcatctactaggaaggaatctcattgaaaatcttacagttttaaggttttcaaatctagtttttgagccactttggagtcgtacttatatagataatgtacaggtcattttatcagaggacttggctgtgcatcctggaagatatttcagtggctatggaattatccgtgatattgtacacagtcatgtgctccaaacaattgcattgcttgccatggaaccaccaataagccttgatggagaagatattcgaaatgaaaagcttaaggttttgaggtcaattcgcaaattggagccaaaggatgtcattctcggccaatataaaacaagtggtggagccaaagttgatgcgtgcctaaatggtctgacacctacttattttgctgctgcactatacattgacaatgcacgatgggatggcgtgccatttctgattaaaacaggcttggggctcatcaaacaccaaatggagatacggattcaatttcgcaatgtaccggggaatgtgtaccacgagtgcatcgggcataatatggaccgcgctgtaaatgagctcattcttcgcgatgttcctgatgaagctattttagtgagagtcaacaataaggttccaggactaggcctacaactggactcttcagaattaaatttgctttacaaggacaagtacaacatggaggtgccggattcatacgagcatcttcttctcgatgtcattgatggggacagccatttgtttatgagaagtgatgagttggcagcagcgtggaatattctgactccaattctgaatgagatagacaaagacaatatgtcagtggagctttatgagatggggggtcgcggtcctgttggggcatactacctctgggcgaaacatggtgtccgatgggtggaggattag

SEQ ID NO: 17320 - protein, 613 aa, Glycine max
MSVSFSSTSVSFSESSFAFQRPAPAHLCSNSLTVASNNFHSVPGGLGRLVLNVRSTSLCRRFRGLKLWVLERLNFQFQPPKQPKNRNHHFKNNLENEKGSVSDSSSNLHVPDDKVTPMESPSLLQTGLSGAPMDVSRKPSLCIAVIGATGELAKRKIFPALFALYYSGFLPENVGIFGYSRKDITDEDLQSIIASTLTCRVDHQENCDDKLNAFLSRTYYINGGYDNKYGMSMLNARMEQIEGGSKTNRIFYLSVPQEALLDVASCLASSAQTQKGWNRIIFEKPFGFDALSSHRLTQYLLSNFQEKQIYRIDHLLGRNLIENLTVLRFSNLVFEPLWSRTYIDNVQVILSEDLAVHPGRYFSGYGIIRDIVHSHVLQTIALLAMEPPISLDGEDIRNEKLKVLRSIRKLEPKDVILGQYKTSGGAKVDACLNGLTPTYFAAALYIDNARWDGVPFLIKTGLGLIKHQMEIRIQFRNVPGNVYHECIGHNMDRAVNELILRDVPDEAILVRVNNKVPGLGLQLDSSELNLLYKDKYNMEVPDSYEHLLLDVIDGDSHLFMRSDELAAAWNILTPILNEIDKDNMSVELYEMGGRGPVGAYYLWAKHGVRWVED

SEQ ID NO: 17321 - DNA, 1557 bp, Glycine max
  CDS (1)..(1557)
atggaaactagtgaatggcatatcgagcgaagatctagcttcggctctgaatcccccttagcaagagaggcaggaaatgtgcctgaaactgggtcactctctattgtggtgcttggtgcttctggtgatcttgctaagaagaagacatttcctgcacttttccacctatacctgcagggattcttaccaccagatgaagttcatatttttggctatgcaaggacaaaaatctctgatgatgaattgagaaaccggttgcgcggctatcttgttccaaagaaaggtgcttccccccaacagttggaggatgtagagaagtttttacagctgatcaaatatgtaagcggctcttatgattctgaggatggcttccgcctgttggataaagagatttcagagcatgaatatttgaaaaacagtgttgagggtttatctcggaggcttttctatcttgctcttccaccttcagtatatccatcagtttgcaagatgatcaagacttgttgcatgaataaatctgatcttggtggatggacacgtgttgttgttgagaaaccttttggtaaggatctagaatctgcagaggaactcagtactgagattggaaagttgtttgaggaaccacagatttatcgtattgatcactacttgggaaaggaactagtgcagaacttgttggtacttcgctttgcaaatcggtttttcttgccactttggaaccgcgacaacattgacaacgtacagatagttttcagagaggattttggaactgatggccgtggtggatattttgaccagtatggaattattcgagatattattcaaaaccatctgctgcaggttctttgcttggttgctatggaaaaaccagtttctctcaggcctgagcacattcgggatgagaaagtgaaggttcttgaatcagtgctccctattaatgatgatgaggttgttcttggacaatatgaaggctataaagatgacccaaccgtacctgatgagtctaacaccccaacatttgcaactgttgttctgcgaatacacaatgaaagatgggaaggtgttcctttcatactaaaagcagggaaggcactaaattctagaaaggcagagataagggttcaattcaaggatgtccctggtgatattttcaagtgtaaaaagcaggggagaaatgagtttgttatccgcctacagccttcagaagctatttacatgaagcttacggtcaagcaacctggactggagatgtctacggttcaaagtgagcttgacttgtcatatggacaacggtatcaaggagtaaccattcctgaggcttatgaacgcctaattcttgacacaattagaggtgatcagcaacattttgttcgcagagatgagttgaaggcatcctggcagatcttcaccccacttctgcacagaattgatgaaggggaattcaagccactcccctacaaaccaggaagcagaggtcctgcagaagcagatcagttacttgaaaaagctggctatgttcaaacacacggctacatatggatccctcctaccttgtag

SEQ ID NO: 17322 - protein, 518 aa, Glycine max
METSEWHIERRSSFGSESPLAREAGNVPETGSLSIVVLGASGDLAKKKTFPALFHLYLQGFLPPDEVHIFGYARTKISDDELRNRLRGYLVPKKGASPQQLEDVEKFLQLIKYVSGSYDSEDGFRLLDKEISEHEYLKNSVEGLSRRLFYLALPPSVYPSVCKMIKTCCMNKSDLGGWTRVVVEKPFGKDLESAEELSTEIGKLFEEPQIYRIDHYLGKELVQNLLVLRFANRFFLPLWNRDNIDNVQIVFREDFGTDGRGGYFDQYGIIRDIIQNHLLQVLCLVAMEKPVSLRPEHIRDEKVKVLESVLPINDDEVVLGQYEGYKDDPTVPDESNTPTFATVVLRIHNERWEGVPFILKAGKALNSRKAEIRVQFKDVPGDIFKCKKQGRNEFVIRLQPSEAIYMKLTVKQPGLEMSTVQSELDLSYGQRYQGVTIPEAYERLILDTIRGDQQHFVRRDELKASWQIFTPLLHRIDEGEFKPLPYKPGSRGPAEADQLLEKAGYVQTHGYIWIPPTL

SEQ ID NO: 17323 - DNA, 1557 bp, Glycine max
  CDS (1)..(1557)
atgggaactagtgaatggcatatcgagcgaagatctagcttcggcactgaatcccccttagcaagagaggcaggaaatgtgcctgaaactgggtcactctctattgttgtgcttggcgcttctggggatcttgctaagaagaagacatttcctgcacttttccacctataccggcagggattcttaccaccagatgaagttcacatttttggctatgcaaggacaaaaatatctgatgatgaattgagaaaccggttgcgcggctatcttgttccaaacaaaggtgcttctccccaactgttggaggatgtagagaagtttttacagctgatcaaatatgtaagtggctcttatgattctgaggatggatttcgcttgttggataaagagatttcagagcatgaatatttgaaaaagagtgttgagggtttatctcggaggctcttctatcttgctcttccaccttcagtatatccatctgtttgcaagatgatcaagaactggtgcatgaataaatctgatcttggtggatggacacgtgttgttgtcgagaagccttttggtaaggatctagaatctgcagaggaactcagtactgagattggaaagttgtttgaggaaccacagatttatcgtattgatcactacttgggaaaggaactagtgcagaacttgttggtacttcgctttgcaaatcggtttttcttgccactttggaaccgcgacaacattgacaatgtacagatagttttcagagaggattttggaactgatggccgtggtggatattttgaccaatatggaattattcgagatattattcaaaaccatttgctgcaggttctttgcttggttgctatggaaaaaccagtttctctcaggcctgagcacattcgggatgagaaagtgaaggttcttgaatcagtgctccctattagagatgatgaggttgttcttggacaatacgaaggctataaagatgacccaacagtacctgacaagtcaaacaccccaacatttgcaactgttattctgcgaatacacaatgaaagatgggaaggtgttccgttcatactaaaagcagggaaggcactaaattctagaaaggcagagatcagggttcaattcaaggatgtccctggtgatattttcaagtgtaaaaagcaggggagaaatgagtttgttatccgcctacaacctttagaagctatgtacatgaagcttacggtcaagcaacctggactggagatgtcaacagttcaaagtgagctagacttgtcatatggacaacggtatcaaggagtaaccattcctgaggcttatgaacgcctaattcttgacacaattaaaggtgatcagcagcattttgttcgcagagatgagttgaaggcatcctggcagatcttcaccccacttttgcacagaattgatgaaggggaattcaagccactcccctacaaaccaggaagcagaggtcctgcagaagcagatcagttacttgaaaaagcaggctatgttcaaacacacggctacatatggatccctcctaccttgtag

SEQ ID NO: 17324 - protein, 518 aa, Glycine max
MGTSEWHIERRSSFGTESPLAREAGNVPETGSLSIVVLGASGDLAKKKTFPALFHLYRQGFLPPDEVHIFGYARTKISDDELRNRLRGYLVPNKGASPQLLEDVEKFLQLIKYVSGSYDSEDGFRLLDKEISEHEYLKKSVEGLSRRLFYLALPPSVYPSVCKMIKNWCMNKSDLGGWTRVVVEKPFGKDLESAEELSTEIGKLFEEPQIYRIDHYLGKELVQNLLVLRFANRFFLPLWNRDNIDNVQIVFREDFGTDGRGGYFDQYGIIRDIIQNHLLQVLCLVAMEKPVSLRPEHIRDEKVKVLESVLPIRDDEVVLGQYEGYKDDPTVPDKSNTPTFATVILRIHNERWEGVPFILKAGKALNSRKAEIRVQFKDVPGDIFKCKKQGRNEFVIRLQPLEAMYMKLTVKQPGLEMSTVQSELDLSYGQRYQGVTIPEAYERLILDTIKGDQQHFVRRDELKASWQIFTPLLHRIDEGEFKPLPYKPGSRGPAEADQLLEKAGYVQTHGYIWIPPTL

SEQ ID NO: 17325 - DNA, 1557 bp, Glycine max
  CDS (1)..(1557)
atggaaactagtgaatggcatatcgagcgaagatctagcttcggctctgaatcccccttagcaagagaggcaggaaatgtgcctgaaactgggtcactctctattgtggtgcttggcgcttctggtgatcttgctaagaagaagacatttcctgcacttttccacctatacctgcagggattcttaccaccagatgaagttcatatttttggctatgcaaggacaaaaatctctgatgatgaattgagaaaccggttgcgcggctatcttgttccaaagaaaggtgcttctccccaacagttggaggatgtagagaagtttttacagctgatcaaatatgtaagtggctcttatgattctgaggatggatttcgcttgttggataaagagatttcagagcatgaatatttgaaaaagagtgttgagggtttatctcggaggcttttctatcttgctcttccaccttcagtatatccatctgtttgcaagatgatcaagacttgttgcatgaataaatctgatcttggtggatggacacgtgttgttgtcgagaagccttttggtaaggatctagaatctgcagaggaactcagtactgagattggaaagttgtttgaggaaccacagatttatcgtattgatcactacttgggaaaggaactagtgcagaacttgttggtacttcgctttgcaaatcggtttttcttgccactttggaaccgcgacaacattgacaatgtacagatagttttcagagaggattttggaactgatggccgtggtggatattttgaccaatatggaattattcgagatattattcaaaaccatttgctgcaggttctttgcttggttgctatggaaaaaccagtttctctcaggcctgagcacattcgggatgagaaagtgaaggttcttgaatcagtgctccctattagagatgatgaggttgttcttggacaatacgaaggctataaagatgacccaacagtacctgacaagtcaaacaccccaacatttgcaactgttattctgcgaatacacaatgaaagatgggaaggtgttcctttcatactaaaagcagggaaggcactaaattctagaaaggcagagatcagggttcaattcaaggatgtccctggtgatattttcaagtgtaaaaagcaggggagaaatgagtttgttatccgcctacaacctttagaagctatgtacatgaagcttacggtcaagcaacctggactggagatgtcaacagttcaaagtgagctagacttgtcatatggacaacggtatcaaggagtaaccattcctgaggcttatgaacgcctaattcttgacacaattaaaggtgatcagcagcattttgttcgcagagatgagttgaaggcatcctggcagatcttcaccccacttttgcacagaattgatgaaggggaattcaagccactcccctacaaaccaggaagcagaggtcctgcagaagcagatcagttacttgaaaaagcaggctatgttcaaacacacggctacatatggatccctcctaccttgtag

SEQ ID NO: 17326 - protein, 518 aa, Glycine max
METSEWHIERRSSFGSESPLAREAGNVPETGSLSIVVLGASGDLAKKKTFPALFHLYLQGFLPPDEVHIFGYARTKISDDELRNRLRGYLVPKKGASPQQLEDVEKFLQLIKYVSGSYDSEDGFRLLDKEISEHEYLKKSVEGLSRRLFYLALPPSVYPSVCKMIKTCCMNKSDLGGWTRVVVEKPFGKDLESAEELSTEIGKLFEEPQIYRIDHYLGKELVQNLLVLRFANRFFLPLWNRDNIDNVQIVFREDFGTDGRGGYFDQYGIIRDIIQNHLLQVLCLVAMEKPVSLRPEHIRDEKVKVLESVLPIRDDEVVLGQYEGYKDDPTVPDKSNTPTFATVILRIHNERWEGVPFILKAGKALNSRKAEIRVQFKDVPGDIFKCKKQGRNEFVIRLQPLEAMYMKLTVKQPGLEMSTVQSELDLSYGQRYQGVTIPEAYERLILDTIKGDQQHFVRRDELKASWQIFTPLLHRIDEGEFKPLPYKPGSRGPAEADQLLEKAGYVQTHGYIWIPPTL

SEQ ID NO: 17327 - DNA, 1530 bp, Hordeum vulgare
  CDS (1)..(1530)
atggcgggaactgactcctcggcgtcatcgagacaaagcagttttaactcattagcaaaggatctagaacttcctttggagcaagggtgcctgactatcgttgtacttggggcttctggagaccttgccaagaagaaaacgttcccggcactctaccacctttttgaacaggggttcttacaatctggtgaagtgcatatagttgggtatgcgagaacaaatctttctgatgatgggttgagagggcgcatccgtgcataccttaaaggagcctcagaggagcatgtttcagaattcttgcaattgataaaatatgtcagtggctcctatgacagtggagaaggttttgaaaaactgaacaaggaaatatcagattatgagatgtcaaacaactcaggaagctcccgtaggctcttttacttggcattgcctccatctgtctacccttcagtgtgcaaaatgatccgaacatattgcatgagtccaacttctcgcactggatggactagagtaattgttgagaagccctttggaagggacctggactcagcagaagaattaagttcccaacttggggagctattccaggaagatcaactctacaggattgaccactacttgggaaaagagttggtccaaaacttgcttgtgcttcgttttgcgaaccgtttgttcttaccactttggaaccgtgataatgttgataatatacagattgtattcagggaggacttcggaactgatgggcgtggaggatattttgatcaatatggaatcatccgtgatatcattcagaaccatttgttgcaggttttctgtttggttgcaatggaaaagcctgtatctcttaagcctgagcacattagagatgagaaagtcaaggttctgcaatctgtgaacccgataaaggacgaagaggtagtccttggacaatatcagggctacaaggatgaccctacagtgccagatgactctaataccccaacgtttgcatctattgtacttagggtacacaatgaaagatgggaaggtgtccctttcattcttaaagctggtaaagcattaaactcaagaaaagcagaaattcgtgtgcagttcaaggatgttcccggtgacatttttaaatgtaagaagcaaggaagaaatgagtttgtcatacgcctccagccatcagaagccatgtatatgaaactaactgtgaagaaacctggattggaaatggctactgaacagagtgaacttgatctgtcatatgggatgcgttaccaagatgtcaaaattccagaggcatacgagcgcctcattttggatacaataagaggagaccagcaacactttgtgcgccgggatgagctgaaggctgcctggcagatcttcactcccttgttgcacaacatcgacgctggcaagctgaaggctgtttcatacaagcctggcagccgtggccccaaggaagctgatgaactgagtgagaaggttgggtacatgcagacccacggttacatctggataccacccacccttgcatag

SEQ ID NO: 17328 - protein, 509 aa, Hordeum vulgare
MAGTDSSASSRQSSFNSLAKDLELPLEQGCLTIVVLGASGDLAKKKTFPALYHLFEQGFLQSGEVHIVGYARTNLSDDGLRGRIRAYLKGASEEHVSEFLQLIKYVSGSYDSGEGFEKLNKEISDYEMSNNSGSSRRLFYLALPPSVYPSVCKMIRTYCMSPTSRTGWTRVIVEKPFGRDLDSAEELSSQLGELFQEDQLYRIDHYLGKELVQNLLVLRFANRLFLPLWNRDNVDNIQIVFREDFGTDGRGGYFDQYGIIRDIIQNHLLQVFCLVAMEKPVSLKPEHIRDEKVKVLQSVNPIKDEEVVLGQYQGYKDDPTVPDDSNTPTFASIVLRVHNERWEGVPFILKAGKALNSRKAEIRVQFKDVPGDIFKCKKQGRNEFVIRLQPSEAMYMKLTVKKPGLEMATEQSELDLSYGMRYQDVKIPEAYERLILDTIRGDQQHFVRRDELKAAWQIFTPLLHNIDAGKLKAVSYKPGSRGPKEADELSEKVGYMQTHGYIWIPPTLA

SEQ ID NO: 17329 - DNA, 1530 bp, Triticum aestivum
  CDS (1)..(1530)
atggcgggaactgactcctcggcgtcatcgagacaaagcagtttcaactcattagcaaaggacctagaacttcctttggagcaagggtgcctcaccatcgttgtacttggggcttctggagatcttgccaagaagaaaacgttcccggcactctaccacctttttgagcaggggttcttacaatctggtgaagtgcatatagtggggtatgcgagaacaaatctttctgatgatgggttgagagggcgcatccgtgcataccttaaaggagcctcagaggaacatgtttcagaattcttgcaattgataaaatatgtcagtggttcctatgacagtggagaaggttttgaaaaactgaacaaggaaatatcagattatgagatgtcaaacaactcaggaagctcccgtaggctcttttatttggcattgcctccatctgtctacccttcagtgtgcaaaatgatccgaacatattgcatgagtccaacttctcgcgctggatggactagagtaattgttgagaagccctttggaagggacctggactctgcagaagaattgagttcccaacttggggagctattcgaggaagatcaactctacaggattgaccactacttgggaaaagagttggtccaaaacttgcttgtgcttcgttttgcgaaccgtttgttcttaccactttggaaccgtgacaatgttgataatatacagattgtattcagggaggacttcggaactgatggacgtggaggatattttgatcaatatggaatcatccgtgatatcattcagaaccatttgttgcaggttttctgtttggttgcaatggaaaagcctgtatctcttaagcctgagcacatcagagatgagaaagtcaaggttctgcaatccgtgaacccgataaaggacgaagaggtagtccttggacaatatcagggctacaaggatgaccctacagtgccagatgactctaataccccaacgtttgcatctattgtacttagggtacacaatgaaagatgggaaggtgttcctttcattcttaaagctggtaaagcattaaactcaagaaaagcagaaattcgtgtgcagttcaaggatgttcccggtgacatttttaaatgtaagaagcagggaagaaatgagtttgtcatacgcctccagccatcagaagccatgtacatgaaactaactgtgaagaaacctggattggaaatggctactgaacagagtgaacttgatctgtcatatgggatgcgttaccaagatgtcaaaattccagaggcatacgagcgcctcattttggatacaataagaggagaccagcaacactttgtgcgccgagatgagctgaaggctgcctggcagatcttcactcccttgttgcacgacatcgacgctggcaagctgaaggctgtttcatacaagcctggcagccgaggccccaaggaagctgatgaactgagtgagaaggttgggtacatgcagacccacggttacatctggataccacccacccttgcatag

SEQ ID NO: 17330 - protein, 509 aa, Triticum aestivum
MAGTDSSASSRQSSFNSLAKDLELPLEQGCLTIVVLGASGDLAKKKTFPALYHLFEQGFLQSGEVHIVGYARTNLSDDGLRGRIRAYLKGASEEHVSEFLQLIKYVSGSYDSGEGFEKLNKEISDYEMSNNSGSSRRLFYLALPPSVYPSVCKMIRTYCMSPTSRAGWTRVIVEKPFGRDLDSAEELSSQLGELFEEDQLYRIDHYLGKELVQNLLVLRFANRLFLPLWNRDNVDNIQIVFREDFGTDGRGGYFDQYGIIRDIIQNHLLQVFCLVAMEKPVSLKPEHIRDEKVKVLQSVNPIKDEEVVLGQYQGYKDDPTVPDDSNTPTFASIVLRVHNERWEGVPFILKAGKALNSRKAEIRVQFKDVPGDIFKCKKQGRNEFVIRLQPSEAMYMKLTVKKPGLEMATEQSELDLSYGMRYQDVKIPEAYERLILDTIRGDQQHFVRRDELKAAWQIFTPLLHDIDAGKLKAVSYKPGSRGPKEADELSEKVGYMQTHGYIWIPPTLA

SEQ ID NO: 17331 - DNA, 1788 bp, Triticum aestivum
  CDS (1)..(1788)
atggcgctctcctgcatgaggtgcccggcggccggcaccggcggaggcgctgcggccgcccgccgccccgcgggcccgcggctgatgccctcctcgtccgtcgccttctccttggccagatgcggcgggagatcggcggccgccgcctcggggtggcgcatccacgccgtcgccgggaaaggagtgaaagctcccatggatgctgtggagaacgctgtcgcccctgccgccccgtcaacggtggcaaatggcacttcttcagcaatcaccgtagaggaatttgaagatttagccgctctagccaaggatgacgaggcgtcggttagcatcaccgtagttggagcgtccggtgaccttgcaaagaagaagatatttcctgcccttttcgctctttactatgaaggctgtcttcccaagcatttctccatctttggctatgcgcggagtaaaatgacagatgctgaactgagagacatggtcagcaaaacactgacttgcaggattgataaaagggagaactgtagtgagaaaatggaagagtttctgaaacgatgcttctaccactcaggtcaatatgattcagaggaagatttcaaggagctaggcaagaagatcaaacaacatgagggtcccagagtatctaaccatcttttctacttgtcgatacctccaaatatattcctggatgttgtaaaatgtgcaagcaaatcagcatcatctgtgagtggctggacaagggtaattgttgaaaaaccctttggccgggactcagagtcttctgctgccctgacaaaaggtctgaagcagtacctgacagaggaccaaatcttcaggattgaccattacttgggtaaggagctggtggagaacttatccgtccttcgcttctcgaatcttgtttttgagcctctgtggtcaaggcagtatataaggaatgtgcaactgatattctcagaagactttggcactgaagggagaggagggtactttgatagctatggtattatccgagacataatgcagaatcatcttcttcagatactagctctatttgcaatggaaactcctattagcttggaagcagaggacatacgaaacgagaaggttaaagttttgcgctccatgaagccgttgcgactagaagatgtggtaataggacagtataaaagtcatacgaagggtggtattacataccctggatacactgaagataagacggtgcccaagggtagtctgactccaacatttgctgcagctgcgctttttataaataacgctagatgggatggagttccctttctcatgaaggctgggaaagccttgcatactaaacaggctgagattagagtacagttccgacatgttcctggaaatctctacaaggggtcttttggaaccgatcttgacagggctactaatgaacttgtgatacgcgtgcaaccagatgaaggaatttacctaaagattaacaacaagattcctggtcttggtatgagactagataggagtaatctgaatcttcactatgcagcaaggtaccccaaggagataccagatgcgtacgagaggctcctgctcgacgcgatagaaggagagcgaaggctcttcatccggtcggacgagctggacgcggcgtgggagctcttcacgcccctcctgaaggagctggagcagaagcggatggcccccgagctatacccctacgggagccgcgggcccgtgggcgcccactacctggcagccaagtacaaggtgagatggggcgacctgggtggctcggaacactag

SEQ ID NO: 17332 - protein, 595 aa, Triticum aestivum
MALSCMRCPAAGTGGGAAAARRPAGPRLMPSSSVAFSLARCGGRSAAAASGWRIHAVAGKGVKAPMDAVENAVAPAAPSTVANGTSSAITVEEFEDLAALAKDDEASVSITVVGASGDLAKKKIFPALFALYYEGCLPKHFSIFGYARSKMTDAELRDMVSKTLTCRIDKRENCSEKMEEFLKRCFYHSGQYDSEEDFKELGKKIKQHEGPRVSNHLFYLSIPPNIFLDVVKCASKSASSVSGWTRVIVEKPFGRDSESSAALTKGLKQYLTEDQIFRIDHYLGKELVENLSVLRFSNLVFEPLWSRQYIRNVQLIFSEDFGTEGRGGYFDSYGIIRDIMQNHLLQILALFAMETPISLEAEDIRNEKVKVLRSMKPLRLEDVVIGQYKSHTKGGITYPGYTEDKTVPKGSLTPTFAAAALFINNARWDGVPFLMKAGKALHTKQAEIRVQFRHVPGNLYKGSFGTDLDRATNELVIRVQPDEGIYLKINNKIPGLGMRLDRSNLNLHYAARYPKEIPDAYERLLLDAIEGERRLFIRSDELDAAWELFTPLLKELEQKRMAPELYPYGSRGPVGAHYLAAKYKVRWGDLGGSEH

SEQ ID NO: 17333 - DNA, 1797 bp, Zea mays
  CDS (1)..(1797)
atggcgctctcctgcatgaggtgccccgcgggcgccggcgccgcctccgcccgacgcgccgcagcgcagccgttggccgcggaggctgcggtctccttcgccagatgccgcggcttcgggaggtccgccaccgctgcgacttccgcctggttttggcgcaaccatgccgttgcctcacagggagtgaaagctcccatggatgctgatgtcaagaatgctgtcatacctcctacctcaccaaaggtggaaagtggctctccttcagaaatcactctggatgaatttgaagacttgagcgctctatgcaagaatgatgattctactgttagcatcacagtagttggagcatctggtgaccttgccaagaagaagatatttcctgccctttttgctctctactatgaagattgccttcccaagcatttcaccatctttggctatgcacggagcaagatgacagatgctgaactgaggaacatggttagcaaaacactgacttgcagaatagataaaagggaaaattgtagcgagaaaatggaagagttcctcaaaagatgcttctatcattcaggccaatatgattcagaagagcatttcatagatctagacaagaagctaaagcaacatgagggttccagagtttctaaccgccttttctacttgtcaatacctcctaatatattcttggatgttgtaaaatgtgcaagcaaatcagcatcttcggtgaatggttggacacgagtaattgttgagaagcccttcggccgagactcagaatcctctgctgcattaacaagcggtctgaagcagtaccttgtagaggaccaaattttcaggattgaccattatttgggaaaagaactggtggagaatttgtctgtcctgcgcttctcaaatctcgtttttgagcctctctggtcaagacaatatataagaaatgtgcaacttatattctcagaagactttggtactgaaggacgtggaggatactttgatggctacggtattattcgagacataatgcagaatcatctcattcagatactagctttatttgctatggaaactcctattagtttggaagcagaggatataagaaatgagaaggttaaagttcttcgttccatgaagccgttgcagctggaagatgtggtcgtaggacagtataaaagtcacacaaaaggtggtaccacataccctgggtatactgatgataagacagtgcccaaggatagtgtgactccaacgtttgctgctgcggcgcttttcataaataatgccagatgggatggagttccctttcttatgaaagctgggaaagctttgcacacaaaacgagctgagattagggtacagttccgacatgttcctggaaatctctacaaggggagttttggcacagatcttgatagggccactaatgagcttgtgatacgtgtgcaaccggatgaagcaatttacctaaagattaacaacaagattcctggtctcggtatgcgactagataggagtaacttgaatctccattatgccgcaaggtactcaaaggagatacctgatgcttacgagagactcctgcttgatgccatcgaaggagagcgcaggcttttcatccgctcagatgagttggatgctgcatggtcactcttcacacccctcctgaaggagctggaagagaagcggatagctcctgagctctacccatatggaagccgtggacctgtcggggcccactatctcgccgccaagtacaacgtaagatggggtgacttgagtgcggagcactacaaggcatga

SEQ ID NO: 17334 - protein, 598 aa, Zea mays
MALSCMRCPAGAGAASARRAAAQPLAAEAAVSFARCRGFGRSATAATSAWFWRNHAVASQGVKAPMDADVKNAVIPPTSPKVESGSPSEITLDEFEDLSALCKNDDSTVSITVVGASGDLAKKKIFPALFALYYEDCLPKHFTIFGYARSKMTDAELRNMVSKTLTCRIDKRENCSEKMEEFLKRCFYHSGQYDSEEHFIDLDKKLKQHEGSRVSNRLFYLSIPPNIFLDVVKCASKSASSVNGWTRVIVEKPFGRDSESSAALTSGLKQYLVEDQIFRIDHYLGKELVENLSVLRFSNLVFEPLWSRQYIRNVQLIFSEDFGTEGRGGYFDGYGIIRDIMQNHLIQILALFAMETPISLEAEDIRNEKVKVLRSMKPLQLEDVVVGQYKSHTKGGTTYPGYTDDKTVPKDSVTPTFAAAALFINNARWDGVPFLMKAGKALHTKRAEIRVQFRHVPGNLYKGSFGTDLDRATNELVIRVQPDEAIYLKINNKIPGLGMRLDRSNLNLHYAARYSKEIPDAYERLLLDAIEGERRLFIRSDELDAAWSLFTPLLKELEEKRIAPELYPYGSRGPVGAHYLAAKYNVRWGDLSAEHYKA

SEQ ID NO: 17335 - DNA, 1554 bp, Zea mays
  CDS (1)..(1554)
atgtcaggagggtcgtctgaatcttccccgttatctggacaaaatagccttagttctctatcaatttccaaggacaatgaactatcttcagagtctggctgcttgtccattgttgtactaggcgcttctggagaccttgctaagaagaaaacattcccagccctctaccacctcttccagcagggattcatacaatctggagaagtccatatatttgggtacgcaagatcaaatctttctgatgatggattaagagaacgcattcgtggatacctcaagggagcttcagatgaacatctttctcagtttttgcagttagtaaaatatgttagtggctcctatgatagggtggaaggatttgagttattaaataaggcaatctctgagtatgaaacttcaaaaaacaatgactcgggaagctaccgcagattattttatttggcattgcctccatcagtctacccatcagtatgcaaaatgataagatcatattgcatgagtccatcttcacacaccggttggacaagggttattgttgaaaagccctttggaaaggatttgaacactgcagaggaactgagtgctgaacttgggcagctgtttcaagaagaacaactctatagaattgaccactatttaggaaaagagcttgtccaaaacctgcttgtgcttcgttttgcaaaccgcttatttttgcctctctggaaccgtgataacatagctaacgtacagatcgtatttaaggaggactttggaactgaaggacgtggaggatattttgatcaatatggtatcattcgtgatatcattcaaaaccacttgttgcaggtcttctgtttggtggctatggaaaagcctgtctctcttaaacccgagcacattagagatgaaaaagtcaaggttctgcaatcggtggagcctataaagcatgaagaggtagtcatcggacaatatgatggctacaaggatgaccctactgtgccagatgactccaacacccctacttttgcatctgttgtactgagggtacacaacgaaagatgggagggggttccattcatcctcaaggctggcaaagcactaaattcgaggaaagcagagatacgtgtacagttcaaggatgctcctggtgacatttttagatgcaagaaacaaggcaggaatgagtttgtcatacgcctgcagccatcagaagccatgtacatgaaactaacggtcaaaaaacccggactggaaatggcaaccgaacaaagcgaactggatctatcgtatgggatgcggtacaatggcgtcaaaatcccagaagcatacgagcgtctcatcttggatacgataagaggagaccagcagcacttcgttcgccgagatgagctgagggccgcatgggaaatcttcactcctttgcttcacgacatcgatggtggcaagctcaggtccgttccgtacaagccgggaacccgaggaccgcaggaagccgacgagttgagcaggaggatggggtatgtgcagacccatgggtatgtatgggttccgccgaccctttctaaggtttag

SEQ ID NO: 17336 - protein, 517 aa, Zea mays
MSGGSSESSPLSGQNSLSSLSISKDNELSSESGCLSIVVLGASGDLAKKKTFPALYHLFQQGFIQSGEVHIFGYARSNLSDDGLRERIRGYLKGASDEHLSQFLQLVKYVSGSYDRVEGFELLNKAISEYETSKNNDSGSYRRLFYLALPPSVYPSVCKMIRSYCMSPSSHTGWTRVIVEKPFGKDLNTAEELSAELGQLFQEEQLYRIDHYLGKELVQNLLVLRFANRLFLPLWNRDNIANVQIVFKEDFGTEGRGGYFDQYGIIRDIIQNHLLQVFCLVAMEKPVSLKPEHIRDEKVKVLQSVEPIKHEEVVIGQYDGYKDDPTVPDDSNTPTFASVVLRVHNERWEGVPFILKAGKALNSRKAEIRVQFKDAPGDIFRCKKQGRNEFVIRLQPSEAMYMKLTVKKPGLEMATEQSELDLSYGMRYNGVKIPEAYERLILDTIRGDQQHFVRRDELRAAWEIFTPLLHDIDGGKLRSVPYKPGTRGPQEADELSRRMGYVQTHGYVWVPPTLSKV

SEQ ID NO: 17337 - DNA, 1554 bp, Zea mays
  CDS (1)..(1554)
atgtcaggagggtcgtctgaatcttccccgttatctggacaaaatagccttagttctctatcaatttccaaggacaatgaactatcttcagagtctggctgcttgtccattgttgtactaggcgcttctggagaccttgctaagaagaaaactttcccagcgctctttcaccttttccagcagggatttctgcaatctggagaagtccatatatttgggtacgcaagatcaaatctttctgatgatggattaagagaacgcattcgtggatacctcaagggagcttcagatgaacatctttctcagtttttgcagctagtaaaatatgttagtggctcctatgataggggggaaggatttgagttattaaataaggcaatctctgagtatgaaacttcaaaaaacaatgactcgggaagctaccacagattattttatttggcattgcctccatcagtctacccatcagtatgcaaaatgatgagatcatattgcatgagtccatcttcacacaccggttggacaagggttattgttgaaaagccctttggaaaggatttgaacactgcagaggaactgagtgctgaacttgggcagctgtttcaagaagaacaactctatagaattgaccactatttaggaaaagagcttgtccaaaacctgcttgtgcttcgttttgcaaaccgcttatttttgcctctctggaaccgtgataacatagctaacgtacagatcgtatttaaggaggactttggaactgaaggacgtggaggatattttgatcaatatggtatcattcgtgatatcattcagaaccacttgttgcaggtcttctgtttggtggctatggaaaagcctgtctctcttaaacccgagcacattagagatgaaaaagtcaaggttctgcaatcggtggagcctataaagcatgaagaggtagtcatcggacaatatgatggctacaaggatgaccctactgtgccagatgactccaacacccctacttttgcatctgttgtactgagggtacacaacgaaagatgggagggggttccattcatcctcaaggctggcaaagcactaaattcgaggaaagcagagatacgtgtacagttcaaggatgctcctggtgacatttttagatgcaagaaacaaggcaggaatgagtttgtcatacgcctgcagccatcagaagccatgtacatgaaactaacggtcaaaaaacccggactggaaatggcaaccgaacaaagcgaactggatctatcgtatgggatgcggtacaatggcgtcaaaatcctagaagcatacgagcgtctcatcttggatacgataagaggagaccagcagcacttcgttcgccgagatgagctgagggccgcatgggaaatcttcactcctttgcttcacgacatcgatggtggcaagctcaggtccgttccgtacaagccgggaacccgaggaccgcaggaagccgacgagttgagcaggaggatggggtatgtgcagacccatgggtatgtatgggttccgccgaccctttctaaggtttag

SEQ ID NO: 17338 - protein, 517 aa, Zea mays
MSGGSSESSPLSGQNSLSSLSISKDNELSSESGCLSIVVLGASGDLAKKKTFPALFHLFQQGFLQSGEVHIFGYARSNLSDDGLRERIRGYLKGASDEHLSQFLQLVKYVSGSYDRGEGFELLNKAISEYETSKNNDSGSYHRLFYLALPPSVYPSVCKMMRSYCMSPSSHTGWTRVIVEKPFGKDLNTAEELSAELGQLFQEEQLYRIDHYLGKELVQNLLVLRFANRLFLPLWNRDNIANVQIVFKEDFGTEGRGGYFDQYGIIRDIIQNHLLQVFCLVAMEKPVSLKPEHIRDEKVKVLQSVEPIKHEEVVIGQYDGYKDDPTVPDDSNTPTFASVVLRVHNERWEGVPFILKAGKALNSRKAEIRVQFKDAPGDIFRCKKQGRNEFVIRLQPSEAMYMKLTVKKPGLEMATEQSELDLSYGMRYNGVKILEAYERLILDTIRGDQQHFVRRDELRAAWEIFTPLLHDIDGGKLRSVPYKPGTRGPQEADELSRRMGYVQTHGYVWVPPTLSKV

SEQ ID NO: 17339 - DNA, 1797 bp, Zea mays
  CDS (1)..(1797)
atggcgctctcctgcatgaggtgccccgcgggcgccggcgccgcctccgcccgacgcgccgcagcgcagccgttggccgcggaggctgcggtctccttcgccagatgccgcggcttcgggaggtccgccaccgctgcgactgccgcctggttttggcgcaaccatgccgttgcctcacagggagtgaaagctcccatggatgctgatgtcaagaatgctgtcatacctcctacctcaccaaaggtggaaagtggctctccttcagaaatcactctggatgaatttgaagacttgagcgctctatgcaagaatgatgattctactgttagcatcacagtagttggagcatctggtgaccttgccaagaagaagatatttcctgccctttttgctctctactatgaagattgccttcccaagcatttcaccatctttggctatgcacggagcaagatgacagatgctgaactgaggaacatggttagcaaaacactgacttgcagaatagataaaagggaaaattgtagcgagaaaatggaagagttcctcaaaagatgcttctatcattcaggccaatatgattcagaagagcatttcatagatctagacaagaagctaaagcaacatgagggttccagagtttctaaccgccttttctacttgtcaatacctcctaatatattcttggatgttgtaaaatgtgcaagcaaatcagcatcttcggtgaatggttggacacgagtaattgttgagaagcccttcggccgagactcagaatcctctgctgcattaacaagcggtctgaagcagtaccttgtagaggaccaaattttcaggattgaccattatttgggaaaagaactggtggagaatttgtctgtcctgcgcttctcaaatctcgtttttgagcctctctggtcaagacaatatataagaaatgtgcaacttatattctcagaagactttggtactgaaggacgtggaggatactttgatggctacggtattattcgagacataatgcagaatcatctcattcagatactagctttatttgctatggaaactcctattagtttggaagcagaggatataagaaatgagaaggttaaagttcttcgttccatgaagccgttgcagctggaagatgtggtcgtaggacagtataaaagtcacacaaaaggtggtaccacataccctgggtatactgatgataagacagtgcccaaggatagtgtgactccaacgtttgctgctgcggcacttttcataaataatgccagatgggatggagttccctttcttatgaaagctgggaaagctttgcacacaaaacgagctgagattagggtacagttccgacatgttcctggaaatctctacaaggggagttttggcacagatcttgatagggccactaatgagcttgtgatacgtgtgcaaccggatgaagcaatttacctaaagattaacaacaagattcctggtctcggtatgcgactagataggagtaacttgaatctccattatgccgcaaggtactcaaaggagatacctgatgcttacgagagactcctgcttgatgccatcgaaggagagcgcaggcttttcatccgctcagatgagttggatgctgcatggtcactcttcacacccctcctgaaggagctggaagagaagcggatagctcctgagctctacccatatggaagccgtggacctgtcggggcccactatctcgccgccaagtacaacgtaagatggggtgacttgagtgcggagcactacaaggcatga

SEQ ID NO: 17340 - protein, 598 aa, Zea mays
MALSCMRCPAGAGAASARRAAAQPLAAEAAVSFARCRGFGRSATAATAAWFWRNHAVASQGVKAPMDADVKNAVIPPTSPKVESGSPSEITLDEFEDLSALCKNDDSTVSITVVGASGDLAKKKIFPALFALYYEDCLPKHFTIFGYARSKMTDAELRNMVSKTLTCRIDKRENCSEKMEEFLKRCFYHSGQYDSEEHFIDLDKKLKQHEGSRVSNRLFYLSIPPNIFLDVVKCASKSASSVNGWTRVIVEKPFGRDSESSAALTSGLKQYLVEDQIFRIDHYLGKELVENLSVLRFSNLVFEPLWSRQYIRNVQLIFSEDFGTEGRGGYFDGYGIIRDIMQNHLIQILALFAMETPISLEAEDIRNEKVKVLRSMKPLQLEDVVVGQYKSHTKGGTTYPGYTDDKTVPKDSVTPTFAAAALFINNARWDGVPFLMKAGKALHTKRAEIRVQFRHVPGNLYKGSFGTDLDRATNELVIRVQPDEAIYLKINNKIPGLGMRLDRSNLNLHYAARYSKEIPDAYERLLLDAIEGERRLFIRSDELDAAWSLFTPLLKELEEKRIAPELYPYGSRGPVGAHYLAAKYNVRWGDLSAEHYKA

SEQ ID NO: 17341 - DNA, 1818 bp, Zea mays
  CDS (1)..(1818)
atgtccattcgaccattcctgacaacccatatcccaatcaatctaccacctctccggccgttccacactgatcggatggcggccttgaccttccacccggccgcctgcttcttcccacgaccacgagaggcagcagcgacaacgaagcagccgctccaccattactgctcgcctctccggaccctcgtccctagaactacaagaccgtgccttctcagggccaggtcctccaacgggctcccgcagaccggcggcgcctcgttcggcagcagcaacgaggtgctggatgggacgccgacgggagatggggcaccggggcaggggcagcggggagggagcaccgtcagcatcacggtcgtcggcgcctccggcgacctcgccaagaagaagatcttcccggctctcttcgccttgttctacgagggctggctcccggagcattttacagtgttcggctatgcccgtagcgagatgaacgaccaagagctcaggaacatgattagcatgaccctgacgtgccgaatcgacaaaagtgagaactgcggcgacaagatggaacagttcctgaagaggtgcttctaccagtctgggcagtacaactcggaggaggggtttgcggagttagacagaaagctcaaagaaaaagaggcaggcaggctaccgaacaggctattttacctgtcgatcccgccaaacatattcgtggatgtggttagatccgctagccgcaccgcgtcgtcttcaagcgggtggacaagatttatagtggagaagccattcggccgtgactcggagtcctccggcgagctcactcggtccttgaagaagtacttggtcgaggagcaaatattcaggatcgaccattacctgggcaaggaactggttgagaatctctccgtcctccgcttctccaacctcgtcttcgagccgctgtggtcgaggaactacatccggaacgtgcagctcatattctctgaagatttcggcaccgagggtcgaggcggctacttcgacaactacggcatcatccgggacatcatgcagaaccacctgctgcagatcctggccctgttcgccatggagaccccggtgagccttgacgccgaggacatccgcaacgagaaggtgaaggtgctgaggtccatgaggcagctgaagctcgaggacgtggtggtgggccagtacaagggccactccaagggcggcaagtcgtacccgggctacgccgacgaccccaccgtgcccaagggcagcgtcacgcccaccttcgccgccgccgcgctcttcatcgacaacgcgcgctgggacggcgtgccgttcctgatgaaggcaggcaaggcgctgcacacacgacgcgcggagatccgggtgcagttccggcgcgtgccgggaaacctgtaccggcggaacatcggcgcggacctggacaaggcgaccaacgagctggtgctccgggtgcagcccgacgaggccatctacctcaaggtcaacaacaaggtgcccgggctgggcatgcgcctcgaccgcagcaacctcaacctgctctactccgagcgctaccgccgcgagatccccgacgcgtacgagcgccttctgctggacgccatggagggcgagcgccgcctcttcatccggagcgacgagctcgacgccgcctgggccatcttcacgcccgcgctcagggagctggaggacaggaaagtggcgccggagctctacccgtacggcagcaggggccccgtcggcgcgcactacctcgccgccaactacaacgtcaggtggggagacatcaccagcgatgacgacggcgccttctag

SEQ ID NO: 17342 - protein, 605 aa, Zea mays
MSIRPFLTTHIPINLPPLRPFHTDRMAALTFHPAACFFPRPREAAATTKQPLHHYCSPLRTLVPRTTRPCLLRARSSNGLPQTGGASFGSSNEVLDGTPTGDGAPGQGQRGGSTVSITVVGASGDLAKKKIFPALFALFYEGWLPEHFTVFGYARSEMNDQELRNMISMTLTCRIDKSENCGDKMEQFLKRCFYQSGQYNSEEGFAELDRKLKEKEAGRLPNRLFYLSIPPNIFVDVVRSASRTASSSSGWTRFIVEKPFGRDSESSGELTRSLKKYLVEEQIFRIDHYLGKELVENLSVLRFSNLVFEPLWSRNYIRNVQLIFSEDFGTEGRGGYFDNYGIIRDIMQNHLLQILALFAMETPVSLDAEDIRNEKVKVLRSMRQLKLEDVVVGQYKGHSKGGKSYPGYADDPTVPKGSVTPTFAAAALFIDNARWDGVPFLMKAGKALHTRRAEIRVQFRRVPGNLYRRNIGADLDKATNELVLRVQPDEAIYLKVNNKVPGLGMRLDRSNLNLLYSERYRREIPDAYERLLLDAMEGERRLFIRSDELDAAWAIFTPALRELEDRKVAPELYPYGSRGPVGAHYLAANYNVRWGDITSDDDGAF

SEQ ID NO: 17343 - DNA, 1554 bp, Zea mays
  CDS (1)..(1554)
atgtcaggagggtcgtctgaatcttccccgttatctggacaaaatagccttagttctctatcaatttccaaggacaatgaactatcttcagagtctggctgcttgtccattgttgtactaggcgcttctggagaccttgctaagaagaaaactttcccagcgctctttcaccttttccagcagggatttctgcaatctggagaagtccatatatttgggtacgcaagatcaaatctttctgatgatggattaagagaacgcattcgtggatacctcaagggagcttcagatgaacatctttctcagtttttgcagttagtaaaatatgttagtggctcctatgatagggtggaaggatttgagttattaaataaggcaatctctgagtatgaaacttcaaaaaacaatgactcgggaagctaccgcagattattttatttggcattgcctccatcagtctacccatcagtatgcaaaatgataagatcatattgcatgagtccatcttcacacaccggttggacaagggttattgttgaaaagccctttggaaaggatttgaacactgcagaggaactgagtgctgaacttgggcagctgtttcaagaagaacaactctatagaattgaccactatttaggaaaagagcttgtccaaaacttgcttgtgcttcgttttgcaaaccgcttatttttgcctctctggaaccgtgataacatagctaacgtacagatcgtatttaaggaggactttggaactgaaggacgtggaggatattttgatcaatatggtatcattcgtgatatcattcagaaccacttgttgcaggtcttctgtttggtggctatggaaaagcctgtctctcttaaacccgagcacattagagatgaaaaagtcaaggttctgcaatcggtggagcctataaagcatgaagaggtagtcatcggacaatatgatggctacaaggatgaccctactgtgccagatgactccaacacccctacttttgcatctgttgtactgagggtacacaacgaaagatgggagggggttccattcatcctcaaggctggcaaagcactaaattcgaggaaagcagagatacgtgtacagttcaaggatgctcctggtgacatttttagatgcaagaaacaaggcaggaatgagtttgtcatacgcctgcagccatcagaagccatgtacatgaaactaacggtcaaaaaacccggactggaaatggcaaccgaacaaagcgaactggatctatcgtatgggatgcggtacaatggcgtcaaaatcccagaagcatacgagcgtctcatcttggatacgataagaggagaccagcagcacttcgttcgccgagatgagctgagggccgcatgggaaatcttcactcctttgcttcacgacatcgatggtggcaagctcaggtccgttccgtacaagccgggaacccgaggaccgcaggaagccgacgagttgagcaggaggatggggtatgtgcagacccatgggtatgtatgggttccgccgaccctttctaaggtttag

SEQ ID NO: 17344 - protein, 517 aa, Zea mays
MSGGSSESSPLSGQNSLSSLSISKDNELSSESGCLSIVVLGASGDLAKKKTFPALFHLFQQGFLQSGEVHIFGYARSNLSDDGLRERIRGYLKGASDEHLSQFLQLVKYVSGSYDRVEGFELLNKAISEYETSKNNDSGSYRRLFYLALPPSVYPSVCKMIRSYCMSPSSHTGWTRVIVEKPFGKDLNTAEELSAELGQLFQEEQLYRIDHYLGKELVQNLLVLRFANRLFLPLWNRDNIANVQIVFKEDFGTEGRGGYFDQYGIIRDIIQNHLLQVFCLVAMEKPVSLKPEHIRDEKVKVLQSVEPIKHEEVVIGQYDGYKDDPTVPDDSNTPTFASVVLRVHNERWEGVPFILKAGKALNSRKAEIRVQFKDAPGDIFRCKKQGRNEFVIRLQPSEAMYMKLTVKKPGLEMATEQSELDLSYGMRYNGVKIPEAYERLILDTIRGDQQHFVRRDELRAAWEIFTPLLHDIDGGKLRSVPYKPGTRGPQEADELSRRMGYVQTHGYVWVPPTLSKV

SEQ ID NO: 17345 - DNA, 24 bp, Artificial sequence
  primer
atgggaactagtgaatggcatatc

SEQ ID NO: 17346 - DNA, 20 bp, Artificial sequence
  primer
ctacaaggtaggagggatcc

SEQ ID NO: 17347 - protein, 525 aa, Artificial sequence
  consensus sequence
  Variant (2)..(3): Xaa in position 2 to 3 is any amino acid
  Variant (7)..(9): Xaa in position 7 to 9 is any amino acid
  Variant (11)..(12): Xaa in position 11 to 12 is any amino acid
  Variant (14)..(14): Xaa in position 14 is any amino acid
  Variant (16)..(16): Xaa in position 16 is any amino acid
  Variant (17)..(17): Xaa in position 17 is any or no amino acid
  Variant (19)..(22): Xaa in position 19 to 22 is any amino acid
  Variant (23)..(23): Xaa in position 23 is any or no amino acid
  Variant (25)..(28): Xaa in position 25 to 28 is any amino acid
  Variant (29)..(32): Xaa in position 29 to 32 is any or no amino acid
  Variant (34)..(35): Xaa in position 34 to 35 is any amino acid
  Variant (37)..(53): Xaa in position 37 to 53 is any amino acid
  Variant (54)..(75): Xaa in position 54 to 75 is any or no amino acid
  Variant (77)..(81): Xaa in position 77 to 81 is any amino acid
  Variant (83)..(89): Xaa in position 83 to 89 is any amino acid
  Variant (90)..(96): Xaa in position 90 to 96 is any or no amino acid
  Variant (98)..(109): Xaa in position 98 to 109 is any amino acid
  Variant (110)..(121): Xaa in position 110 to 121 is any or no amino acid
  Variant (123)..(126): Xaa in position 123 to 126 is any amino acid
  Variant (128)..(146): Xaa in position 128 to 146 is any amino acid
  Variant (147)..(155): Xaa in position 147 to 155 is any or no amino acid
  Variant (157)..(157): Xaa in position 157 is any amino acid
  Variant (158)..(159): Xaa in position 158 to 159 is any or no amino acid
  Variant (163)..(163): Xaa in position 163 is any amino acid
  Variant (165)..(165): Xaa in position 165 is any amino acid
  Variant (167)..(168): Xaa in position 167 to 168 is any amino acid
  Variant (170)..(177): Xaa in position 170 to 177 is any amino acid
  Variant (178)..(182): Xaa in position 178 to 182 is any or no amino acid
  Variant (184)..(187): Xaa in position 184 to 187 is any amino acid
  Variant (197)..(197): Xaa in position 197 is any amino acid
  Variant (199)..(199): Xaa in position 199 is any amino acid
  Variant (201)..(204): Xaa in position 201 to 204 is any amino acid
  Variant (207)..(207): Xaa in position 207 is any amino acid
  Variant (209)..(214): Xaa in position 209 to 214 is any amino acid
  Variant (215)..(215): Xaa in position 215 is any or no amino acid
  Variant (217)..(219): Xaa in position 217 to 219 is any amino acid
  Variant (220)..(220): Xaa in position 220 is any or no amino acid
  Variant (222)..(223): Xaa in position 222 to 223 is any amino acid
  Variant (224)..(224): Xaa in position 224 is any or no amino acid
  Variant (227)..(229): Xaa in position 227 to 229 is any amino acid
  Variant (231)..(231): Xaa in position 231 is any amino acid
  Variant (232)..(232): Xaa in position 232 is any or no amino acid
  Variant (234)..(236): Xaa in position 234 to 236 is any amino acid
  Variant (237)..(237): Xaa in position 237 is any or no amino acid
  Variant (239)..(239): Xaa in position 239 is any amino acid
  Variant (242)..(242): Xaa in position 242 is any amino acid
  Variant (244)..(245): Xaa in position 244 to 245 is any amino acid
  Variant (247)..(248): Xaa in position 247 to 248 is any amino acid
  Variant (249)..(249): Xaa in position 249 is any or no amino acid
  Variant (252)..(253): Xaa in position 252 to 253 is any amino acid
  Variant (258)..(258): Xaa in position 258 is any amino acid
  Variant (260)..(263): Xaa in position 260 to 263 is any amino acid
  Variant (264)..(264): Xaa in position 264 is any or no amino acid
  Variant (268)..(268): Xaa in position 268 is any amino acid
  Variant (270)..(271): Xaa in position 270 to 271 is any amino acid
  Variant (272)..(277): Xaa in position 272 to 277 is any or no amino acid
  Variant (279)..(279): Xaa in position 279 is any amino acid
  Variant (282)..(282): Xaa in position 282 is any amino acid
  Variant (286)..(303): Xaa in position 286 to 303 is any amino acid
  Variant (304)..(318): Xaa in position 304 to 318 is any or no amino acid
  Variant (320)..(324): Xaa in position 320 to 324 is any amino acid
  Variant (325)..(332): Xaa in position 325 to 332 is any or no amino acid
  Variant (334)..(334): Xaa in position 334 is any amino acid
  Variant (336)..(336): Xaa in position 336 is any amino acid
  Variant (338)..(346): Xaa in position 338 to 346 is any amino acid
  Variant (348)..(348): Xaa in position 348 is any amino acid
  Variant (351)..(351): Xaa in position 351 is any amino acid
  Variant (356)..(359): Xaa in position 356 to 359 is any amino acid
  Variant (362)..(368): Xaa in position 362 to 368 is any amino acid
  Variant (370)..(373): Xaa in position 370 to 373 is any amino acid
  Variant (375)..(383): Xaa in position 375 to 383 is any amino acid
  Variant (384)..(404): Xaa in position 384 to 404 is any or no amino acid
  Variant (406)..(411): Xaa in position 406 to 411 is any amino acid
  Variant (412)..(412): Xaa in position 412 is any or no amino acid
  Variant (415)..(415): Xaa in position 415 is any amino acid
  Variant (417)..(424): Xaa in position 417 to 424 is any amino acid
  Variant (425)..(428): Xaa in position 425 to 428 is any or no amino acid
  Variant (430)..(430): Xaa in position 430 is any amino acid
  Variant (433)..(453): Xaa in position 433 to 453 is any amino acid
  Variant (454)..(466): Xaa in position 454 to 466 is any or no amino acid
  Variant (472)..(473): Xaa in position 472 to 473 is any amino acid
  Variant (475)..(477): Xaa in position 475 to 477 is any amino acid
  Variant (479)..(482): Xaa in position 479 to 482 is any amino acid
  Variant (484)..(484): Xaa in position 484 is any amino acid
  Variant (486)..(486): Xaa in position 486 is any amino acid
  Variant (489)..(492): Xaa in position 489 to 492 is any amino acid
  Variant (494)..(497): Xaa in position 494 to 497 is any amino acid
  Variant (499)..(508): Xaa in position 499 to 508 is any amino acid
  Variant (509)..(516): Xaa in position 509 to 516 is any or no amino acid
  Variant (518)..(519): Xaa in position 518 to 519 is any amino acid
  Variant (521)..(522): Xaa in position 521 to 522 is any amino acid
  Variant (523)..(523): Xaa in position 523 is any or no amino acid
GXXGDLXXXKXXPXLXXLXXXXXLXXXXXXXXGXXRXXXXXXXXXXXXXXXXXXXXXXXXXXXXXXXXXXXXXXXFXXXXXYXXXXXXXXXXXXXXLXXXXXXXXXXXXXXXXXXXXXXXXYXXXXPXXXXXXXXXXXXXXXXXXXXXXXXXXXXRXXXEKPXGXDXXSXXXXXXXXXXXXXEXXXXRIDHYLGKEXVXNXXXXRFXNXXXXXXXWXXXXIXXXQIXXXEXXGXXXXRXGYXDXXGXXXRDXXQNHLXQXXXXXAMEXPXXXXXXXXRXEKXKVLXXXXXXXXXXXXXXXXXXXXXXXXXXXXXXXXXYXXXXXXXXXXXXXSXTXTXXXXXXXXXNXRWXGVPFXXXXGKXXXXXXXEXXXXFXXXXXXXXXXXXXXXXXXXXXXXXXXXXXXNXXXXXXXQPXEXXXXXXXXXXXXKXPGXXXXXXXXXXXXXXXXXXXXXXXXXXXXXXXXXXAYERLXXDXXXGXXXXFXRXDEXXXXWXXXXPXXXXXXXXXXXXXXXXXXYXXGXXXGP

SEQ ID NO: 17348 - protein, 21 aa, Artificial sequence
  protein pattern
  Variant (7)..(7): Xaa in position 7 is any amino acid
  Variant (8)..(8): Xaa in position 8 is any or no amino acid
  Variant (10)..(10): Xaa in position 10 is any amino acid
  Variant (12)..(12): Xaa in position 12 is any amino acid
  Variant (14)..(14): Xaa in position 14 is Ile, Leu or Met
  Variant (15)..(17): Xaa in position 15 to 17 is any amino acid
  Variant (20)..(20): Xaa in position 20 is Ala, Gly or Ser
RIDHYLXXEXVXNXXXXRFXN

SEQ ID NO: 17349 - protein, 15 aa, Artificial sequence
  protein pattern
  Variant (2)..(2): Xaa in position 2 is any amino acid
  Variant (5)..(5): Xaa in position 5 is any amino acid
  Variant (9)..(9): Xaa in position 9 is Phe or Ile
  Variant (10)..(10): Xaa in position 10 is any amino acid
  Variant (11)..(11): Xaa in position 11 is Ile, Leu, Met or Val
  Variant (12)..(12): Xaa in position 12 is any amino acid
  Variant (13)..(13): Xaa in position 13 is Ala, Cys, Ser or Thr
NXRWXGVPXXXXXGK

SEQ ID NO: 17350 - protein, 15 aa, Artificial sequence
  protein pattern
  Variant (2)..(3): Xaa in position 2 to 3 is any amino acid
  Variant (6)..(6): Xaa in position 6 is Ile, Met or Val
  Variant (7)..(7): Xaa in position 7 is Phe, Ile, Leu, Met or Val
  Variant (11)..(11): Xaa in position 11 is any or no amino acid
  Variant (13)..(13): Xaa in position 13 is any or no amino acid
  Variant (15)..(15): Xaa in position 15 is Ile, Leu, Met or Val
GXXRDXXQNHXLXQX

SEQ ID NO: 17351 - protein, 28 aa, Artificial sequence
  protein pattern
  Variant (2)..(2): Xaa in position 2 is any or no amino acid
  Variant (5)..(5): Xaa in position 5 is any amino acid
  Variant (7)..(7): Xaa in position 7 is Phe, Ile, Leu or Val
  Variant (8)..(8): Xaa in position 8 is any amino acid
  Variant (9)..(9): Xaa in position 9 is Asp or Glu
  Variant (10)..(17): Xaa in position 10 to 17 is any amino acid
  Variant (19)..(27): Xaa in position 19 to 27 is any amino acid
AXYEXLXXXXXXXXXXXFXXXXXXXXXW

SEQ ID NO: 17352 - protein, 18 aa, Artificial sequence
  protein pattern
  Variant (2)..(3): Xaa in position 2 to 3 is any or no amino acid
  Variant (5)..(5): Xaa in position 5 is Ala, Gly, Ser, Thr or Val
  Variant (6)..(6): Xaa in position 6 is any amino acid
  Variant (10)..(10): Xaa in position 10 is Ala, Cys, Ser, Thr or Val
  Variant (11)..(15): Xaa in position 11 to 15 is any amino acid
  Variant (17)..(17): Xaa in position 17 is Ala, Cys, Gly, Ser or Thr
  Variant (18)..(18): Xaa in position 18 is Phe, Ile, Leu, Met or Val
VXXGXXGDLXXXXXXPXX

SEQ ID NO: 17353 - protein, 19 aa, Artificial sequence
  protein pattern
  Variant (2)..(2): Xaa in position 2 is Asp or Glu
  Variant (3)..(3): Xaa in position 3 is any amino acid
  Variant (5)..(11): Xaa in position 5 to 11 is any amino acid
  Variant (12)..(12): Xaa in position 12 is Phe, Ile, Leu, Met or Val
  Variant (14)..(14): Xaa in position 14 is any amino acid
  Variant (16)..(17): Xaa in position 16 to 17 is any or no amino acid
MXXPXXXXXXXXRXEXXKV

SEQ ID NO: 17354 - protein, 18 aa, Artificial sequence
  protein pattern
  Variant (2)..(2): Xaa in position 2 is Ile, Leu or Val
  Variant (3)..(3): Xaa in position 3 is Ile or Val
  Variant (4)..(4): Xaa in position 4 is Phe, Ile, Leu, Met or Val
  Variant (8)..(8): Xaa in position 8 is Phe, Ile or Leu
  Variant (9)..(9): Xaa in position 9 is Ala or Gly
  Variant (10)..(10): Xaa in position 10 is any amino acid
  Variant (12)..(13): Xaa in position 12 to 13 is any amino acid
  Variant (14)..(14): Xaa in position 14 is Pro, Ser or Thr
  Variant (15)..(17): Xaa in position 15 to 17 is any amino acid
  Variant (18)..(18): Xaa in position 18 is Phe, Ile, Leu, Met or Val
RXXXEKPXXXDXXXXXXX

SEQ ID NO: 17355 - protein, 23 aa, Artificial sequence
  protein pattern
  Variant (2)..(2): Xaa in position 2 is any amino acid
  Variant (3)..(3): Xaa in position 3 is Phe, Ile or Leu
  Variant (4)..(4): Xaa in position 4 is any amino acid
  Variant (5)..(5): Xaa in position 5 is Phe, Ile, Leu, Met or Val
  Variant (6)..(7): Xaa in position 6 to 7 is any amino acid
  Variant (10)..(10): Xaa in position 10 is any amino acid
  Variant (12)..(19): Xaa in position 12 to 19 is any amino acid
  Variant (21)..(22): Xaa in position 21 to 22 is any amino acid
NXXXXXXQPXEXXXXXXXXKXXG

SEQ ID NO: 17356 - DNA, 1863 bp, Arabidopsis thaliana; identical to SEQ ID NO: 16223
  CDS (1)..(1863)

SEQ ID NO: 17357 - protein, 620 aa, Arabidopsis thaliana; identical to SEQ ID NO: 16224

SEQ ID NO: 17358 - DNA, 1863 bp, Arabidopsis thaliana; identical to SEQ ID NO: 16223
  CDS (115)..(1863)

SEQ ID NO: 17359 - protein, 582 aa, Arabidopsis thaliana
MRHNHVSSSTTEHQRRSWTNANGKETKSHSNFADSGGIVAVEEAELVAVLREAHPYVNLHRDSKFVVMLSAELLDSGFQSEIIITCVQDIAFLHHLGIKFVLVPGTQVQIDQLLAERGREPTYVGRYRVTDSASLQAAKEAAGAISVMIEAKLSPGPSIYNIRRHGDSSRLHETGVRVDTGNFFAAKRRGVVDGVDFGATGLVKKIDVDRIRERLDSGSVVLLRNLGHSSTGEVLNCNTYEVATACALAIGADKLICIMDGPVLDENGHLVRFLTLQEADTLVRKRAQQSEIAANYVKAVGDGGISSFPEPLGYNGMVTTPNNHIGRPIWEKLSPTFQNGVGFDNGNGLWSGEQGFAIGGEERISRLNGYLSELAAAAFVCRGGVKRVHLLDGTISGVLLLELFKRDGMGTMVASDVYEGNREAKVEDLAGIRQIIKPLEESGALVRRTDEELLRALDSFVVVEREGHIIACAALFPFFEEKCGEVAAIAVASDCRGQGQGDKLLDYIEKKASALGLEMLFLLTTRTADWFVRRGFQECPIEMIPEARRERINLSRRSKYYMKKLLPDRSGISVVRTFQYDS

SEQ ID NO: 17360 - DNA, 2250 bp, Arabidopsis thaliana
  CDS (316)..(2250)
atggcaaattgcagaactccacgaccgtgcgttggcaagctcagccgcggcgtggtttgggaaaactccgattttcggtctgaacctccaggttcttggggatgtccgaagcaaatgagacacaatcacgtgtcttcttcgacaacggagcatcaacgacgaagctggaccaacgctaacggtaaagaaacaaagagccattccaattttgcagactctggtgggattgttgcggtggaggaagcggagttagtggcagtgttgagggaggctcatccgtacgtgaatttacatagagacagtaaatttgtcgttatgttgtcggctgagctacttgactccgagcgtggagctatggtggtatcgtcttctacctgttacgttccttttcgatgtcctcaagcaagaaaagattttgctttcgtcgagccgagtaagaagctaaaccctaatcgtgtattgataaagcctccggtttacacgtattctccggcactgacggcggcgaaatgtaacatttttgattacgcggaaactggtgagaatttggtcggcgataagcaatttgtgcggtggtttcgtgaagcttggccttatttgtgggctcatcgtagctgtaccttcgtcgttactatctccggcgatgtcttagacggcccttattgtgatctcgttttaaaggcacatacttattctttatcgttcagtgtttggtttatgcacgcaagaggattccaaagtgaaatcattataacatgtgtgcaggacatagcatttcttcatcatctgggcattaagtttgttctagttcctggaactcaagtgcaaatcgaccagcttctagctgagagaggacgcgagcctacatatgtaggtcgttacagagtcacagactcagcatctcttcaggctgctaaggaagctgcgggagcaatatctgtaatgattgaggccaaactatctcccggaccttctatttacaatatacgccgacatggtgatagtagtcgtttgcatgaaacaggcgttagggtcgatactggtaacttctttgcagcaaagagaagaggtgttgttgatggtgttgattttggagcaactggtttagtgaagaagatagatgtagatcgaatccgtgagaggcttgatagtggttctgtagttttattgaggaacttgggccattccagcaccggagaagtcttaaattgcaatacctatgaggttgctacagcatgtgctttagctataggagcagataagcttatttgcataatggatggtccagttcttgatgagaatggacatcttgttcggttcttgactcttcaggaagcagatacattagtcagaaaacgggcacagcaaagcgagatcgctgccaattacgtgaaggctgttggggatggaggcataagtagttttcctgaacctcttggttacaatggtatggtgacgactcccaacaatcatattgggagaccgatttgggaaaaactcagtccgacctttcagaatggtgttggatttgacaacggaaatgggttgtggtctggggagcaaggttttgctattggcggtgaggagagaattagccgtttgaatggatatctctctgaactggctgcagcagcgttcgtttgcagaggtggtgtcaaaagagttcacttattggatggtactataagtggagtgctattgttggagcttttcaaaagagatggaatggggactatggtggcaagtgatgtatatgaaggaaaccgggaggcgaaagtggaagatcttgctggaataagacaaataatcaaacccctggaagaatctggggctttagttcgtagaactgatgaggagcttctgcgagctttggattcgtttgtggttgtggaaagggaaggacatattatcgcttgcgcggctttgttccctttctttgaagaaaaatgtggagaagttgcagctatcgcagttgcatcagattgccgtggacaaggccagggagataaattgctcgattacattgagaagaaagcgtcagctcttggacttgagatgctatttctgctgacaacgagaaccgcggactggtttgtgagacgcgggtttcaggaatgtccaatcgagatgataccagaggcaagacgggaaagaatcaatctttcgaggagatcaaagtattacatgaagaagctgttgccagacaggagtggaatttctgttgttcgaacatttcagtatgattcttga

SEQ ID NO: 17361 - protein, 644 aa, Arabidopsis thaliana
MLSAELLDSERGAMVVSSSTCYVPFRCPQARKDFAFVEPSKKLNPNRVLIKPPVYTYSPALTAAKCNIFDYAETGENLVGDKQFVRWFREAWPYLWAHRSCTFVVTISGDVLDGPYCDLVLKAHTYSLSFSVWFMHARGFQSEIIITCVQDIAFLHHLGIKFVLVPGTQVQIDQLLAERGREPTYVGRYRVTDSASLQAAKEAAGAISVMIEAKLSPGPSIYNIRRHGDSSRLHETGVRVDTGNFFAAKRRGVVDGVDFGATGLVKKIDVDRIRERLDSGSVVLLRNLGHSSTGEVLNCNTYEVATACALAIGADKLICIMDGPVLDENGHLVRFLTLQEADTLVRKRAQQSEIAANYVKAVGDGGISSFPEPLGYNGMVTTPNNHIGRPIWEKLSPTFQNGVGFDNGNGLWSGEQGFAIGGEERISRLNGYLSELAAAAFVCRGGVKRVHLLDGTISGVLLLELFKRDGMGTMVASDVYEGNREAKVEDLAGIRQIIKPLEESGALVRRTDEELLRALDSFVVVEREGHIIACAALFPFFEEKCGEVAAIAVASDCRGQGQGDKLLDYIEKKASALGLEMLFLLTTRTADWFVRRGFQECPIEMIPEARRERINLSRRSKYYMKKLLPDRSGISVVRTFQYDS

SEQ ID NO: 17362 - DNA, 1956 bp, Brassica napus; identical to SEQ ID NO: 16157
  CDS (98)..(1870)

SEQ ID NO: 17363 - protein, 590 aa, Brassica napus; identical to SEQ ID NO: 16158

SEQ ID NO: 17364 - DNA, 2096 bp, Triticum aestivum; identical to SEQ ID NO: 16159
  CDS (110)..(1852)

SEQ ID NO: 17365 - protein, 580 aa, Triticum aestivum; identical to SEQ ID NO: 16160

SEQ ID NO: 17366 - DNA, 1851 bp, Oryza sativa (japonica cultivar-group); identical to SEQ ID NO: 16163
  CDS (1)..(1851)

SEQ ID NO: 17367 - protein, 616 aa, Oryza sativa (japonica cultivar-group); identical to SEQ ID NO: 16164

SEQ ID NO: 17368 - DNA, 1794 bp, Oryza sativa (japonica cultivar-group); identical to SEQ ID NO: 16165
  CDS (1)..(1794)

SEQ ID NO: 17369 - protein, 597 aa, Oryza sativa (japonica cultivar-group); identical to SEQ ID NO: 16166

SEQ ID NO: 17370 - DNA, 1830 bp, Arabidopsis thaliana; identical to SEQ ID NO: 16167
  CDS (1)..(1830)

SEQ ID NO: 17371 - protein, 609 aa, Arabidopsis thaliana; identical to SEQ ID NO: 16168

SEQ ID NO: 17372 - DNA, 1632 bp, Arabidopsis thaliana
  CDS (1)..(1632)
atggagcgaggagctttagtgggttcttcttctacttctagctactatgttccttaccactttcgccaatcaaagtcgaatttttcgtcattcaaaccaaaaaataagctaaaccctactcaattccggtttaactgttcatggtttaagccggttagttctataacggcggcgaaatgcaatatgtttgactacgcggtgactgcagccggcgatgtggaggctgagcatccagttgacgacaaacagtttgtgcgttggttccgtgaagcatggccttatctttgggctcaccgtggctgcacattcgtcgttattatctccggcgagatcatcgccggctcttcttgtgatgccattttgaaggacatagcgtttcttcatcatctaggaataaggtttgttttagttcctggaactcaggagcaaatcgaccagcttctggctgagagaggacgcgaggctacgtatgtgggacgttacagagtaacggatgcagcatctttgcaggctgctaaagaagctgcaggagcaatatcagtgatgcttgaggccaaattatctcctggaccttctatttgcaatatccgtagacatggtgatcgtagtcgtttacatgatataggtgttagggttgataccggtaacttctttgcagcaaaaagaagaggtgttgttgatggtgttgattttggagcgactggtgaggtaaagaagatagatgtagatcggatttgtgagaggcttgacggtggttctgtagttttgttgaggaacttgggccactcgagctccggagaagtcttaaattgcaatacctatgaggttgctacagcttgtgctttagctataggagcagataagcttatttgcataatggacggcccaattcttgatgagagtggacatcttattcatttcttgacacttcaagaagcagatatgttagttcgaaaacgggcacaacaaagcgacatagctgcaaattacgtaaaagccgttggagatggaagcatggcttatcccgaacctcctaacaacaccaatggtaatattacttctgctcaaaacgggagagccgtttcattttggggaaacggaaaccacactccgatctttcagaacggtgttggatttgacaacggaaacggattgtggccttgtgagcaaggttttgctattggtggtgaagaaagattaagccgcttaaacggttatctttctgaattggctgctgcggcgttcgtctgcagaggtggagtcaaaagagttcacttgttggatggtactataagtggagttctattgttggagcttttcaaaagagatggaatgggaactatggttgctagtgatgtttacgaaggaacccgtgatgccagagtggaagatctagcaggaattagacatataatcaaacccttggaggaatcagggattttagttcgcagaactgatgaggagttactgcgagctttggattcatttgtggttgtggaaagggaaggacagatcatcgcttgtgcggctttgtttccgttcttcaaagacaaatgcggagaagttgctgcaatcgcggttgcatcagattgtcgcggtcaaggccaaggcgataaattgctcggtgaataa

SEQ ID NO: 17373 - protein, 543 aa, Arabidopsis thaliana
MERGALVGSSSTSSYYVPYHFRQSKSNFSSFKPKNKLNPTQFRFNCSWFKPVSSITAAKCNMFDYAVTAAGDVEAEHPVDDKQFVRWFREAWPYLWAHRGCTFVVIISGEIIAGSSCDAILKDIAFLHHLGIRFVLVPGTQEQIDQLLAERGREATYVGRYRVTDAASLQAAKEAAGAISVMLEAKLSPGPSICNIRRHGDRSRLHDIGVRVDTGNFFAAKRRGVVDGVDFGATGEVKKIDVDRICERLDGGSVVLLRNLGHSSSGEVLNCNTYEVATACALAIGADKLICIMDGPILDESGHLIHFLTLQEADMLVRKRAQQSDIAANYVKAVGDGSMAYPEPPNNTNGNITSAQNGRAVSFWGNGNHTPIFQNGVGFDNGNGLWPCEQGFAIGGEERLSRLNGYLSELAAAAFVCRGGVKRVHLLDGTISGVLLLELFKRDGMGTMVASDVYEGTRDARVEDLAGIRHIIKPLEESGILVRRTDEELLRALDSFVVVEREGQIIACAALFPFFKDKCGEVAAIAVASDCRGQGQGDKLLGE

SEQ ID NO: 17374 - DNA, 1398 bp, Escherichia coli CFT073; identical to SEQ ID NO: 16169
  CDS (1)..(1398): transl_table=11

SEQ ID NO: 17375 - protein, 465 aa, Escherichia coli CFT073; identical to SEQ ID NO: 16170

SEQ ID NO: 17376 - DNA, 1347 bp, Pseudomonas syringae pv. tomato str. DC3000; identical to SEQ ID NO: 16171
  CDS (1)..(1347): transl_table=11

SEQ ID NO: 17377 - protein, 448 aa, Pseudomonas syringae pv. tomato str. DC3000; identical to SEQ ID NO: 16172

SEQ ID NO: 17378 - DNA, 1842 bp, Arabidopsis thaliana; identical to SEQ ID NO: 16175
  CDS (1)..(1842)

SEQ ID NO: 17379 - protein, 613 aa, Arabidopsis thaliana; identical to SEQ ID NO: 16176

SEQ ID NO: 17380 - DNA, 1311 bp, Herminiimonas arsenicoxydans; identical to SEQ ID NO: 16177
  CDS (1)..(1311): transl_table=11

SEQ ID NO: 17381 - protein, 436 aa, Herminiimonas arsenicoxydans; identical to SEQ ID NO: 16178

SEQ ID NO: 17382 - DNA, 1356 bp, Acinetobacter sp. ADP1; identical to SEQ ID NO: 16179
  CDS (1)..(1356): transl_table=11

SEQ ID NO: 17383 - protein, 451 aa, Acinetobacter sp. ADP1; identical to SEQ ID NO: 16180

SEQ ID NO: 17384 - DNA, 1326 bp, Erwinia carotovora subsp. atroseptica SCRI1043; identical to SEQ ID NO: 16181
  CDS (1)..(1326): transl_table=11

SEQ ID NO: 17385 - protein, 441 aa, Erwinia carotovora subsp. atroseptica SCRI1043; identical to SEQ ID NO: 16182

SEQ ID NO: 17386 - DNA, 1320 bp, Mannheimia succiniciproducens MBEL55E; identical to SEQ ID NO: 16183
  CDS (1)..(1320): transl_table=11

SEQ ID NO: 17387 - protein, 439 aa, Mannheimia succiniciproducens MBEL55E; identical to SEQ ID NO: 16184

SEQ ID NO: 17388 - DNA, 1347 bp, Methylococcus capsulatus str. Bath; identical to SEQ ID NO: 16185
  CDS (1)..(1347): transl_table=11

SEQ ID NO: 17389 - protein, 448 aa, Methylococcus capsulatus str. Bath; identical to SEQ ID NO: 16186

SEQ ID NO: 17390 - DNA, 1299 bp, Pseudomonas fluorescens Pf-5; identical to SEQ ID NO: 16189
  CDS (1)..(1299): transl_table=11

SEQ ID NO: 17391 - protein, 432 aa, Pseudomonas fluorescens Pf-5; identical to SEQ ID NO: 16190

SEQ ID NO: 17392 - DNA, 1347 bp, Pseudomonas syringae pv. phaseolicola 1448A; identical to SEQ ID NO: 16195
  CDS (1)..(1347): transl_table=11

SEQ ID NO: 17393 - protein, 448 aa, Pseudomonas syringae pv. phaseolicola 1448A; identical to SEQ ID NO: 16196

SEQ ID NO: 17394 - DNA, 1299 bp, Pseudomonas fluorescens PfO-1; identical to SEQ ID NO: 16201
  CDS (1)..(1299): transl_table=11

SEQ ID NO: 17395 - protein, 432 aa, Pseudomonas fluorescens PfO-1; identical to SEQ ID NO: 16202

SEQ ID NO: 17396 - DNA, 1437 bp, Ralstonia metallidurans CH34; identical to SEQ ID NO: 16209
  CDS (1)..(1437): transl_table=11

SEQ ID NO: 17397 - protein, 478 aa, Ralstonia metallidurans CH34; identical to SEQ ID NO: 16210

SEQ ID NO: 17398 - DNA, 1335 bp, Alkalilimnicola ehrlichei MLHE-1; identical to SEQ ID NO: 16213
  CDS (1)..(1335): transl_table=11

SEQ ID NO: 17399 - protein, 444 aa, Alkalilimnicola ehrlichei MLHE-1; identical to SEQ ID NO: 16214

SEQ ID NO: 17400 - DNA, 1347 bp, Vibrio sp. Ex25
  CDS (1)..(1347): transl_table=11
atggctgtagtgaaaattcgtagtactgctctcgtaaaaggattccgtcaatcaacaccttatgtcaatgctcaccgcggaaaaaccatggtgatcatgctgggcggagaagccgtcgcacacaaaaattttggcaatattattaatgatatcgcactcatgcacagcctcggaattaaagtcgtggtggtgtatggtgcacgtcctcaaattaatcagctgctagaaaaacaagacctcactacgccttaccacaaaaatatccgcattacggatgaatcggctttatctgttgttatgcaagctgccggacaacttcaacttgcgattactgcgcgcctatcaatgagcctcaacaacactccgatggcaggcacccagctcaatgtcgttagcggaaactacatcattgctcagccacttggcgttgatgatggtgtggactattgccatagtggacgcattcgccgcattgacaccgacgcgattaatcgcacgctcgaccaaggctctattgtgctacttggccccattgcgagctctgtgactggcgagtgttttaacttactttctgaagaagttgcgacacaactggcgatcaaattaggcgcagacaaactgattggtttctgttcagaacaaggtgtcattgatgacaacggtaatgctgtcgccgagttgctgccaattgaggcggagcatgttatcaaaacgctctctgaaaatacgtctcctgacctagattacaacactgggacactgcgctttcttaaaggctctattgccgcttgccgtgccggagtacctcgtagccacttgatcagttataaagtagatggcgccttaattcaggagttgttctctttcgacggcatcggaacccaagttgttatggcgagcgctgaacaagtgaggcaagccaatattgacgatattggcggtatcttagacctcattcgtcctttagaagaacaaggtgtactcgttaggcgctctcgagagcagcttgagcaagagattggaaaatttaccatcatcgagaaagacggcttgattattggctgcgcagctctttatccgtatccagaagagcgcaaagctgagatggcttgcgtagcgattcaccctgactatcgtgatggaaaccgaggtttgttactgctcaactacatgaaacatcgttctaaatccgaaaccattgatcaaatctttgtcctcacgacacacagtctgcattggttcagagaacaaggtttttacgaagtcagtgtcgactatttacctggagccaaacaagggttatataacttccagcgtaagtcaaaaatcttagcgctagatttgtag

SEQ ID NO: 17401 - protein, 448 aa, Vibrio sp. Ex25
MAVVKIRSTALVKGFRQSTPYVNAHRGKTMVIMLGGEAVAHKNFGNIINDIALMHSLGIKVVVVYGARPQINQLLEKQDLTTPYHKNIRITDESALSVVMQAAGQLQLAITARLSMSLNNTPMAGTQLNVVSGNYIIAQPLGVDDGVDYCHSGRIRRIDTDAINRTLDQGSIVLLGPIASSVTGECFNLLSEEVATQLAIKLGADKLIGFCSEQGVIDDNGNAVAELLPIEAEHVIKTLSENTSPDLDYNTGTLRFLKGSIAACRAGVPRSHLISYKVDGALIQELFSFDGIGTQVVMASAEQVRQANIDDIGGILDLIRPLEEQGVLVRRSREQLEQEIGKFTIIEKDGLIIGCAALYPYPEERKAEMACVAIHPDYRDGNRGLLLLNYMKHRSKSETIDQIFVLTTHSLHWFREQGFYEVSVDYLPGAKQGLYNFQRKSKILALDL

SEQ ID NO: 17402 - DNA, 1299 bp, Pseudomonas putida GB-1; identical to SEQ ID NO: 16215
  CDS (1)..(1299): transl_table=11

SEQ ID NO: 17403 - protein, 432 aa, Pseudomonas putida GB-1; identical to SEQ ID NO: 16216

SEQ ID NO: 17404 - DNA, 1770 bp, Oryza sativa subsp; identical to SEQ ID NO: 16221
  CDS (1)..(1770)

SEQ ID NO: 17405 - protein, 589 aa, Oryza sativa subsp; identical to SEQ ID NO: 16222

SEQ ID NO: 17406 - DNA, 1626 bp, Oryza sativa subsp
  CDS (1)..(1626)
atggcctcgccgtcgtcggtcgcttccgctcgcgccgccgccgaaggagcggcgacggtggctgctcggggtggcgccgagcccgcccgggccctgcggctgcctccggcgaacggggcgcggcgtggtgtccggtgctgctgcggggccgcgaatcccggcggcggtagcggtggcggtggcggcgcggtcgcgcgggaggagttcgtcgggttcttcagggaggcgtggccgtacatccggggccacagggggagcaccttcgtggtcgtcatctccagcgaggtcgtgtcagggccgcacttcgacggcattctgcaggatatttcacttcttcatggtttggggattcaatttgttcttgttcctggaacacatgtccaaattgataagctcttgtcagaaagagggaggatggctaagtatgttggccagtaccgagttactgattctgattcattagaggctgcaatggaggcagctggaagaatacgattaactattgaggccaagctttctcctggtcctccaatgttgaatcttcgtagacatggtgttattggacgttggcatggtcttgtggataatgttgcaagtggcaacttccttggtgctaagagaagaggagtagttagtggtattgattatgggttcaccggcgaggttaagaaaattgatgtttcacgaataaaagaaaggcttgatagtgatagcatagttgttgtgagcaatatgggatactcgagctcaggagaagtgctaaactgcaacacttatgaagtagctactgcgtgtgctttagccattgaggcggataagctgatctgcattgtagatggccagatatttgatgagcatggacgtgtcattcctttcatgtctcttgaggaagcagatatgttgatcagaaagcgtgctaagcaaagtgatatcgcagcaaattatgtcaaggttgtggacgaggagggtatcagtcatttgcatgaggatgtcaaaccatttttgaacggaagtggtcctcttggtgcatatgctgcttctttccataatggcttgggtttcaacaatggaaatggtattttatctggtgagcaaggatttgctattggtggtgaagagcggttaagtagatcaaatgcctatctttctgagttggcagcagcagcatttgtatgccatggtggtgttcaaagagttcatatcatagatggaacagttgatggatcactgctattagaattgtttacaagagatggtacaggaacaatgatagctagggatgtgtatgaaggaacaaggatagctagagaggaggatcttcttgggataagaaaaattcttcgaccactagaagaatctggtgttttggtgaagagaactgataaggagcttcttgaagcactggagtcgttctatgttgttgaaagggatggttcaatcattggatgtgctgctctgttcccatttcccgaagataaatctggagaagttgctgcgattgctgtatctgaagaatgccgaggaagaggtcaaggggacaagttgcttgactatattgagaaggcagcaatgtcccttggtctggagaaattattcttgctcacgacacggacagctgattggtaa

SEQ ID NO: 17407 - protein, 541 aa, Oryza sativa subsp
MASPSSVASARAAAEGAATVAARGGAEPARALRLPPANGARRGVRCCCGAANPGGGSGGGGGAVAREEFVGFFREAWPYIRGHRGSTFVVVISSEVVSGPHFDGILQDISLLHGLGIQFVLVPGTHVQIDKLLSERGRMAKYVGQYRVTDSDSLEAAMEAAGRIRLTIEAKLSPGPPMLNLRRHGVIGRWHGLVDNVASGNFLGAKRRGVVSGIDYGFTGEVKKIDVSRIKERLDSDSIVVVSNMGYSSSGEVLNCNTYEVATACALAIEADKLICIVDGQIFDEHGRVIPFMSLEEADMLIRKRAKQSDIAANYVKVVDEEGISHLHEDVKPFLNGSGPLGAYAASFHNGLGFNNGNGILSGEQGFAIGGEERLSRSNAYLSELAAAAFVCHGGVQRVHIIDGTVDGSLLLELFTRDGTGTMIARDVYEGTRIAREEDLLGIRKILRPLEESGVLVKRTDKELLEALESFYVVERDGSIIGCAALFPFPEDKSGEVAAIAVSEECRGRGQGDKLLDYIEKAAMSLGLEKLFLLTTRTADW

SEQ ID NO: 17408 - DNA, 1851 bp, Ostreococcus tauri; identical to SEQ ID NO: 16225
  CDS (1)..(1851)

SEQ ID NO: 17409 - protein, 616 aa, Ostreococcus tauri; identical to SEQ ID NO: 16226

SEQ ID NO: 17410 - DNA, 1728 bp, Oryza sativa subsp; identical to SEQ ID NO: 16227
  CDS (1)..(1728)

SEQ ID NO: 17411 - protein, 575 aa, Oryza sativa subsp; identical to SEQ ID NO: 16228

SEQ ID NO: 17412 - DNA, 1716 bp, Arabidopsis thaliana
  CDS (1)..(1716)
atggagcgaggagctttagtgggttcttcttctacttctagctactatgttccttaccactttcgccaatcaaagtcgaatttttcgtcattcaaaccaaaaaataagctaaaccctactcaattccggtttaactgttcatggtttaagccggttagttctataacggcggcgaaatgcaatatgtttgactacgcggtgactgcagccggcgatgtggaggctgagcatccagttgacgacaaacagtttgtgcgttggttccgtgaagcatggccttatctttgggctcaccgtggctgcacattcgtcgttattatctccggcgagatcatcgccggctcttcttgtgatgccattttgaaggacatagcgtttcttcatcatctaggaataaggtttgttttagttcctggaactcaggagcaaatcgaccagcttctggctgagagaggacgcgaggctacgtatgtgggacgttacagagtaacggatgcagcatctttgcaggctgctaaagaagctgcaggagcaatatcagtgatgcttgaggccaaattatctcctggaccttctatttgcaatatccgtagacatggtgatcgtagtcgtttacatgatataggtgttagggttgataccggtaacttctttgcagcaaaaagaagaggtgttgttgatggtgttgattttggagcgactggtgaggtaaagaagatagatgtagatcggatttgtgagaggcttgacggtggttctgtagttttgttgaggaacttgggccactcgagctccggagaagtcttaaattgcaatacctatgaggttgctacagcttgtgctttagctataggagcagataagcttatttgcataatggacggcccaattcttgatgagagtggacatcttattcatttcttgacacttcaagaagcagatatgttagttcgaaaacgggcacaacaaagcgacatagctgcaaattacgtaaaagccgttggagatggaagcatggcttatcccgaacctcctaacaacaccaatggtaatattacttctgctcaaaacgggagagccgtttcattttggggaaacggaaaccacactccgatctttcagaacggtgttggatttgacaacggaaacggattgtggccttgtgagcaaggttttgctattggtggtgaagaaagattaagccgcttaaacggttatctttctgaattggctgctgcggcgttcgtctgcagaggtggagtcaaaagagttcacttgttggatggtactataagtggagttctattgttggagcttttcaaaagagatggaatgggaactatggttgctaggtacattcattcttttcgtcttcactcgcatatactcctggctttttcgtgttcttacaattctatattgcctgttacgtgcagtgatgtttacgaaggaacccgtgatgccagagtggaagatctagcaggaattagacatataatcaaacccttggaggaatcagggattttagttcgcagaactgatgaggagttactgcgagctttggattcatttgtggttgtggaaagggaaggacagatcatcgcttgtgcggctttgtttccgttcttcaaagacaaatgcggagaagttgctgcaatcgcggttgcatcagattgtcgcggtcaaggccaaggcgataaattgctcggtgaataa

SEQ ID NO: 17413 - protein, 571 aa, Arabidopsis thaliana
MERGALVGSSSTSSYYVPYHFRQSKSNFSSFKPKNKLNPTQFRFNCSWFKPVSSITAAKCNMFDYAVTAAGDVEAEHPVDDKQFVRWFREAWPYLWAHRGCTFVVIISGEIIAGSSCDAILKDIAFLHHLGIRFVLVPGTQEQIDQLLAERGREATYVGRYRVTDAASLQAAKEAAGAISVMLEAKLSPGPSICNIRRHGDRSRLHDIGVRVDTGNFFAAKRRGVVDGVDFGATGEVKKIDVDRICERLDGGSVVLLRNLGHSSSGEVLNCNTYEVATACALAIGADKLICIMDGPILDESGHLIHFLTLQEADMLVRKRAQQSDIAANYVKAVGDGSMAYPEPPNNTNGNITSAQNGRAVSFWGNGNHTPIFQNGVGFDNGNGLWPCEQGFAIGGEERLSRLNGYLSELAAAAFVCRGGVKRVHLLDGTISGVLLLELFKRDGMGTMVARYIHSFRLHSHILLAFSCSYNSILPVTCSDVYEGTRDARVEDLAGIRHIIKPLEESGILVRRTDEELLRALDSFVVVEREGQIIACAALFPFFKDKCGEVAAIAVASDCRGQGQGDKLLGE

SEQ ID NO: 17414 - DNA, 1332 bp, Escherichia coli O157; identical to SEQ ID NO: 16229
  CDS (1)..(1332): transl_table=11

SEQ ID NO: 17415 - protein, 443 aa, Escherichia coli O157; identical to SEQ ID NO: 16230

SEQ ID NO: 17416 - DNA, 1299 bp, Pseudomonas aeruginosa; identical to SEQ ID NO: 16231
  CDS (1)..(1299): transl_table=11

SEQ ID NO: 17417 - protein, 432 aa, Pseudomonas aeruginosa; identical to SEQ ID NO: 16232

SEQ ID NO: 17418 - DNA, 1299 bp, Pseudomonas syringae pv; identical to SEQ ID NO: 16235
  CDS (1)..(1299): transl_table=11

SEQ ID NO: 17419 - protein, 432 aa, Pseudomonas syringae pv; identical to SEQ ID NO: 16236

SEQ ID NO: 17420 - DNA, 1356 bp, Ralstonia solanacearum; identical to SEQ ID NO: 16237
  CDS (1)..(1356): transl_table=11

SEQ ID NO: 17421 - protein, 451 aa, Ralstonia solanacearum; identical to SEQ ID NO: 16238

SEQ ID NO: 17422 - DNA, 1332 bp, Salmonella typhimurium
  CDS (1)..(1332): transl_table=11
atgataaaggaacgtaaaaccgaactggtagaagggtttcgccattcagttccctatatcaacacccatcgcggaaaaacctttgtcattatgctcggcggcgaagccattgagcatgacaatttttccagcatcgttagcgatatcgggctactgcatagcctcggtattcgccttgtcgtggtgtatggcgcgcgaccgcaaatcgacgccaatctggccgcgcatcatcatgaaccgatttaccacaaaaacacgcgggtgacggacgccaaagcactggagctggtgaaacaggccgccggtttactccagcttgatattaccgcccgtctgtcgatgagtctgaacaatacgccgttgcagggcgcgcacattaatgtcgtcagtggcaatttcaccattgcgcagccgctgggcgttgatgatggcgtggactactgtcatagcggccgtatccggcgcattgatgaagatgcgatcaaccgccagttggataacggcgcgatcgttctgatggggccggtcgccgtctcagtgaccggcgaaagttttaatctgacctcagaagagattgccactcaactcgccgttaaactgaaagcggaaaaaatgatcggtttctgttcttctcagggcgttaccaatagcgagggcggcatcatttctgaactcttcccgaatgaagcacaggcgcgggtggaagagttggaagcgcagggcgattacaactccggaaccgtacgttttttgcgcggcgcggtaaaagcctgtcgtagcggcgttcgtcgttgccatctgatcagctatcaggaagatggctcgctattacaggaattgttctcgcgtgatggtatcggtacgcagatcgtcatggagagcgccgagcagatccgccgcgccaccatcaacgatattggcggtattctggagcttatccgcccactggaacagcagggcattctggtacgccgttcccgtgaacaactggagatggagatcgataaatttaccattattcagcgcgataatatgactatcgcctgcgcggcgctgtatccttttgtggaagagaaaataggcgaaatggcctgcgtagcggtacatccggattaccgcagctcatcgcgtggagaagtgcttctggagcgggttgccgcccaggcgcggcaaatggggctgcgtaaattgtttgtgctgacgacgcgcagtattcactggttccaggagcgcggttttacgcctgtcgatatagagttactgcctgagagcaagaaaaaaatgtataactatcagcgacgttcaaaggtgctgatggcagatttaggataa

SEQ ID NO: 17423 - protein, 443 aa, Salmonella typhimurium
MIKERKTELVEGFRHSVPYINTHRGKTFVIMLGGEAIEHDNFSSIVSDIGLLHSLGIRLVVVYGARPQIDANLAAHHHEPIYHKNTRVTDAKALELVKQAAGLLQLDITARLSMSLNNTPLQGAHINVVSGNFTIAQPLGVDDGVDYCHSGRIRRIDEDAINRQLDNGAIVLMGPVAVSVTGESFNLTSEEIATQLAVKLKAEKMIGFCSSQGVTNSEGGIISELFPNEAQARVEELEAQGDYNSGTVRFLRGAVKACRSGVRRCHLISYQEDGSLLQELFSRDGIGTQIVMESAEQIRRATINDIGGILELIRPLEQQGILVRRSREQLEMEIDKFTIIQRDNMTIACAALYPFVEEKIGEMACVAVHPDYRSSSRGEVLLERVAAQARQMGLRKLFVLTTRSIHWFQERGFTPVDIELLPESKKKMYNYQRRSKVLMADLG

SEQ ID NO: 17424 - DNA, 1338 bp, Vibrio parahaemolyticus
  CDS (1)..(1338): transl_table=11
gtgaaaattcgtagtaccgctctcgtaaaaggattccgccaatcaaccccttacgtcaacgctcaccgtgggaaaaccatggtgatcatgctgggaggtgaagcggtcgcccataataattttggcaatataatcaatgatattgctttgatgcacagtttaggcatcaaagtcgttgtcgtttatggcgctcgtccacaaatcaatcaattacttgaaaaacaagaccttactacgccataccacaaaaacatccgaattaccgacgaagcggcactatcggtagttatgcaagctgctgggcagcttcaactagccattaccgcacgcctttcaatgagcttaaacaacaccccaatggctggcacacaactgaatgttgtcagtggtaactttgtcattgcacagccacttggcgtagatgacggtgtcgattactgccacagtggacgcattcgccgcattgacaccgacgcgattaatcgcacgctcgaccaaggctctattgtgctacttggccccattgcgagctccgtgactggtgagtgttttaacttactttctgaagaagtcgcgacgcaactggcgatcaaattaggcgcagacaaactgattggtttctgctcagaacaaggcgtgattgacgacaatggcaatgccgtcgcagagttgctgcctatcgaggcagagcacgttatcaaaacgctttcagaaaaccacgcttcagattccgattacaacacgggcactttgcgtttcctcaaaggttccatcgccgcttgtcgcgctggcgtcccacgtagccatctcatcagctacaaagtagatggggctttgattcaggagttgttctcgtttgacggtatcggaactcaagtcgtcatggcgagcgcagagcaagttcgtcaagctggtattgatgacatcggcggtattttggaattgattcatccattagaagaacaaggcattttggtcaggcgttcgagagaacagcttgagcaagagattggtaaattcaccatcattgaaaaagatggcttaatcatcggatgcgcggctttatacccatattctgaagaacgaaaagctgaaatggcctgtgttgccattcacccagactatcgggatggcaaccgaggtttgttgctgctgaattacatgaagcatcgttcaaaatcagaaaacatcaaccagatttttgtccttacaacccacagtctgcattggtttagagagcaaggattctacgaagttggagtcgattacttgccaggagccaaacaagggttgtacaactttcagcgtaagtccaaaatcttagcgttagacttataa

SEQ ID NO: 17425 - protein, 445 aa, Vibrio parahaemolyticus
MKIRSTALVKGFRQSTPYVNAHRGKTMVIMLGGEAVAHNNFGNIINDIALMHSLGIKVVVVYGARPQINQLLEKQDLTTPYHKNIRITDEAALSVVMQAAGQLQLAITARLSMSLNNTPMAGTQLNVVSGNFVIAQPLGVDDGVDYCHSGRIRRIDTDAINRTLDQGSIVLLGPIASSVTGECFNLLSEEVATQLAIKLGADKLIGFCSEQGVIDDNGNAVAELLPIEAEHVIKTLSENHASDSDYNTGTLRFLKGSIAACRAGVPRSHLISYKVDGALIQELFSFDGIGTQVVMASAEQVRQAGIDDIGGILELIHPLEEQGILVRRSREQLEQEIGKFTIIEKDGLIIGCAALYPYSEERKAEMACVAIHPDYRDGNRGLLLLNYMKHRSKSENINQIFVLTTHSLHWFREQGFYEVGVDYLPGAKQGLYNFQRKSKILALDL

SEQ ID NO: 17426 - DNA, 1731 bp, Oryza sativa; identical to SEQ ID NO: 16241
  CDS (1)..(1731)

SEQ ID NO: 17427 - protein, 576 aa, Oryza sativa; identical to SEQ ID NO: 16242

SEQ ID NO: 17428 - DNA, 1776 bp, Oryza sativa; identical to SEQ ID NO: 16243
  CDS (1)..(1776)

SEQ ID NO: 17429 - protein, 591 aa, Oryza sativa; identical to SEQ ID NO: 16244

SEQ ID NO: 17430 - DNA, 1809 bp, Glycine max; identical to SEQ ID NO: 16155
  CDS (1)..(1809)

SEQ ID NO: 17431 - protein, 602 aa, Glycine max; identical to SEQ ID NO: 16156

SEQ ID NO: 17432 - DNA, 1824 bp, Glycine max; identical to SEQ ID NO: 16245
  CDS (1)..(1824)

SEQ ID NO: 17433 - protein, 607 aa, Glycine max; identical to SEQ ID NO: 16246

SEQ ID NO: 17434 - DNA, 1773 bp, Brassica napus; identical to SEQ ID NO: 16247
  CDS (1)..(1773)

SEQ ID NO: 17435 - protein, 590 aa, Brassica napus; identical to SEQ ID NO: 16248

SEQ ID NO: 17436 - DNA, 1794 bp, Zea mays; identical to SEQ ID NO: 16249
  CDS (1)..(1794)

SEQ ID NO: 17437 - protein, 597 aa, Zea mays; identical to SEQ ID NO: 16250

SEQ ID NO: 17438 - DNA, 20 bp, Artificial sequence
  primer
atggcaaattgcagaactcc

SEQ ID NO: 17439 - DNA, 20 bp, Artificial sequence
  primer
tcaagaatcatactgaaatg

SEQ ID NO: 17440 - protein, 588 aa, Artificial sequence
  consensus sequence
  Variant (2)..(4): Xaa in position 2 to 4 is any amino acid
  Variant (6)..(8): Xaa in position 6 to 8 is any amino acid
  Variant (11)..(13): Xaa in position 11 to 13 is any amino acid
  Variant (16)..(17): Xaa in position 16 to 17 is any amino acid
  Variant (21)..(24): Xaa in position 21 to 24 is any amino acid
  Variant (26)..(38): Xaa in position 26 to 38 is any amino acid
  Variant (39)..(66): Xaa in position 39 to 66 is any or no amino acid
  Variant (68)..(70): Xaa in position 68 to 70 is any amino acid
  Variant (73)..(73): Xaa in position 73 is any amino acid
  Variant (76)..(78): Xaa in position 76 to 78 is any amino acid
  Variant (82)..(82): Xaa in position 82 is any amino acid
  Variant (84)..(86): Xaa in position 84 to 86 is any amino acid
  Variant (89)..(91): Xaa in position 89 to 91 is any amino acid
  Variant (93)..(99): Xaa in position 93 to 99 is any amino acid
  Variant (100)..(100): Xaa in position 100 is any or no amino acid
  Variant (102)..(105): Xaa in position 102 to 105 is any amino acid
  Variant (107)..(107): Xaa in position 107 is any amino acid
  Variant (110)..(112): Xaa in position 110 to 112 is any amino acid
  Variant (114)..(118): Xaa in position 114 to 118 is any amino acid
  Variant (120)..(120): Xaa in position 120 is any amino acid
  Variant (122)..(126): Xaa in position 122 to 126 is any amino acid
  Variant (130)..(130): Xaa in position 130 is any amino acid
  Variant (133)..(142): Xaa in position 133 to 142 is any amino acid
  Variant (143)..(162): Xaa in position 143 to 162 is any or no amino acid
  Variant (164)..(165): Xaa in position 164 to 165 is any amino acid
  Variant (168)..(170): Xaa in position 168 to 170 is any amino acid
  Variant (172)..(174): Xaa in position 172 to 174 is any amino acid
  Variant (177)..(178): Xaa in position 177 to 178 is any amino acid
  Variant (180)..(180): Xaa in position 180 is any amino acid
  Variant (182)..(184): Xaa in position 182 to 184 is any amino acid
  Variant (187)..(187): Xaa in position 187 is any amino acid
  Variant (189)..(191): Xaa in position 189 to 191 is any amino acid
  Variant (193)..(195): Xaa in position 193 to 195 is any amino acid
  Variant (197)..(199): Xaa in position 197 to 199 is any amino acid
  Variant (202)..(205): Xaa in position 202 to 205 is any amino acid
  Variant (207)..(211): Xaa in position 207 to 211 is any amino acid
  Variant (213)..(213): Xaa in position 213 is any amino acid
  Variant (215)..(216): Xaa in position 215 to 216 is any amino acid
  Variant (219)..(220): Xaa in position 219 to 220 is any amino acid
  Variant (222)..(225): Xaa in position 222 to 225 is any amino acid
  Variant (226)..(226): Xaa in position 226 is any or no amino acid
  Variant (230)..(231): Xaa in position 230 to 231 is any amino acid
  Variant (233)..(236): Xaa in position 233 to 236 is any amino acid
  Variant (242)..(249): Xaa in position 242 to 249 is any amino acid
  Variant (250)..(250): Xaa in position 250 is any or no amino acid
  Variant (252)..(252): Xaa in position 252 is any amino acid
  Variant (253)..(253): Xaa in position 253 is any or no amino acid
  Variant (255)..(280): Xaa in position 255 to 280 is any amino acid
  Variant (281)..(361): Xaa in position 281 to 361 is any or no amino acid
  Variant (363)..(364): Xaa in position 363 to 364 is any amino acid
  Variant (366)..(368): Xaa in position 366 to 368 is any amino acid
  Variant (370)..(371): Xaa in position 370 to 371 is any amino acid
  Variant (374)..(374): Xaa in position 374 is any amino acid
  Variant (376)..(376): Xaa in position 376 is any amino acid
  Variant (378)..(384): Xaa in position 378 to 384 is any amino acid
  Variant (386)..(386): Xaa in position 386 is any amino acid
  Variant (389)..(389): Xaa in position 389 is any amino acid
  Variant (393)..(393): Xaa in position 393 is any amino acid
  Variant (397)..(397): Xaa in position 397 is any amino acid
  Variant (400)..(405): Xaa in position 400 to 405 is any amino acid
  Variant (406)..(434): Xaa in position 406 to 434 is any or no amino acid
  Variant (436)..(437): Xaa in position 436 to 437 is any amino acid
  Variant (439)..(439): Xaa in position 439 is any amino acid
  Variant (441)..(443): Xaa in position 441 to 443 is any amino acid
  Variant (445)..(446): Xaa in position 445 to 446 is any amino acid
  Variant (448)..(451): Xaa in position 448 to 451 is any amino acid
  Variant (453)..(453): Xaa in position 453 is any amino acid
  Variant (457)..(458): Xaa in position 457 to 458 is any amino acid
  Variant (460)..(460): Xaa in position 460 is any amino acid
  Variant (463)..(463): Xaa in position 463 is any amino acid
  Variant (465)..(468): Xaa in position 465 to 468 is any amino acid
  Variant (470)..(475): Xaa in position 470 to 475 is any amino acid
  Variant (476)..(477): Xaa in position 476 to 477 is any or no amino acid
  Variant (479)..(479): Xaa in position 479 is any amino acid
  Variant (481)..(481): Xaa in position 481 is any amino acid
  Variant (484)..(484): Xaa in position 484 is any amino acid
  Variant (486)..(486): Xaa in position 486 is any amino acid
  Variant (489)..(489): Xaa in position 489 is any amino acid
  Variant (494)..(494): Xaa in position 494 is any amino acid
  Variant (496)..(501): Xaa in position 496 to 501 is any amino acid
  Variant (502)..(505): Xaa in position 502 to 505 is any or no amino acid
  Variant (508)..(508): Xaa in position 508 is any amino acid
  Variant (510)..(511): Xaa in position 510 to 511 is any amino acid
  Variant (514)..(517): Xaa in position 514 to 517 is any amino acid
  Variant (519)..(522): Xaa in position 519 to 522 is any amino acid
  Variant (524)..(525): Xaa in position 524 to 525 is any amino acid
  Variant (528)..(529): Xaa in position 528 to 529 is any amino acid
  Variant (530)..(543): Xaa in position 530 to 543 is any or no amino acid
  Variant (545)..(548): Xaa in position 545 to 548 is any amino acid
  Variant (550)..(550): Xaa in position 550 is any amino acid
  Variant (555)..(556): Xaa in position 555 to 556 is any amino acid
  Variant (557)..(557): Xaa in position 557 is any or no amino acid
  Variant (560)..(561): Xaa in position 560 to 561 is any amino acid
  Variant (565)..(571): Xaa in position 565 to 571 is any amino acid
  Variant (572)..(572): Xaa in position 572 is any or no amino acid
  Variant (574)..(581): Xaa in position 574 to 581 is any amino acid
  Variant (582)..(585): Xaa in position 582 to 585 is any or no amino acid
  Variant (587)..(587): Xaa in position 587 is any amino acid
VXXXRXXXPYXXXHRXXTFVXXXXGXXXXXXXXXXXXXXXXXXXXXXXXXXXXXXXXXXXXXXXXXDXXXLHXLGXXXVLVXGXXXQIXXXLXXXXXXXXYXXXXRXTDXXXLXXXXXAXGXXXXXIEAXLSXXXXXXXXXXXXXXXXXXXXXXXXXXXXXXVXXGNXXXAXXXGVXXGXDXXXTGXVXXXDXXXIXXXLDXXXXVXXXXXGXSXXGEXXNXXXXXVATXXAXXXXADKLIXXXXXXXXXDXXGXXXXXXXXXXXXXXXXXXXXXXXXXXXXXXXXXXXXXXXXXXXXXXXXXXXXXXXXXXXXXXXXXXXXXXXXXXXXXXXXXXXXXXXXXXXXXXXXXXXXXXXXXXXLXXAXXXCXXGVXRXHXXXXXXXGXLLXELFXRDGXGTXXXXXXXXXXXXXXXXXXXXXXXXXXXXXXXXXXXEXXRXAXXXDXXGXXXXIXPLEXXGXLVXRXXXXLXXXXXXXXFXVXERXGXIIXCAALXPXXXXXXXXXXGEXAXXAVXXXXRXXXXGXXLLXXXXXXXXXXXXXXXXGXXXXFXLTTRXXXWFXXRGFXXXXXXXXPXXXXXXXXXXXXRXS

SEQ ID NO: 17441 - protein, 56 aa, Artificial sequence
  protein pattern
  Variant (3)..(5): Xaa in position 3 to 5 is any amino acid
  Variant (7)..(9): Xaa in position 7 to 9 is any amino acid
  Variant (12)..(13): Xaa in position 12 to 13 is any amino acid
  Variant (15)..(15): Xaa in position 15 is Ile or Val
  Variant (17)..(17): Xaa in position 17 is Phe or Tyr
  Variant (18)..(19): Xaa in position 18 to 19 is any amino acid
  Variant (20)..(20): Xaa in position 20 is Ser or Thr
  Variant (22)..(22): Xaa in position 22 is any amino acid
  Variant (23)..(23): Xaa in position 23 is Ile or Val
  Variant (24)..(25): Xaa in position 24 to 25 is Lys or Arg
  Variant (26)..(26): Xaa in position 26 is Ile or Val
  Variant (28)..(30): Xaa in position 28 to 30 is any amino acid
  Variant (31)..(31): Xaa in position 31 is Ile or Met
  Variant (32)..(34): Xaa in position 32 to 34 is any amino acid
  Variant (37)..(39): Xaa in position 37 to 39 is any amino acid
  Variant (40)..(40): Xaa in position 40 is Ile, Met or Val
  Variant (42)..(42): Xaa in position 42 is Leu or Val
  Variant (43)..(43): Xaa in position 43 is Leu, Met or Val
  Variant (44)..(44): Xaa in position 44 is any amino acid
  Variant (45)..(45): Xaa in position 45 is Asn or Pro
  Variant (46)..(46): Xaa in position 46 is Ile, Leu, Met or Val
  Variant (47)..(47): Xaa in position 47 is Ala or Gly
  Variant (48)..(48): Xaa in position 48 is any amino acid
  Variant (50)..(50): Xaa in position 50 is any amino acid
  Variant (51)..(51): Xaa in position 51 is Ala, Ser or Thr
  Variant (54)..(54): Xaa in position 54 is any amino acid
  Variant (55)..(55): Xaa in position 55 is Phe or Leu
GNXXXAXXXGVXXGXDXXXXGXXXXXDXXXXXXXLDXXXXVXXXXXXXSXXGEXXN

SEQ ID NO: 17442 - protein, 26 aa, Artificial sequence
  protein pattern
  Variant (2)..(3): Xaa in position 2 to 3 is any amino acid
  Variant (4)..(4): Xaa in position 4 is Phe or Leu
  Variant (6)..(6): Xaa in position 6 is any amino acid
  Variant (7)..(7): Xaa in position 7 is Ala or Ser
  Variant (8)..(8): Xaa in position 8 is any amino acid
  Variant (11)..(11): Xaa in position 11 is Ile, Leu or Val
  Variant (12)..(13): Xaa in position 12 to 13 is any amino acid
  Variant (16)..(16): Xaa in position 16 is Asp, Gly, Asn or Ser
  Variant (17)..(18): Xaa in position 17 to 18 is any amino acid
  Variant (19)..(19): Xaa in position 19 is Phe or Met
  Variant (21)..(21): Xaa in position 21 is Ile or Val
  Variant (22)..(22): Xaa in position 22 is any amino acid
  Variant (23)..(23): Xaa in position 23 is Phe, Ile, Leu or Val
  Variant (24)..(24): Xaa in position 24 is Asp, Gly, Pro or Ser
  Variant (25)..(25): Xaa in position 25 is Ala, Gly or Ser
  Variant (26)..(26): Xaa in position 26 is Ala, Asp, Glu or Asn
VXXXRXXXPYXXXHRXXXXVXXXXXX

SEQ ID NO: 17443 - protein, 28 aa, Artificial sequence
  protein pattern
  Variant (2)..(3): Xaa in position 2 to 3 is any amino acid
  Variant (5)..(5): Xaa in position 5 is Ala, Cys, Ser or Val
  Variant (7)..(7): Xaa in position 7 is Ile or Leu
  Variant (8)..(8): Xaa in position 8 is Ile, Leu or Val
  Variant (9)..(9): Xaa in position 9 is Asp or Ser
  Variant (10)..(12): Xaa in position 10 to 12 is any amino acid
  Variant (13)..(13): Xaa in position 13 is Asp, Gly, Asn, Ser or Thr
  Variant (15)..(15): Xaa in position 15 is Ala, Ser or Val
  Variant (18)..(18): Xaa in position 18 is any amino acid
  Variant (22)..(22): Xaa in position 22 is any amino acid
  Variant (24)..(24): Xaa in position 24 is Asp, Gly or Thr
  Variant (26)..(26): Xaa in position 26 is any amino acid
GXXRXHXXXXXXXGXLLXELFXRXGXGT

SEQ ID NO: 17444 - protein, 30 aa, Artificial sequence
  protein pattern
  Variant (2)..(2): Xaa in position 2 is any amino acid
  Variant (3)..(4): Xaa in position 3 to 4 is Ile or Val
  Variant (5)..(5): Xaa in position 5 is any amino acid
  Variant (6)..(6): Xaa in position 6 is His, Lys or Arg
  Variant (7)..(7): Xaa in position 7 is Asp or Glu
  Variant (8)..(8): Xaa in position 8 is Gly or Asn
  Variant (9)..(10): Xaa in position 9 to 10 is any amino acid
  Variant (11)..(11): Xaa in position 11 is Phe, Ile or Leu
  Variant (12)..(12): Xaa in position 12 is Ala or Gly
  Variant (17)..(17): Xaa in position 17 is Phe or Tyr
  Variant (19)..(24): Xaa in position 19 to 24 is any amino acid
  Variant (25)..(25): Xaa in position 25 is any or no amino acid
  Variant (27)..(27): Xaa in position 27 is any amino acid
  Variant (28)..(29): Xaa in position 28 to 29 is any or no amino acid
FXXXXXXXXXXXCAALXPXXXXXXXEXXXA

SEQ ID NO: 17445 - protein, 27 aa, Artificial sequence
  protein pattern
  Variant (2)..(2): Xaa in position 2 is Ile or Leu
  Variant (3)..(3): Xaa in position 3 is Ala, Gly, Ser or Val
  Variant (4)..(4): Xaa in position 4 is Phe or Leu
  Variant (5)..(5): Xaa in position 5 is Leu or Met
  Variant (7)..(8): Xaa in position 7 to 8 is any or no amino acid
  Variant (10)..(10): Xaa in position 10 is Ala, Ile, Leu or Val
  Variant (11)..(11): Xaa in position 11 is any amino acid
  Variant (12)..(12): Xaa in position 12 is Phe, Ile, Leu or Val
  Variant (13)..(13): Xaa in position 13 is Ile or Val
  Variant (14)..(14): Xaa in position 14 is Ile, Leu or Val
  Variant (16)..(16): Xaa in position 16 is any amino acid
  Variant (18)..(18): Xaa in position 18 is Ala, Ser or Thr
  Variant (19)..(20): Xaa in position 19 to 20 is any amino acid
  Variant (23)..(23): Xaa in position 23 is Asp, Glu or Asn
  Variant (24)..(25): Xaa in position 24 to 25 is any amino acid
  Variant (27)..(27): Xaa in position 27 is Ala, Glu, Gln, Ser or Thr
DXXXXHXXGXXXXXVXGXXXQIXXXLX

SEQ ID NO: 17446 - protein, 17 aa, Artificial sequence
  protein pattern
  Variant (2)..(3): Xaa in position 2 to 3 is any or no amino acid
  Variant (8)..(8): Xaa in position 8 is Ala, Ser or Thr
  Variant (9)..(9): Xaa in position 9 is any amino acid
  Variant (10)..(10): Xaa in position 10 is Asp or His
  Variant (13)..(14): Xaa in position 13 to 14 is any amino acid
  Variant (15)..(15): Xaa in position 15 is His or Arg
LXXLTTRXXXWFXXXGF

SEQ ID NO: 17447 - protein, 32 aa, Artificial sequence
  protein pattern
  Variant (2)..(5): Xaa in position 2 to 5 is any or no amino acid
  Variant (7)..(7): Xaa in position 7 is Ile or Val
  Variant (10)..(10): Xaa in position 10 is Ala, Asp, Glu, Ser or Thr
  Variant (11)..(11): Xaa in position 11 is any amino acid
  Variant (12)..(12): Xaa in position 12 is Ala, Ser or Thr
  Variant (14)..(14): Xaa in position 14 is Asp, Glu, Gln or Ser
  Variant (15)..(15): Xaa in position 15 is any amino acid
  Variant (16)..(16): Xaa in position 16 is Ala or Val
  Variant (17)..(17): Xaa in position 17 is any amino acid
  Variant (18)..(18): Xaa in position 18 is Asp, Glu or Gln
  Variant (20)..(20): Xaa in position 20 is Ala or Val
  Variant (22)..(22): Xaa in position 22 is any amino acid
  Variant (23)..(23): Xaa in position 23 is Ile or Leu
  Variant (24)..(24): Xaa in position 24 is Gln, Arg or Ser
  Variant (25)..(25): Xaa in position 25 is Ile, Leu or Val
  Variant (26)..(26): Xaa in position 26 is any amino acid
  Variant (27)..(27): Xaa in position 27 is Ile or Leu
  Variant (28)..(28): Xaa in position 28 is Glu or Thr
  Variant (30)..(30): Xaa in position 30 is Lys or Arg
YXXXXRXTDXXXLXXXXXAXGXXXXXXXAXLS

SEQ ID NO: 17448 - protein, 29 aa, Artificial sequence
  protein pattern
  Variant (2)..(2): Xaa in position 2 is any amino acid
  Variant (3)..(4): Xaa in position 3 to 4 is any or no amino acid
  Variant (6)..(8): Xaa in position 6 to 8 is any amino acid
  Variant (10)..(10): Xaa in position 10 is Ile, Leu or Val
  Variant (11)..(11): Xaa in position 11 is any amino acid
  Variant (13)..(13): Xaa in position 13 is Ile or Leu
  Variant (14)..(15): Xaa in position 14 to 15 is any amino acid
  Variant (16)..(16): Xaa in position 16 is Ile or Leu
  Variant (18)..(18): Xaa in position 18 is any amino acid
  Variant (22)..(22): Xaa in position 22 is Ala, Glu or Gln
  Variant (23)..(23): Xaa in position 23 is Ala, Asp, Gln, Ser or Thr
  Variant (25)..(25): Xaa in position 25 is any amino acid
  Variant (28)..(28): Xaa in position 28 is any amino acid
RXXXAXXXDXXGXXXXIXPLEXXGXLVXR

SEQ ID NO: 17449 - protein, 16 aa, Artificial sequence
  protein pattern
  Variant (3)..(4): Xaa in position 3 to 4 is any amino acid
  Variant (6)..(6): Xaa in position 6 is Ile, Leu or Val
  Variant (7)..(7): Xaa in position 7 is any amino acid
  Variant (8)..(8): Xaa in position 8 is Ile or Leu
  Variant (9)..(9): Xaa in position 9 is any amino acid
  Variant (11)..(11): Xaa in position 11 is Asp or Glu
  Variant (13)..(13): Xaa in position 13 is Leu or Met
  Variant (14)..(14): Xaa in position 14 is Ile or Leu
  Variant (15)..(15): Xaa in position 15 is any amino acid
  Variant (16)..(16): Xaa in position 16 is Phe, Ile, Leu or Val
ATXXAXXXXAXKXXXX

SEQ ID NO: 17450 - protein, 19 aa, Artificial sequence
  protein pattern
  Variant (2)..(2): Xaa in position 2 is any amino acid
  Variant (3)..(3): Xaa in position 3 is Glu, Pro or Ser
  Variant (4)..(4): Xaa in position 4 is Asp or Glu
  Variant (5)..(5): Xaa in position 5 is any amino acid
  Variant (6)..(6): Xaa in position 6 is Gln or Arg
  Variant (7)..(10): Xaa in position 7 to 10 is any amino acid
  Variant (12)..(12): Xaa in position 12 is Asp or Glu
  Variant (13)..(13): Xaa in position 13 is any amino acid
  Variant (16)..(18): Xaa in position 16 to 18 is any amino acid
  Variant (19)..(19): Xaa in position 19 is Ala, Asp, Glu or Gln
VXXXXXXXXXGXXLLXXXX

SEQ ID NO: 17451 - DNA, 1329 bp, Arabidopsis thaliana; identical to SEQ ID NO: 5336
  CDS (1)..(1329)

SEQ ID NO: 17452 - protein, 442 aa, Arabidopsis thaliana; identical to SEQ ID NO: 5337

SEQ ID NO: 17453 - DNA, 1404 bp, Oryza sativa (japonica cultivar-group); identical to SEQ ID NO: 5322
  CDS (1)..(1404)

SEQ ID NO: 17454 - protein, 467 aa, Oryza sativa (japonica cultivar-group); identical to SEQ ID NO: 5323

SEQ ID NO: 17455 - DNA, 1212 bp, Oryza sativa (japonica cultivar-group); identical to SEQ ID NO: 5324
  CDS (1)..(1212)

SEQ ID NO: 17456 - protein, 403 aa, Oryza sativa (japonica cultivar-group); identical to SEQ ID NO: 5325

SEQ ID NO: 17457 - DNA, 1245 bp, Oryza sativa (japonica cultivar-group); identical to SEQ ID NO: 5326
  CDS (1)..(1245)

SEQ ID NO: 17458 - protein, 414 aa, Oryza sativa (japonica cultivar-group); identical to SEQ ID NO: 5327

SEQ ID NO: 17459 - DNA, 1215 bp, Oryza sativa (japonica cultivar-group); identical to SEQ ID NO: 826
  CDS (1)..(1215)

SEQ ID NO: 17460 - protein, 404 aa, Oryza sativa (japonica cultivar-group); identical to SEQ ID NO: 827

SEQ ID NO: 17461 - DNA, 1146 bp, Oryza sativa (japonica cultivar-group); identical to SEQ ID NO: 832
  CDS (1)..(1146)

SEQ ID NO: 17462 - protein, 381 aa, Oryza sativa (japonica cultivar-group); identical to SEQ ID NO: 833

SEQ ID NO: 17463 - DNA, 1338 bp, Oryza sativa (japonica cultivar-group); identical to SEQ ID NO: 5334
  CDS (1)..(1338)

SEQ ID NO: 17464 - protein, 445 aa, Oryza sativa (japonica cultivar-group); identical to SEQ ID NO: 5335

SEQ ID NO: 17465 - DNA, 1536 bp, Arabidopsis thaliana; identical to SEQ ID NO: 5338
  CDS (1)..(1536)

SEQ ID NO: 17466 - protein, 511 aa, Arabidopsis thaliana; identical to SEQ ID NO: 5339

SEQ ID NO: 17467 - DNA, 1116 bp, Arabidopsis thaliana; identical to SEQ ID NO: 1330
  CDS (1)..(1116)

SEQ ID NO: 17468 - protein, 371 aa, Arabidopsis thaliana; identical to SEQ ID NO: 1331

SEQ ID NO: 17469 - DNA, 1338 bp, Arabidopsis thaliana; identical to SEQ ID NO: 5340
  CDS (1)..(1338)

SEQ ID NO: 17470 - protein, 445 aa, Arabidopsis thaliana; identical to SEQ ID NO: 5341

SEQ ID NO: 17471 - DNA, 1536 bp, Arabidopsis thaliana; identical to SEQ ID NO: 5342
  CDS (1)..(1536)

SEQ ID NO: 17472 - protein, 511 aa, Arabidopsis thaliana; identical to SEQ ID NO: 5343

SEQ ID NO: 17473 - DNA, 1089 bp, Arabidopsis thaliana; identical to SEQ ID NO: 5344
  CDS (1)..(1089)

SEQ ID NO: 17474 - protein, 362 aa, Arabidopsis thaliana; identical to SEQ ID NO: 5345

SEQ ID NO: 17475 - DNA, 1191 bp, Arabidopsis thaliana; identical to SEQ ID NO: 1334
  CDS (1)..(1191)

SEQ ID NO: 17476 - protein, 396 aa, Arabidopsis thaliana; identical to SEQ ID NO: 1335

SEQ ID NO: 17477 - DNA, 1251 bp, Arabidopsis thaliana; identical to SEQ ID NO: 866
  CDS (1)..(1251)

SEQ ID NO: 17478 - protein, 416 aa, Arabidopsis thaliana; identical to SEQ ID NO: 867

SEQ ID NO: 17479 - DNA, 1242 bp, Arabidopsis thaliana; identical to SEQ ID NO: 5350
  CDS (1)..(1242)

SEQ ID NO: 17480 - protein, 413 aa, Arabidopsis thaliana; identical to SEQ ID NO: 5351

SEQ ID NO: 17481 - DNA, 1251 bp, Nicotiana tabacum; identical to SEQ ID NO: 5352
  CDS (1)..(1251)

SEQ ID NO: 17482 - protein, 416 aa, Nicotiana tabacum; identical to SEQ ID NO: 5353

SEQ ID NO: 17483 - DNA, 1221 bp, Oryza sativa subsp; identical to SEQ ID NO: 882
  CDS (1)..(1221)

SEQ ID NO: 17484 - protein, 406 aa, Oryza sativa subsp; identical to SEQ ID NO: 883

SEQ ID NO: 17485 - DNA, 1335 bp, Oryza sativa subsp; identical to SEQ ID NO: 5358
  CDS (1)..(1335)

SEQ ID NO: 17486 - protein, 444 aa, Oryza sativa subsp; identical to SEQ ID NO: 5359

SEQ ID NO: 17487 - DNA, 1251 bp, Oryza sativa subsp; identical to SEQ ID NO: 5360
  CDS (1)..(1251)

SEQ ID NO: 17488 - protein, 416 aa, Oryza sativa subsp; identical to SEQ ID NO: 5361

SEQ ID NO: 17489 - DNA, 1167 bp, Oryza sativa subsp; identical to SEQ ID NO: 5362
  CDS (1)..(1167)

SEQ ID NO: 17490 - protein, 388 aa, Oryza sativa subsp; identical to SEQ ID NO: 5363

SEQ ID NO: 17491 - DNA, 1194 bp, Oryza sativa subsp; identical to SEQ ID NO: 888
  CDS (1)..(1194)

SEQ ID NO: 17492 - protein, 397 aa, Oryza sativa subsp; identical to SEQ ID NO: 889

SEQ ID NO: 17493 - DNA, 1347 bp, Oryza sativa subsp
  CDS (1)..(1347)
atggaggacctcgccctgcccgccgctcctcctgcccccacgcttagcttcacgctcttagccgccgccgccgccgtcgccgaggccatggaagaggctctgggcgccgcgctgccgcccctcaccgcccccgcccccgcccccggagacgactccgcctgcgggagcccgtgctccgtcgccagcgactgcagcagcgtcgccagcgccgacttcgagggcttcgccgagctaggcacttcgctcctcgcggggcccgccgtcttgttcgacgacctcaccgccgccgccgccgcctccgtcgccgtcgcggaggctgccgagccgagggctgtggggcccactgcgaggagcgtgttcgccatggactgcgttccgctctgggggctggaatccatttgcggccgccgcccggagatggaggacgactatgccgtggtcccgcgatttttcgaccttcctctgtggatggttgccggcgacgcggcagtcgacggcctcgaccgggcctccttccgccttccagcccatttcttcgccgtctacgatggccacggtggcgttcaggttgccaattactgcaggaagaggatccacgccgtactgacagaggagctgcgtagagcggaggacgacgcgtgtggctctgacttatctggccttgagtccaagaagctttgggagaaggcgttcgtggattgcttcagtcgtgttgacgctgaggtgggaggaaatgctgcgtctggagcaccgcctgttgctccagacaccgtggggtcaactgctgtcgtcgcagtcgtttgctcgtcacatgtcatcgtagccaactgcggtgactcgcgtgctgttctctgccggggcaagcagcccctgcccctgtcactagatcataaaccaaatagggaagacgagtacgcgaggattgaggcgctgggtggcaaggttatccaatggaatggttatcgagttctcggtgttcttgccatgtcgcgatcaatcggggacaaatacctgaagccatatataatcccggtccctgaggtcacagttgtcgctcgtgcaaaagacgatgattgccttattcttgcaagtgatggcctttgggatgtaatgtcgaacgaagaggtctgtgatgctgctcgcaagaggatattactatggcacaagaagaatgcggccaccgcatcaacgtcatcggcccaaataagcggtgattcttcagatccggctgctcaagcagctgccgactacttgtccaagcttgccctacagaaggggagcaaggacaacatcactgtcgttgtaattgacctcaaggcacataggaagttcaagagcaaagcatga

SEQ ID NO: 17494 - protein, 448 aa, Oryza sativa subsp
MEDLALPAAPPAPTLSFTLLAAAAAVAEAMEEALGAALPPLTAPAPAPGDDSACGSPCSVASDCSSVASADFEGFAELGTSLLAGPAVLFDDLTAAAAASVAVAEAAEPRAVGPTARSVFAMDCVPLWGLESICGRRPEMEDDYAVVPRFFDLPLWMVAGDAAVDGLDRASFRLPAHFFAVYDGHGGVQVANYCRKRIHAVLTEELRRAEDDACGSDLSGLESKKLWEKAFVDCFSRVDAEVGGNAASGAPPVAPDTVGSTAVVAVVCSSHVIVANCGDSRAVLCRGKQPLPLSLDHKPNREDEYARIEALGGKVIQWNGYRVLGVLAMSRSIGDKYLKPYIIPVPEVTVVARAKDDDCLILASDGLWDVMSNEEVCDAARKRILLWHKKNAATASTSSAQISGDSSDPAAQAAADYLSKLALQKGSKDNITVVVIDLKAHRKFKSKA

SEQ ID NO: 17495 - DNA, 1218 bp, Oryza sativa subsp; identical to SEQ ID NO: 5368
  CDS (1)..(1218)

SEQ ID NO: 17496 - protein, 405 aa, Oryza sativa subsp; identical to SEQ ID NO: 5369

SEQ ID NO: 17497 - DNA, 1134 bp, Oryza sativa subsp; identical to SEQ ID NO: 5370
  CDS (1)..(1134)

SEQ ID NO: 17498 - protein, 377 aa, Oryza sativa subsp; identical to SEQ ID NO: 5371

SEQ ID NO: 17499 - DNA, 1617 bp, Populus tremula; identical to SEQ ID NO: 5374
  CDS (1)..(1617)

SEQ ID NO: 17500 - protein, 538 aa, Populus tremula; identical to SEQ ID NO: 5375

SEQ ID NO: 17501 - DNA, 1617 bp, Populus tremula
  CDS (1)..(1617)
atggaggagatgtatccggcggttgcagtgccatttagagtaggtaattcagcctgtgaaagtccatccatagatacccaaatggatatcacaagaattttaatggcagacacggctagcttattatctgatactgtaactaaggttcctactgctggggataaggattgtaattgtgcggctccggcttcaaaagaggacaggggaggaagaggagcccctttgttggatatgatctctgaaactgaaagaaattgggttgttggcgatgatgggataacacgggaaagtgaggaagaggattctttgtcgttggagggtgatccaattcttgatagttcttgttctctttcaatggctagtgagacaagtagcttatgtggagaggatctcttgagtttggagaccacctctgaggtaggaacactgagttctgtagaaattaaaaagagcattggtggtgttgatattgttgccaagacagcagatttgggggattcaaacgttgacactgttgtgagcgatcccccttcggtggcaggaagtgttgaggaagaggctggggatggatctgatgcaaagacatcttctgtggttcttcagttgactctggaaagagggaccagtggaacagtctcaagaagtgtttttgaagtggactatgtacccctttggggatttacatctgtttgtggaaggagaccggagatggaagatgcagttgctactgtgccttatttattaaaatttcctattcaaatgctgattggcgaccgattacttgatggaatgagcaagtatttgcctcaccagactgctcatttctttggagtttatgatggtcatggaggctcgcaagtggcaaattattgtcatgatcgtatccattcggctttgtccgaggagatagaatttgttaagaatggcctgagtgatggaagtattaaggatagttgccaggagcagtggaaaaaggctttcaccaattgttttctcaaggttgatgctgaagtcggaggaaaggctggtgccgaaccagttgccccagaaactgttggttctactgctgttgtggccattatttgttcatcccacatcatagtagcaaactgtggagactcacgagcagttctttgtcgcgggaaagaaccaatggcattatcagtggatcataaaccaaaccgagaagatgagtatgcaaggatagaagcagctggaggcaaggtcatacagtggaatgggcatcgtgtctttggtgttctagcaatgtcaaggtctattggtgatagatatttgaaaccatggattattccagaacccgaagttatgtttattcctagggcaagagaagatgaatgcctcattctggcaagtgatggtttgtgggatgtcatgtcaaatgaagaagcatgtgatctggcacgcaaacgaatacttgtctggcacaaaaagaatggcgttgcgctctcgtcctcaaggagcgagggaattgatcctgcagctcaagcagcagctgagttcctctcaaaccgtgcccttcaaaaaggaagcaaggataacatcactgtaatcgtggtggatctgaaagcgcaaaggaagttcaaaaccaaaacatga

SEQ ID NO: 17502 - protein, 538 aa, Populus tremula
MEEMYPAVAVPFRVGNSACESPSIDTQMDITRILMADTASLLSDTVTKVPTAGDKDCNCAAPASKEDRGGRGAPLLDMISETERNWVVGDDGITRESEEEDSLSLEGDPILDSSCSLSMASETSSLCGEDLLSLETTSEVGTLSSVEIKKSIGGVDIVAKTADLGDSNVDTVVSDPPSVAGSVEEEAGDGSDAKTSSVVLQLTLERGTSGTVSRSVFEVDYVPLWGFTSVCGRRPEMEDAVATVPYLLKFPIQMLIGDRLLDGMSKYLPHQTAHFFGVYDGHGGSQVANYCHDRIHSALSEEIEFVKNGLSDGSIKDSCQEQWKKAFTNCFLKVDAEVGGKAGAEPVAPETVGSTAVVAIICSSHIIVANCGDSRAVLCRGKEPMALSVDHKPNREDEYARIEAAGGKVIQWNGHRVFGVLAMSRSIGDRYLKPWIIPEPEVMFIPRAREDECLILASDGLWDVMSNEEACDLARKRILVWHKKNGVALSSSRSEGIDPAAQAAAEFLSNRALQKGSKDNITVIVVDLKAQRKFKTKT

SEQ ID NO: 17503 - DNA, 1536 bp, Arabidopsis thaliana; identical to SEQ ID NO: 5382
  CDS (1)..(1536)

SEQ ID NO: 17504 - protein, 511 aa, Arabidopsis thaliana; identical to SEQ ID NO: 5383

SEQ ID NO: 17505 - DNA, 1613 bp, Mesembryanthemum crystallinum; identical to SEQ ID NO: 5384
  CDS (59)..(1201)

SEQ ID NO: 17506 - protein, 380 aa, Mesembryanthemum crystallinum; identical to SEQ ID NO: 5385

SEQ ID NO: 17507 - DNA, 1047 bp, Musa balbisiana; identical to SEQ ID NO: 5386
  CDS (1)..(1047)

SEQ ID NO: 17508 - protein, 348 aa, Musa balbisiana; identical to SEQ ID NO: 5387

SEQ ID NO: 17509 - DNA, 1251 bp, Oryza sativa subsp; identical to SEQ ID NO: 5388
  CDS (1)..(1251)

SEQ ID NO: 17510 - protein, 416 aa, Oryza sativa subsp; identical to SEQ ID NO: 5389

SEQ ID NO: 17511 - DNA, 1071 bp, Oryza sativa subsp; identical to SEQ ID NO: 938
  CDS (1)..(1071)

SEQ ID NO: 17512 - protein, 356 aa, Oryza sativa subsp; identical to SEQ ID NO: 939

SEQ ID NO: 17513 - DNA, 1164 bp, Oryza sativa subsp; identical to SEQ ID NO: 5392
  CDS (1)..(1164)

SEQ ID NO: 17514 - protein, 387 aa, Oryza sativa subsp; identical to SEQ ID NO: 5393

SEQ ID NO: 17515 - DNA, 1745 bp, Prunus avium; identical to SEQ ID NO: 5394
  CDS (122)..(1402)

SEQ ID NO: 17516 - protein, 426 aa, Prunus avium; identical to SEQ ID NO: 941

SEQ ID NO: 17517 - DNA, 1455 bp, Oryza sativa subsp; identical to SEQ ID NO: 5396
  CDS (1)..(1455)

SEQ ID NO: 17518 - protein, 484 aa, Oryza sativa subsp; identical to SEQ ID NO: 5397

SEQ ID NO: 17519 - DNA, 1329 bp, Arabidopsis thaliana; identical to SEQ ID NO: 5400
  CDS (1)..(1329)

SEQ ID NO: 17520 - protein, 442 aa, Arabidopsis thaliana; identical to SEQ ID NO: 5401

SEQ ID NO: 17521 - DNA, 1337 bp, Nicotiana tabacum; identical to SEQ ID NO: 5402
  CDS (2)..(1252)

SEQ ID NO: 17522 - protein, 416 aa, Nicotiana tabacum; identical to SEQ ID NO: 5403

SEQ ID NO: 17523 - DNA, 1649 bp, Arabidopsis thaliana
  CDS (124)..(1365)
aaaagcttccatggctaatcttgtttaagcttctcttcttcttctctctcctgtgtctcgttcactagttttttttcgggggagagtgatggagtgtgtttgttgaatagttttgacgatcacatggctgagatttgttacgagaacgagactatgatgattgaaacgacggcgacggtggtgaagaaggcaacgacgacaacgaggagacgagaacggagctcgtctcaagcagcgagaagaaggagaatggagatccggaggtttaagtttgtttccggcgaacaagaacctgtcttcgtcgacggtgacttacagaggcggaggagaagagaatccaccgtcgcagcctccacctccaccgtgttttacgaaacggcgaaggaagttgtcgtcctatgcgagtctcttagttcaacggttgtggcattccctgatcctgaagcttatcctaaatacggcgtcgcttcagtctgtggaagaagacgtgaaatggaagacgccgtcgctgtgcatccgtttttttcccgtcatcagacggaatattcatccaccggatttcactattgcggcgtttacgatggccatggctgttcccatgtagcgatgaaatgtagagaaagactacacgagctagtccgtgaagagtttgaagctgatgctgactgggaaaagtcaatggcgcgtagcttcacgcgcatggacatggaggttgttgcgttgaacgccgatggtgcggcaaaatgccggtgcgagcttcagaggccggactgcgacgcggtgggatccactgcggttgtgtctgtccttacgccggagaaaatcatcgtggcgaattgcggtgactcacgtgccgttctctgtcgtaacggcaaagccattgctttatcctccgatcataagccagaccgtccggacgagctagaccggattcaagcagcgggtggtcgtgttatctactgggatggcccacgtgtccttggagtacttgcaatgtcacgagccattggagataattacttgaagccgtatgtaatcagcagaccggaggtaaccgtgacggaccgggccaacggagacgattttcttattctcgcaagtgacggtctttgggacgttgtttcaaacgaaactgcatgtagcgtcgttcgaatgtgtttgagaggaaaagtcaatggtcaagtatcatcatcaccggaaagggaaatgacaggtgtcggcgccgggaatgtggtggttggaggaggagatttgccagataaagcgtgtgaggaggcgtcgctgttgctgacgaggcttgcgttggctagacaaagttcggacaacgtaagtgttgtggtggttgatctacgacgagacacgtagttgtatttgtctctctcgtaatgtttgttgttttttgtcctgagtcatcgacttttgggctttttcttttaaccttttttgctcttcggtgtaagacaacgaagggtttttaatttagcttgactatgggttatgtcagtcactgtgttgaatcgcggtttagatctacaaagattttcaccagtagtgaaaatggtaaaaagccgtgaaatgtgaaagacttgagttcaatttaattttaaatttaatagaatcagttgatcataaaaaaaaataaaaaaaag

SEQ ID NO: 17524 - protein, 413 aa, Arabidopsis thaliana; identical to SEQ ID NO: 5405

SEQ ID NO: 17525 - DNA, 1385 bp, Fagus sylvatica; identical to SEQ ID NO: 5410
  CDS (106)..(1347)

SEQ ID NO: 17526 - protein, 413 aa, Fagus sylvatica; identical to SEQ ID NO: 5411

SEQ ID NO: 17527 - DNA, 1318 bp, Lotus japonicus; identical to SEQ ID NO: 5412
  CDS (108)..(1196)

SEQ ID NO: 17528 - protein, 362 aa, Lotus japonicus; identical to SEQ ID NO: 5413

SEQ ID NO: 17529 - DNA, 1305 bp, Arabidopsis thaliana; identical to SEQ ID NO: 958
  CDS (1)..(1305)

SEQ ID NO: 17530 - protein, 434 aa, Arabidopsis thaliana; identical to SEQ ID NO: 959

SEQ ID NO: 17531 - DNA, 1272 bp, Arabidopsis thaliana; identical to SEQ ID NO: 5318
  CDS (1)..(1272)

SEQ ID NO: 17532 - protein, 423 aa, Arabidopsis thaliana; identical to SEQ ID NO: 5319

SEQ ID NO: 17533 - DNA, 1200 bp, Arabidopsis thaliana; identical to SEQ ID NO: 964
  CDS (1)..(1200)

SEQ ID NO: 17534 - protein, 399 aa, Arabidopsis thaliana; identical to SEQ ID NO: 965

SEQ ID NO: 17535 - DNA, 1077 bp, Oryza sativa
  CDS (1)..(1077)
atgtcgatggcggaggtgtgctgtgattctgcggtggtggtcggggcggaggcggaggcgagggcgagggcgcgcgccgggaggcggcggcgggcgggagttgagggggcagggaggtggaacgccacggcgacggctgcgggtgtggcggcggaggaggccgcgacgaggaagcggagggcgagtggtggtgaggccgggttggtggtggtggcgaagcggcacggggcggcgtcggtcgccgggaggaggagggagatggaggacgccgtgtcgctgcgcgaggcgttcgccgcgccggcgaacggggaggttgcggcggcgaggtgtgacttctacggggtgttcgacgggcacggctgctcgcacgtggcggacgcgtgcagggagcggatgcacgagctcgtcgcggaggagatgggcgccgggtcaccggcggcggcggcgcgcgagccggcgtcttggacggagacgatggagcggagcttcgcgaggatggacgccgaggtgatcgccggctgccgagccgagagcggcagctgccggtgcgaggggcagaagtgcgaccacgtggggtccaccgcggtggtggccgtcgtggaggagagccgcgtcgtcgtcgccaactgcggcgactcccgcgccgtgctctgccgcggcggcgcgcccgtgcagctatcctccgaccacaagcccgaccgccccgacgagctggagcggatcgaggcggccggcggccgcgtcatcttctgggagggcgcccgtgtcctcggcgtcctcgccatgtcgcgctccatcggcgacgcctacctgaagccctacgtcaccgccgtgccggaggtgacggtgaccggcaggtcggacttcgacgagtgcctcatcctcgccagcgacggcctctgggacgtcgtcagcaacgaggccgcgtgcgaggtggcgcagtcgtgcctccgccgcggcaggcagcggtggtgcgccgaggcggcggcggtgctgaccaagctggccctcgctcgccgcagctccgacaacatctctgtcgtcgtcgtcgatctccggcgaggcaacgccttgtag

SEQ ID NO: 17536 - protein, 358 aa, Oryza sativa
MSMAEVCCDSAVVVGAEAEARARARAGRRRRAGVEGAGRWNATATAAGVAAEEAATRKRRASGGEAGLVVVAKRHGAASVAGRRREMEDAVSLREAFAAPANGEVAAARCDFYGVFDGHGCSHVADACRERMHELVAEEMGAGSPAAAAREPASWTETMERSFARMDAEVIAGCRAESGSCRCEGQKCDHVGSTAVVAVVEESRVVVANCGDSRAVLCRGGAPVQLSSDHKPDRPDELERIEAAGGRVIFWEGARVLGVLAMSRSIGDAYLKPYVTAVPEVTVTGRSDFDECLILASDGLWDVVSNEAACEVAQSCLRRGRQRWCAEAAAVLTKLALARRSSDNISVVVVDLRRGNAL

SEQ ID NO: 17537 - DNA, 1269 bp, Brassica napus; identical to SEQ ID NO: 972
  CDS (1)..(1269)

SEQ ID NO: 17538 - protein, 422 aa, Brassica napus; identical to SEQ ID NO: 973

SEQ ID NO: 17539 - DNA, 1125 bp, Brassica napus
  CDS (1)..(1125)
atgttgcgagcattagtacggcctctcgagcggtggtgtccaggaaccagagcgaacggcgatgctttactctggcaatcggagctgagaccgcacgccggcggagagtattcgatcgcggtggttcaagccaattcgagactagaggatcagagtcaggtcttcacatcctcctccgccacttacgtcggagtctacgacggacacggtggacccgaagcttctagattcgttaacagacatctcttcccttacatccacaagttcgctaaggaagaaggaggaatatctccagatgtgattaaaagagcgtttaaagaaactgaggaggacttttgtcatatggttcaacggtccttaccgttgaagcctcagatggctactgtgggaacttgctgtctctttggcgctatctctaacggcacgctttatgttgcgaatcttggagactcgagggctgttcttgggagagttgtttcaggggttgctgtagctgaacggttgtccactgatcataacgttgctgttgaagaagtgaggaaggaggttaaggcgcttaaccctgatgattcgcagattgttatgtatattcgtggagtttggaggattaaaggcattattcaggtatcgagatcaattggggatgtatacttgaagaaacctgagttttacagagatccggttttccagcaacatggaaatcctattcctttgaggagacctgcgatgacagccgaaccctctattatagtaaggaagcttaagccacaagacttgtttctgatatttgcatcagatggtctctgggaacatcttagtgatgaagcagccgttgagattgtactcaaacacccaagagctgggatcgcacgaagacttgtaagagccgctcttgaggaagctgcaaagaagagagaaatgagatatggagatatgaagacaatcgccagaggggttcgaagacatttccatgacgacgtaagcgtcgttgttgtttatctcgatcaacacaaaccgaagaatggtaaactgatccagcaaggaggcatcacagctccaccggatatctactcactacgctcagatgaagcgaagcaacggcagctactcaatgtgttatactga

SEQ ID NO: 17540 - protein, 374 aa, Brassica napus
MLRALVRPLERWCPGTRANGDALLWQSELRPHAGGEYSIAVVQANSRLEDQSQVFTSSSATYVGVYDGHGGPEASRFVNRHLFPYIHKFAKEEGGISPDVIKRAFKETEEDFCHMVQRSLPLKPQMATVGTCCLFGAISNGTLYVANLGDSRAVLGRVVSGVAVAERLSTDHNVAVEEVRKEVKALNPDDSQIVMYIRGVWRIKGIIQVSRSIGDVYLKKPEFYRDPVFQQHGNPIPLRRPAMTAEPSIIVRKLKPQDLFLIFASDGLWEHLSDEAAVEIVLKHPRAGIARRLVRAALEEAAKKREMRYGDMKTIARGVRRHFHDDVSVVVVYLDQHKPKNGKLIQQGGITAPPDIYSLRSDEAKQRQLLNVLY

SEQ ID NO: 17541 - DNA, 1206 bp, Brassica napus; identical to SEQ ID NO: 1444
  CDS (1)..(1206)

SEQ ID NO: 17542 - protein, 401 aa, Brassica napus; identical to SEQ ID NO: 1445

SEQ ID NO: 17543 - DNA, 1182 bp, Brassica napus; identical to SEQ ID NO: 1446
  CDS (1)..(1182)

SEQ ID NO: 17544 - protein, 393 aa, Brassica napus; identical to SEQ ID NO: 1447

SEQ ID NO: 17545 - DNA, 1104 bp, Brassica napus; identical to SEQ ID NO: 1450
  CDS (1)..(1104)

SEQ ID NO: 17546 - protein, 367 aa, Brassica napus; identical to SEQ ID NO: 1451

SEQ ID NO: 17547 - DNA, 1236 bp, Brassica napus; identical to SEQ ID NO: 974
  CDS (1)..(1236)

SEQ ID NO: 17548 - protein, 411 aa, Brassica napus; identical to SEQ ID NO: 975

SEQ ID NO: 17549 - DNA, 1203 bp, Glycine max; identical to SEQ ID NO: 1458
  CDS (1)..(1203)

SEQ ID NO: 17550 - protein, 400 aa, Glycine max; identical to SEQ ID NO: 1459

SEQ ID NO: 17551 - DNA, 1218 bp, Linum usitatissimum; identical to SEQ ID NO: 982
  CDS (1)..(1218)

SEQ ID NO: 17552 - protein, 405 aa, Linum usitatissimum; identical to SEQ ID NO: 983

SEQ ID NO: 17553 - DNA, 1182 bp, Brassica napus; identical to SEQ ID NO: 1476
  CDS (1)..(1182)

SEQ ID NO: 17554 - protein, 393 aa, Brassica napus; identical to SEQ ID NO: 1477

SEQ ID NO: 17555 - DNA, 1209 bp, Brassica napus; identical to SEQ ID NO: 1478
  CDS (1)..(1209)

SEQ ID NO: 17556 - protein, 402 aa, Brassica napus; identical to SEQ ID NO: 1479

SEQ ID NO: 17557 - DNA, 1182 bp, Brassica napus; identical to SEQ ID NO: 1480
  CDS (1)..(1182)

SEQ ID NO: 17558 - protein, 393 aa, Brassica napus; identical to SEQ ID NO: 1481

SEQ ID NO: 17559 - DNA, 1206 bp, Brassica napus; identical to SEQ ID NO: 1486
  CDS (1)..(1206)

SEQ ID NO: 17560 - protein, 401 aa, Brassica napus; identical to SEQ ID NO: 1487

SEQ ID NO: 17561 - DNA, 1155 bp, Brassica napus
  CDS (1)..(1155)
atgttgcgagctttagcgcggcctctcgaacggtgtttaggaagcagagcgagcggcgacggtttgctctggcaatcggagttgaaaccacacgccggcggagattactcgatcgcggtggttcaagccaattctagccttgaggatcagagtcaggtgttcacgtcttcctccgctacttacgtcggcgtctacgacggccatggcggacccgaagcttctagattcgttaacagacatctctttccttatattcagaagttcgcaaaagaacatggaggactgtctgcagacgttattaaaaaagcattcaaagaaactgaagaggatttttgcggtatggttaaacgctcacttcccatgaagccacagatggctactgtaggatcttgctgtctctttggtgccatctctaacggcacactctatgtcgcgaatctcggagactccagagccgttcttgggagcgttgttgcaggggatgatagtaatagtagtaacaagggtgctgcagctgaacggttgtccactgatcataacgttgctgttgaagaagtgaggaaggaggttaaggaacttaacccggatgattcgcagatcgtcatgtacattcgtggagtttggaggattaaaggcattattcaggtatcgagatcaattggggatgtatacttgaagaaaccggagttttacagagatccgatattccagcaacatggaaatcacattcctttgaggagacccgcgatgacagccgaaccctccattatagtaaggaagcttaagccacaagacttgtttctgatatttgcatcagatggtctctgggaacatcttagtgatgaagcagcagtagaaattgtactcaaacacccaagaactgggatcgcaagaaaacttgtaagagcagctcttgaagaagcagcaaggaagagagaaatgagatatggagatataaagaaaatagccaaaggggttagaagacatttccatgacgacataagcgtcgttgtagtttatcttgatcaacaaaaaaccacttcttcatcgaatgatagattgatccaaaaaggaggaatcactgctccaccggatatctactcgttacggtcaaatgaaacggagcaaccacggctacccaatgggttatattga

SEQ ID NO: 17562 - protein, 384 aa, Brassica napus
MLRALARPLERCLGSRASGDGLLWQSELKPHAGGDYSIAVVQANSSLEDQSQVFTSSSATYVGVYDGHGGPEASRFVNRHLFPYIQKFAKEHGGLSADVIKKAFKETEEDFCGMVKRSLPMKPQMATVGSCCLFGAISNGTLYVANLGDSRAVLGSVVAGDDSNSSNKGAAAERLSTDHNVAVEEVRKEVKELNPDDSQIVMYIRGVWRIKGIIQVSRSIGDVYLKKPEFYRDPIFQQHGNHIPLRRPAMTAEPSIIVRKLKPQDLFLIFASDGLWEHLSDEAAVEIVLKHPRTGIARKLVRAALEEAARKREMRYGDIKKIAKGVRRHFHDDISVVVVYLDQQKTTSSSNDRLIQKGGITAPPDIYSLRSNETEQPRLPNGLY

SEQ ID NO: 17563 - DNA, 1155 bp, Brassica napus
  CDS (1)..(1155)
atgttgcgagctttagcgcggcctctcgaacggtgtttaggaagcagagcgagcggcgacggtttgctctggcaatcggagttgaaaccacacgccggcggagattactcgatcgcggtggttcaagccaattctagccttgaggatcagagtcaggtgttcacgtcttcctccgctacttacgtcggcgtctacgacggccatggcggacccgaagcttctagattcgttaacagacatctctttccttatattcagaagttcgcaaaagaacatggaggactgtctgcagacgttattaaaaaagcattcaaagaaactgaagaggatttttgcggtatggttaaacgctcacttcccatgaagccacagatggctactgtaggatcttgctgtctctttggtgccatctctaacggcacactctatgtcgcgaatctcggagactccagagccgttcttgggagcgttgttgcaggggatgatagtaatagtagtaacaagggtgctgcagctgaacggttgtccactgatcataacgttgctgttgaagaagtgaggaaggaggttaaggaacttaacccggatgattcgcagatcgtcatgtacattcgtggagtttggaggattaaaggcattattcaggtatctagatcaattggtgatgtgtacttgaagaaaccggagttttacagggatccgatattccagcaacatggaaatcacattcctttgaggagacccgcgatgacagctgaaccgtccattatagtaaggaagcttaagccgcaagacttgtttctgatatttgcatcagatggtctctgggagcatcttagtgatgaagcagcagtagaaattgtactcaaacacccaagaactgggattgcaagaaaacttgtaagagcagctcttgaagaagcagcaaggaagagagaaatgagatatggagatataaagaaaatagccaaaggggttagaagacatttccatgacgacataagcgtcgttgtagtttatcttgatcaacaaaaaaccacttcttcatcgaatgatagattgatccagaaaggaggaatcactgctccaccggatatctactcgttacgttcagatgaagctgagcaacgacggctactcaatgtgttatattga

SEQ ID NO: 17564 - protein, 384 aa, Brassica napus
MLRALARPLERCLGSRASGDGLLWQSELKPHAGGDYSIAVVQANSSLEDQSQVFTSSSATYVGVYDGHGGPEASRFVNRHLFPYIQKFAKEHGGLSADVIKKAFKETEEDFCGMVKRSLPMKPQMATVGSCCLFGAISNGTLYVANLGDSRAVLGSVVAGDDSNSSNKGAAAERLSTDHNVAVEEVRKEVKELNPDDSQIVMYIRGVWRIKGIIQVSRSIGDVYLKKPEFYRDPIFQQHGNHIPLRRPAMTAEPSIIVRKLKPQDLFLIFASDGLWEHLSDEAAVEIVLKHPRTGIARKLVRAALEEAARKREMRYGDIKKIAKGVRRHFHDDISVVVVYLDQQKTTSSSNDRLIQKGGITAPPDIYSLRSDEAEQRRLLNVLY

SEQ ID NO: 17565 - DNA, 1206 bp, Glycine max; identical to SEQ ID NO: 1496
  CDS (1)..(1206)

SEQ ID NO: 17566 - protein, 401 aa, Glycine max; identical to SEQ ID NO: 1497

SEQ ID NO: 17567 - DNA, 1203 bp, Glycine max; identical to SEQ ID NO: 1498
  CDS (1)..(1203)

SEQ ID NO: 17568 - protein, 400 aa, Glycine max; identical to SEQ ID NO: 1499

SEQ ID NO: 17569 - DNA, 1134 bp, Glycine max; identical to SEQ ID NO: 1006
  CDS (1)..(1134)

SEQ ID NO: 17570 - protein, 377 aa, Glycine max; identical to SEQ ID NO: 1007

SEQ ID NO: 17571 - DNA, 1617 bp, Glycine max; identical to SEQ ID NO: 1518
  CDS (1)..(1617)

SEQ ID NO: 17572 - protein, 538 aa, Glycine max; identical to SEQ ID NO: 1519

SEQ ID NO: 17573 - DNA, 1134 bp, Glycine max; identical to SEQ ID NO: 1010
  CDS (1)..(1134)

SEQ ID NO: 17574 - protein, 377 aa, Glycine max; identical to SEQ ID NO: 1011

SEQ ID NO: 17575 - DNA, 1569 bp, Glycine max; identical to SEQ ID NO: 1524
  CDS (1)..(1569)

SEQ ID NO: 17576 - protein, 522 aa, Glycine max; identical to SEQ ID NO: 1525

SEQ ID NO: 17577 - DNA, 1134 bp, Glycine max; identical to SEQ ID NO: 1014
  CDS (1)..(1134)

SEQ ID NO: 17578 - protein, 377 aa, Glycine max; identical to SEQ ID NO: 1015

SEQ ID NO: 17579 - DNA, 1128 bp, Brassica napus; identical to SEQ ID NO: 1556
  CDS (1)..(1128)

SEQ ID NO: 17580 - protein, 375 aa, Brassica napus; identical to SEQ ID NO: 1557

SEQ ID NO: 17581 - DNA, 1674 bp, Glycine max; identical to SEQ ID NO: 1558
  CDS (1)..(1674)

SEQ ID NO: 17582 - protein, 557 aa, Glycine max; identical to SEQ ID NO: 1559

SEQ ID NO: 17583 - DNA, 1113 bp, Zea mays; identical to SEQ ID NO: 1034
  CDS (1)..(1113)

SEQ ID NO: 17584 - protein, 370 aa, Zea mays; identical to SEQ ID NO: 1035

SEQ ID NO: 17585 - DNA, 1194 bp, Zea mays; identical to SEQ ID NO: 1570
  CDS (1)..(1194)

SEQ ID NO: 17586 - protein, 397 aa, Zea mays; identical to SEQ ID NO: 1571

SEQ ID NO: 17587 - DNA, 1185 bp, Zea mays; identical to SEQ ID NO: 1582
  CDS (1)..(1185)

SEQ ID NO: 17588 - protein, 394 aa, Zea mays; identical to SEQ ID NO: 1583

SEQ ID NO: 17589 - DNA, 1455 bp, Zea mays; identical to SEQ ID NO: 1594
  CDS (1)..(1455)

SEQ ID NO: 17590 - protein, 484 aa, Zea mays; identical to SEQ ID NO: 1595

SEQ ID NO: 17591 - DNA, 1518 bp, Zea mays; identical to SEQ ID NO: 1052
  CDS (1)..(1518)

SEQ ID NO: 17592 - protein, 505 aa, Zea mays; identical to SEQ ID NO: 1053

SEQ ID NO: 17593 - DNA, 22 bp, Artificial sequence
  primer
atggcggatatttgttatgaag

SEQ ID NO: 17594 - DNA, 20 bp, Artificial sequence
  primer
tcaagcaacgtgtctctttc

SEQ ID NO: 17595 - protein, 730 aa, Artificial sequence
  consensus sequence
  Variant (2)..(57): Xaa in position 2 to 57 is any amino acid
  Variant (58)..(243): Xaa in position 58 to 243 is any or no amino acid
  Variant (245)..(246): Xaa in position 245 to 246 is any amino acid
  Variant (248)..(249): Xaa in position 248 to 249 is any amino acid
  Variant (251)..(251): Xaa in position 251 is any amino acid
  Variant (253)..(254): Xaa in position 253 to 254 is any amino acid
  Variant (258)..(271): Xaa in position 258 to 271 is any amino acid
  Variant (272)..(297): Xaa in position 272 to 297 is any or no amino acid
  Variant (299)..(299): Xaa in position 299 is any amino acid
  Variant (304)..(306): Xaa in position 304 to 306 is any amino acid
  Variant (309)..(310): Xaa in position 309 to 310 is any amino acid
  Variant (312)..(315): Xaa in position 312 to 315 is any amino acid
  Variant (317)..(327): Xaa in position 317 to 327 is any amino acid
  Variant (328)..(346): Xaa in position 328 to 346 is any or no amino acid
  Variant (348)..(354): Xaa in position 348 to 354 is any amino acid
  Variant (355)..(357): Xaa in position 355 to 357 is any or no amino acid
  Variant (359)..(361): Xaa in position 359 to 361 is any amino acid
  Variant (363)..(372): Xaa in position 363 to 372 is any amino acid
  Variant (373)..(397): Xaa in position 373 to 397 is any or no amino acid
  Variant (404)..(412): Xaa in position 404 to 412 is any amino acid
  Variant (414)..(414): Xaa in position 414 is any amino acid
  Variant (416)..(416): Xaa in position 416 is any amino acid
  Variant (424)..(424): Xaa in position 424 is any amino acid
  Variant (425)..(436): Xaa in position 425 to 436 is any or no amino acid
  Variant (438)..(443): Xaa in position 438 to 443 is any amino acid
  Variant (446)..(446): Xaa in position 446 is any amino acid
  Variant (450)..(453): Xaa in position 450 to 453 is any amino acid
  Variant (454)..(489): Xaa in position 454 to 489 is any or no amino acid
  Variant (491)..(491): Xaa in position 491 is any amino acid
  Variant (493)..(493): Xaa in position 493 is any amino acid
  Variant (496)..(497): Xaa in position 496 to 497 is any amino acid
  Variant (500)..(502): Xaa in position 500 to 502 is any amino acid
  Variant (505)..(505): Xaa in position 505 is any amino acid
  Variant (507)..(509): Xaa in position 507 to 509 is any amino acid
  Variant (510)..(510): Xaa in position 510 is any or no amino acid
  Variant (512)..(512): Xaa in position 512 is any amino acid
  Variant (514)..(514): Xaa in position 514 is any amino acid
  Variant (516)..(516): Xaa in position 516 is any amino acid
  Variant (518)..(518): Xaa in position 518 is any amino acid
  Variant (521)..(521): Xaa in position 521 is any amino acid
  Variant (524)..(524): Xaa in position 524 is any amino acid
  Variant (526)..(526): Xaa in position 526 is any amino acid
  Variant (527)..(553): Xaa in position 527 to 553 is any or no amino acid
  Variant (556)..(556): Xaa in position 556 is any amino acid
  Variant (561)..(561): Xaa in position 561 is any amino acid
  Variant (563)..(565): Xaa in position 563 to 565 is any amino acid
  Variant (568)..(572): Xaa in position 568 to 572 is any amino acid
  Variant (574)..(575): Xaa in position 574 to 575 is any amino acid
  Variant (576)..(577): Xaa in position 576 to 577 is any or no amino acid
  Variant (579)..(579): Xaa in position 579 is any amino acid
  Variant (580)..(580): Xaa in position 580 is any or no amino acid
  Variant (592)..(596): Xaa in position 592 to 596 is any amino acid
  Variant (598)..(601): Xaa in position 598 to 601 is any amino acid
  Variant (602)..(639): Xaa in position 602 to 639 is any or no amino acid
  Variant (641)..(647): Xaa in position 641 to 647 is any amino acid
  Variant (648)..(705): Xaa in position 648 to 705 is any or no amino acid
  Variant (707)..(709): Xaa in position 707 to 709 is any amino acid
  Variant (711)..(713): Xaa in position 711 to 713 is any amino acid
  Variant (715)..(718): Xaa in position 715 to 718 is any amino acid
  Variant (720)..(720): Xaa in position 720 is any amino acid
  Variant (723)..(723): Xaa in position 723 is any amino acid
  Variant (726)..(726): Xaa in position 726 is any amino acid
  Variant (728)..(729): Xaa in position 728 to 729 is any amino acid
MXXXXXXXXXXXXXXXXXXXXXXXXXXXXXXXXXXXXXXXXXXXXXXXXXXXXXXXXXXXXXXXXXXXXXXXXXXXXXXXXXXXXXXXXXXXXXXXXXXXXXXXXXXXXXXXXXXXXXXXXXXXXXXXXXXXXXXXXXXXXXXXXXXXXXXXXXXXXXXXXXXXXXXXXXXXXXXXXXXXXXXXXXXXXXXXXXXXXXXXXXXXXXXXXXXXXXXXXXXXXXXXXXXXXXXXXXXXXXXXXXXGXXSXXGXRXXMEDXXXXXXXXXXXXXXXXXXXXXXXXXXXXXXXXXXXXXXXXVXDGHGXXXVAXXCXXXXHXXXXXXXXXXXXXXXXXXXXXXXXXXXXXXWXXXXXXXXXXFXXXDXXXXXXXXXXXXXXXXXXXXXXXXXXXXXXXXXXXGSTAVVXXXXXXXXXVXNXGDSRAVLXXXXXXXXXXXXXRXXXXXXLSXDHKXXXXXXXXXXXXXXXXXXXXXXXXXXXXXXXXXXXXXXXXPXRXDEXXRIXXXGGXVXXXXGXRXVXGXLAXSRXIXXXXXXXXXXXXXXXXXXXXXXXXXXXXGDXYLKPXVXXXPEXXXXXRXXXXDXXLILASDGLWDVXXXXXAXXXXXXXXXXXXXXXXXXXXXXXXXXXXXXXXXXXXXXXXXXRXXXXXXXXXXXXXXXXXXXXXXXXXXXXXXXXXXXXXXXXXXXXXXXXXXXXXXXXXXXXXXXXXAXXXLXXXAXXXXSXDNXSVXVXXL

SEQ ID NO: 17596 - protein, 11 aa, Artificial sequence
  protein pattern
  Variant (2)..(2): Xaa in position 2 is Phe or Tyr
  Variant (7)..(7): Xaa in position 7 is Cys or Gly
  Variant (8)..(9): Xaa in position 8 to 9 is any amino acid
  Variant (11)..(11): Xaa in position 11 is Ala or Ser
VXDGHGXXXVX

SEQ ID NO: 17597 - protein, 12 aa, Artificial sequence
  protein pattern
  Variant (3)..(3): Xaa in position 3 is any amino acid
  Variant (6)..(6): Xaa in position 6 is Ala, Gly or Ser
  Variant (10)..(10): Xaa in position 10 is any amino acid
  Variant (11)..(11): Xaa in position 11 is His or Tyr
  Variant (12)..(12): Xaa in position 12 is Leu or Met
LAXSRXIGDXXX

SEQ ID NO: 17598 - protein, 29 aa, Artificial sequence
  protein pattern
  Variant (2)..(2): Xaa in position 2 is Ala, Cys, Ser, Thr or Val
  Variant (4)..(4): Xaa in position 4 is Asp or Gly
  Variant (5)..(5): Xaa in position 5 is Cys or Ser
  Variant (7)..(7): Xaa in position 7 is any amino acid
  Variant (8)..(8): Xaa in position 8 is Met or Val
  Variant (9)..(9): Xaa in position 9 is Ala, Ile or Leu
  Variant (10)..(14): Xaa in position 10 to 14 is any amino acid
  Variant (15)..(15): Xaa in position 15 is Ala, Pro, Ser or Thr
  Variant (16)..(16): Xaa in position 16 is Phe, Ile, Leu, Met or Val
  Variant (17)..(17): Xaa in position 17 is any amino acid
  Variant (20)..(20): Xaa in position 20 is any amino acid
  Variant (25)..(25): Xaa in position 25 is any amino acid
  Variant (27)..(27): Xaa in position 27 is any amino acid
NXGXXRXXXXXXXXXXXLSXDHKPXRXDE

SEQ ID NO: 17599 - protein, 29 aa, Artificial sequence
  protein pattern
  Variant (2)..(4): Xaa in position 2 to 4 is any amino acid
  Variant (5)..(5): Xaa in position 5 is Ala or Leu
  Variant (6)..(6): Xaa in position 6 is Ala, Asp, Glu, Ser or Thr
  Variant (7)..(7): Xaa in position 7 is any amino acid
  Variant (9)..(11): Xaa in position 9 to 11 is any or no amino acid
  Variant (13)..(16): Xaa in position 13 to 16 is any amino acid
  Variant (17)..(17): Xaa in position 17 is Ser or Thr
  Variant (18)..(18): Xaa in position 18 is any amino acid
  Variant (21)..(21): Xaa in position 21 is any amino acid
  Variant (22)..(22): Xaa in position 22 is Ser or Thr
  Variant (23)..(24): Xaa in position 23 to 24 is Ile or Val
  Variant (26)..(26): Xaa in position 26 is Ile or Val
  Variant (27)..(27): Xaa in position 27 is Asp, Glu or Asn
  Variant (29)..(29): Xaa in position 29 is Lys or Arg
AXXXXXXLXXXAXXXXXXDNXXXXVXXLX

SEQ ID NO: 17600 - protein, 16 aa, Artificial sequence
  protein pattern
  Variant (3)..(3): Xaa in position 3 is Ala or Ser
  Variant (6)..(6): Xaa in position 6 is Ala, Ser or Val
  Variant (7)..(8): Xaa in position 7 to 8 is Ile, Leu or Val
  Variant (9)..(12): Xaa in position 9 to 12 is any amino acid
  Variant (13)..(13): Xaa in position 13 is Ile, Leu or Val
  Variant (14)..(14): Xaa in position 14 is Phe, Ile or Val
  Variant (15)..(15): Xaa in position 15 is any amino acid
  Variant (16)..(16): Xaa in position 16 is Ala or Ser
STXVVXXXXXXXXXXX

SEQ ID NO: 17601 - DNA, 2052 bp, Arabidopsis thaliana
  CDS (1)..(2052)
atggcggaaccgattccctcatcgtctctgtcaccgaaatctctacaatctcctaatcctatggaaccttctcctgcatcttctactcctttaccttcatcatcatctcaacaacaacaactcatgacagctccgatttccaattctgttaattccgctgcgtctccggcgatgactgtaactaccaccgaaggtattgtaattcagaacaattcgcaacctaacatctcctctcccaaccctacttcttctaacccaccaatcggagctcagatcccgtcgccttctcctctctctcacccttcttcatctttagatcagcaaacacagactcagcaactcgttcaacaaactcagcaattgcctcaacaacaacaacagattatgcagcaaatctcttcatctccgattccacaattatcgccgcaacagcaacagattctgcagcaacaacacatgacttcacagcaaatcccaatgtcgagttaccaaattgctcaatctcttcagcgatccccttctctttctcgcctgagccaaattcagcaacaacagcagcagcagcatcaaggtcaatacggcaacgtgttgagacagcaagctggtttgtacggaaccatgaactttggtggctcaggttcagttcaacagagccagcagaatcagcagatggttaaccctaatatgtccagagcaggtttagttggccaaagcggtcacttgcctatgcttaacggtgctgctggagctgctcagatgaatattcaaccccaattattggctgcttcgccgaggcagaaatctggcatggttcaaggttcgcagtttcatccgggaagttctggacaacagttacaagggatgcaagctatgggaatgatgggatcactgaatttgacctcgcaaatgagaggtaaccctgctctctatgcgcagcagagaatcaacccggggcagatgagacagcaattgtcacagcaaaacgctcttacttcacctcaggtccagaacctccagagaacatcttctctcgcatttatgaatcctcagctatcgggtttggcccagaatggacaagctggcatgatgcaaaactctttgtcacagcagcaatggctgaagcaaatgtcgggaataacgagccccaattcattccgactccaaccgagtcaaagacaggctcttctcttacagcagcagcagcagcaacaacaacaactgtcctctcctcagttacatcaatcttctatgtccttgaatcagcagcagatatcacagataatacaacagcagcagcaacaatcacaattaggccagtcgcagatgaaccaatcccattcccaacaacaactacaacagatgcagcagcaactacagcagcaaccacaacagcagatgcagcagcagcagcaacaacaacagcaaatgcagattaatcaacaacagccatctccaaggatgttgagtcatgcaggacaaaaatctgtcagtttaacgggttcacaaccagaggctacacaatcgggtacaacaacaccaggtggtagctcaagccagggaacagaagcaacaaaccaactccttggtaaaaggaagatacaggatctggtttcgcaggtggatgtacatgcgaaactggatcctgatgttgaagacctccttttggaggtggcagatgacttcattgattcggtcacatcttttgcatgtagcttggctaagcatcgtaaatcatctgtattggagcccaaggatatattactccacctagagaaaaacttgcacttgacaattcctggattctcaagtgaggataaacgtcaaacaaaaactgtaccaactgatctccacaagaagcgacttgcaatggtgcgtgcattactagaatcctcaaaaccagagacgaatgcaagcaattccaaggaaactatgagacaagcgatggtgaacccaaatggtccgaatcatctcttaagaccctcccaaagttcagaacaattggtttcgcagacatccggtcctcacatattacaacacatgacacgatactaa

SEQ ID NO: 17602 - protein, 683 aa, Arabidopsis thaliana [sequence omitted]

SEQ ID NO: 17603 - DNA, 2095 bp, Zea mays
  CDS (39)..(1694)
  misc_feature (9)..(9): n is a, g, c or t
cggccgggnaaccctacacgcccccgccacgccgcggcatggcggatccgccgcccgtggccgcctccgcctcgccggcgcagcccgaccagctcgccgccgcggcctccgtgtccaccccgcagaaccccaaccccctcctctcccctcaaattcccccgtccccgaccgtctccgacctctccgcgcacatctcgtccccgcagcagctcgaccaggcggctgcggcagctgacgcttcgggcggcggaggatccatggattacctcccgcgcccgccgcagctgcaggcgccttcgcccacgcaggcaggggtcggcgccgcggggtttgcccagatcccccgctcggggtcgacctcacgcctctccacggccacccagctccagcagtacgcggctaggatgtacggcgggcagatgagcttctcgggtggcggagggctcgtgggccagcagcagctggcggggcgcgcccccatgcttgggcagggccagctggggatgctgcaaggccagggtaacgcggcatctgcggcacattttgggcttcagtcgcagatgttggcgcaggctaggcaaaaggtcatggcacaaaacacccaattgaataatgctaatacagctcaagtgctgcaagggatgcagcccatgggtgtcatgggtgctatggggatgaaccagacgagaccgaatgtaactattccctatggtgctcaacaaaggtttgcccaggcacaaatgaggccacaagcatctcaacaacctgcactgtctccacagaaggtacctggtcaaggtttgtcgaggacagcatcaattaccgcattaaattcacaactgtctggatcatcacaaaatggacagatggtggcaatgtctatgcctcagcaacagcaacagcagcagcaatggttgaagcaaatgcaaccatccatgggctcaccactttccccacagcaacaatatcagaaccagcagaggctcctgttgatgcagcatcttcagcagaagacaggattgaaccaacaacaacttctccaaatccaacaacagcatccacatctcaatgtccaacagctgattaagcagcaacaatttctgaagcagtttcagcagcagcaaccgctacaatctcctcgtgttttagcatctggttcacagaaatctgcgaatcttacaggctcgcagccgggtacaccattgtcaggtggaactatgactggtggaagtggaagtcagggagctgaaggaactagccaacttcttgggaaaaggaaaatacaagatctggttgcacaggtagatcccttaggcaaggttgacccagaagtggaggatttacttctagaaatcgctgatgacttcattggctcggtgactgcatttgcgtgtaccttggcaaagcacaggaaatcatcagttgtcgaagccaaggatgtgttgctgcacttagaaaaaaattggaatttatctattcctggtttctcacggggggataagaatcctcaaagaaattctgcaaagcaactggtagatccccaacattcagaaagtgatgttactggtatcagaggcacaagcaataaacttggtgctaataactcggttggaaatcatcaaatacgacctccgatggcagaaccttcagcaatgccaacaatgggccctctatcaaaagcccctcgcttctagtggttatgcttctcttccctatcgaaggaaaaattccttttcaggacaatctacctggaaaacaacccgtaggctctaactcaaggattgctagcaagtggaagcacaataaatccacgagcatctgtggcaaactgcagatgcttgtcttacagttacaggaaagcagttgctgacttaccaatcctctacatggggtcatatgtaactttattttattttattttatttttgtgcccgtaaatgcccccatccgttgtatataaatgtttttttttttggcaatggggcattatcgtcaccagttttgatgttgctaggtaggtgaacaaatactaaagtggatgcaacttatataatttaatgaaatgtaagattgatgtcatttttaattaaaaaaa

SEQ ID NO: 17604 - protein, 551 aa, Zea mays
MADPPPVAASASPAQPDQLAAAASVSTPQNPNPLLSPQIPPSPTVSDLSAHISSPQQLDQAAAAADASGGGGSMDYLPRPPQLQAPSPTQAGVGAAGFAQIPRSGSTSRLSTATQLQQYAARMYGGQMSFSGGGGLVGQQQLAGRAPMLGQGQLGMLQGQGNAASAAHFGLQSQMLAQARQKVMAQNTQLNNANTAQVLQGMQPMGVMGAMGMNQTRPNVTIPYGAQQRFAQAQMRPQASQQPALSPQKVPGQGLSRTASITALNSQLSGSSQNGQMVAMSMPQQQQQQQQWLKQMQPSMGSPLSPQQQYQNQQRLLLMQHLQQKTGLNQQQLLQIQQQHPHLNVQQLIKQQQFLKQFQQQQPLQSPRVLASGSQKSANLTGSQPGTPLSGGTMTGGSGSQGAEGTSQLLGKRKIQDLVAQVDPLGKVDPEVEDLLLEIADDFIGSVTAFACTLAKHRKSSVVEAKDVLLHLEKNWNLSIPGFSRGDKNPQRNSAKQLVDPQHSESDVTGIRGTSNKLGANNSVGNHQIRPPMAEPSAMPTMGPLSKAPRF

SEQ ID NO: 17605 - DNA, 1629 bp, Oryza sativa (japonica cultivar-group)
  CDS (1)..(1629)
atggcggatccgccgtccgcggccgccaccgcctcgccgcagcccgatcagctcgccgccgccgccgtctccaccccgcaaaaccccaaccctaaccccctcctctccccccaaatcccaccgtcgcccaccgtctccgacctgtccgccatctcgtccccgcagctcgacccgtccgcggcgggcggcggggccatggactaccccccgcggccgccgcagatgcaggctccttcgcccggccaggcggcggccggggctggaggcttcggccagatccaccgctcgggctcgggctcccgcctcgccgctgtcggccagcttccacagtacgctgctgctgcggccaggatgtacggcagtcaggtgaacttctcgggaggtggaggacaggtgggacaacagcagcagcagcagcagcagctggctgctcgcgcggccatgcttagtcaaggccagattgggatgctgcaagggcaggggaacgcagcatctgcggcgcactatggtctccagtcacagatgatggcgcagccaaggcagaagggtatggtgcaaggtgcacaatttaatactgccaatgcagctcaagcattacaaggtatgcagtccatgggagtcatgggtggtatgagaggaaatggaactattccatataatcagcaacgttttgcccatgcacaagcacaattgaggccgcagcagacatcacagcaaggcacactgtctccacaggttgtgggtcaaggcttgacaagaacagcatcgattgctgcattaaatccacagctacctggatcgtcgacaaatgggccgatggcacaaatgtcccttcctcagaaacagcagcaggcagcatggttaaaacaaatgcaatcatcgctgggatcacctgtttctccacaacaatttcagcatcaacaaaggatgctattaatacatcaacttcaacagcagtcaggattgaatcaacaccaaatcgcacaaacccaacaacagcatcctcatctcaatacccagcttttacagcagcaacacattctacagcaacttcagcaacaacaacaatctccaaggatatcagcatctggttcccagaagtccatgaacctgacaggatcacaaccgggcactcctttatcaggtggaactatgactggtggaagtgcaagtcaaggagcagaagtaactaatcaacttcttgggaagagaaaaatacaagatttggtttcacaggtagatcccctgggcaaggttgatccagaagtggaagatttgcttttggagattgctgatgacttcattgattcggtgactgcatttgcgtgtacccttgcgaagcataggaaatcatcagtcctggaagccaaggatgtattgctgcacctagaaaaaaattggcacttatctgttcctggtttcttaagggaggacaagaatccgcaaagacatcctgtaaaggtatcagtggaccctcaacaaccagaatgtgatgctgctggtattagaagcacaggaaataaattggtaattaacaattcagttgccaaccatcaaacaagacctccggttactgagccttcaccaatgcccacaatggggcctctgtcaaaagtgccccgtttctaa

SEQ ID NO: 17606 - protein, 542 aa, Oryza sativa (japonica cultivar-group)
MADPPSAAATASPQPDQLAAAAVSTPQNPNPNPLLSPQIPPSPTVSDLSAISSPQLDPSAAGGGAMDYPPRPPQMQAPSPGQAAAGAGGFGQIHRSGSGSRLAAVGQLPQYAAAAARMYGSQVNFSGGGGQVGQQQQQQQQLAARAAMLSQGQIGMLQGQGNAASAAHYGLQSQMMAQPRQKGMVQGAQFNTANAAQALQGMQSMGVMGGMRGNGTIPYNQQRFAHAQAQLRPQQTSQQGTLSPQVVGQGLTRTASIAALNPQLPGSSTNGPMAQMSLPQKQQQAAWLKQMQSSLGSPVSPQQFQHQQRMLLIHQLQQQSGLNQHQIAQTQQQHPHLNTQLLQQQHILQQLQQQQQSPRISASGSQKSMNLTGSQPGTPLSGGTMTGGSASQGAEVTNQLLGKRKIQDLVSQVDPLGKVDPEVEDLLLEIADDFIDSVTAFACTLAKHRKSSVLEAKDVLLHLEKNWHLSVPGFLREDKNPQRHPVKVSVDPQQPECDAAGIRSTGNKLVINNSVANHQTRPPVTEPSPMPTMGPLSKVPRF

SEQ ID NO: 17607 - DNA, 2394 bp, Drosophila melanogaster
  CDS (1)..(2394)
atggccaatccgcgcaagttcagcgagaagatcgctctgcagaagcagaagcaggcggagggcacagcggaattcgagcggatcatgaaggaggtgtatgccacgaagagggatgagccgcctgcgaatcagaagatcctagacggccttgtcggcggtcaggaggtaagccaatcctcgccaggcgcaggcaatgggacgggcggaggtggcagtggttccggcagtggagccagcggcggaggagcctcaccagatggcctgggaggcggcggtggttctccgacggcttatcgagaatcccgagggcgcagcgtaggtgtgggtcccatgcgaagaccgtcggagcgcaagcaggatcgttcgccctacggcagcagcagtacgcaacaaaccttagacaacggccagctaaatccgcatcttcttggtccacctacggcggagagtttgtggcggcggtccagctccgattcggcgctgcaccaaagtgcgctggtggcgggcttcaatagcgacgtgaactcgatgggcgccaactatcagcagcagcaacatcagcaacaacagcaaccgggccagccaagatctcactcgccgcaccatggtataaacaggaccatgagtccgcaggcgcaacggaggaagtcgccgctactgcagccccatcagctgcagttgcagcaactgcaacagcagcagcaacagatgcaacatcagcatcagctgcaccagcagctccaaatgcagcagctgcaacagcaccagcagcaacaccagcagcagcagcaacaacagaacacgccatacaacaacgccaaattcacgaatcctgtgttccggccgctgcaggatcaggtcaactttgccaacaccggctccctgcccgatctcacggcccttcaaaactatggaccccagcagcagcagcagcaatcccagcaacagccgtcgcagcaacaacagcagttgcagcaaaccctgtcgccagtcatgtctccgcacaatcaccgccgcgaacgggatcagtcgcccagtccgtttagtccggcgggtggaggagggggagcaggtcccgggtcgccctatcagcagcaacagcactcgcccaccggaaacacgcaacagcagcagcagcagcaccaacagcccagcaactcgccgcacctgtcctttaccaatctggccaccacgcaggcagctgttaccacatttaacccgctccccacgctgggtccgcacaatgccaccgactaccgccagccaccgaatcctcctagtccacgctcttcgcccggcttgctgagcagcgtatcggccacggatctgcactccagtgcaccggccagtcccatacgccagcagcaacaggcccatcagcagcaacagcagcagcaacaggcgcagcaacaacagcaacagtttgataactcctacaacagtctgaatacctcgtttcacaatcagtttgagattttctcgctgggcgacagcaattcctcgccggaacagcagggctttgcaaataatttcgtggccctcgactttgacgacctgagtggcggcggaggtggtggcccaagcgggggcggcggcagcaatggaggaggtctgaccaacggttacaacaagccggagatgttggacttcagcgagctgagcggcagcccggaggcgagtgggaacaacaaccacatgcggcgaggagtgagcaacctgaacaacaacgggttgagcaatggtgtggtgggatccacgcacaacggcagcacaaatctaaatggagcgggaaacaacaatagcagtagtggaggtggcacggcgcaggatcctttgggaataaccacttcgcctgtgccctcacccttgggctgccccagttcaccgctgccgataccgattccgatgtcggcgcaaagctcgccacagcagcagcaccaccatcatcagcagcagcaacaacagcatcatcagcagcaacaccatcagcagcagcaattatcattatctctgcaccattcgccgcatcattcgccaatgcattcgccgcaccatgggaattcaccgctttcaagcagctcgccagtgagtcacaatgcctgctccaactccaacgtggtgatgaaccaccagcagcagcagcaacaacatcaccaccagcaacaccatcatcagggctcctcgcaaagtcacacgccgaccacagcgaatataccctctattatctttagtgattactcctccaacgcggattataccagggagatcttcgactccctcgatctggatctgggacagatggacgtagccggtttgcagatgctgtccgaccagaaccccatcatgatcgccgatcccaacatcgaggatagttttcgacgcgacctcaactga

SEQ ID NO: 17608 - protein, 797 aa, Drosophila melanogaster
MANPRKFSEKIALQKQKQAEGTAEFERIMKEVYATKRDEPPANQKILDGLVGGQEVSQSSPGAGNGTGGGGSGSGSGASGGGASPDGLGGGGGSPTAYRESRGRSVGVGPMRRPSERKQDRSPYGSSSTQQTLDNGQLNPHLLGPPTAESLWRRSSSDSALHQSALVAGFNSDVNSMGANYQQQQHQQQQQPGQPRSHSPHHGINRTMSPQAQRRKSPLLQPHQLQLQQLQQQQQQMQHQHQLHQQLQMQQLQQHQQQHQQQQQQQNTPYNNAKFTNPVFRPLQDQVNFANTGSLPDLTALQNYGPQQQQQQSQQQPSQQQQQLQQTLSPVMSPHNHRRERDQSPSPFSPAGGGGGAGPGSPYQQQQHSPTGNTQQQQQQHQQPSNSPHLSFTNLATTQAAVTTFNPLPTLGPHNATDYRQPPNPPSPRSSPGLLSSVSATDLHSSAPASPIRQQQQAHQQQQQQQQAQQQQQQFDNSYNSLNTSFHNQFEIFSLGDSNSSPEQQGFANNFVALDFDDLSGGGGGGPSGGGGSNGGGLTNGYNKPEMLDFSELSGSPEASGNNNHMRRGVSNLNNNGLSNGVVGSTHNGSTNLNGAGNNNSSSGGGTAQDPLGITTSPVPSPLGCPSSPLPIPIPMSAQSSPQQQHHHHQQQQQQHHQQQHHQQQQLSLSLHHSPHHSPMHSPHHGNSPLSSSSPVSHNACSNSNVVMNHQQQQQQHHHQQHHHQGSSQSHTPTTANIPSIIFSDYSSNADYTREIFDSLDLDLGQMDVAGLQMLSDQNPIMIADPNIEDSFRRDLN

SEQ ID NO: 17609 - DNA, 1905 bp, Kluyveromyces lactis NRRL Y-1140
  CDS (1)..(1905)
atgtccgacacagcagaagagaatggccttacgaggtttcttatgaaggtgaaggaaaatctggataccagccagtcagaagctcaaactgagaccgaacccattgaatttaagtacacttttgattataagcctgaattcagcagtggcaaggtggtctattcacggaacgaattgcttgctattcgcgagcaagttgcagaggaagacgtgaccaatctagcttctgaattgcctaacaagaagttttggagattacccgttccaggatccaacgtcggtggtaggaagggatccaacaccagaggtaaccatgatgataagtttggcggaaaggacagaggtgcccagagtggtagcagaaatgccaggaacaatagaaatagcaagcgtcaaggtggtaaaaaggctgggaaggagagcaacgaagaatacattgctttggaagaacagatggaatctacagggaatccaatggcagattttgagaattggagaaacaaaatgaaggaactggagcgtcaaaaaagagggttggactctgatgcgggcaaagattcggattctcctgcaggattgccagctcaaagtttcagctccatatccgatttcttcaatttaaagccggatgaccaaaagagtgctccattggaagagcttgagccagcggactcgtcggaagacgtttcgaaacaaacatttgaaaaacaagatagagattcccaagatgttcaacacggcagtcaaggccaaggcataagcaagagcaattcttccagattctcctcgttcttccaaggtggtaattctccggatgccagtgataaccgtcctatcgcgaagcctccaagtcaatcttcggaagatagcagaccagctgcgggatccaggctactctctctattcaatactgactcaccatcttcagattcggtagttcaacaccaacaacctgaaaagcccatggtaaacaatccacctggtcttactcaacagtcttctaccacatcattgtcgtcggtcgcttcttcgaatcattcccaacctcactcaggtcctcgtgctgcgaaagataatgatgtcaatggcagcgtgtttttgaagagtttaatgactaaaggcagtgaaaatatgatgcaacagcccttagtctctgcccctccgggcctttcccaaaatcaatctcagatacctaacatcacacagcagcagcagcagcagcagcagcagcagcagcatcagcaacagcaacaacagcaacaacagcaacacattcagcgcccacatcaacagcagcagcagcaacctcaacaacgcaaacttcaacaaattcatcaacaacacagccagcatgctcatcctgctcagcagcagcaacatggtaaaccaccacaaaacattgctcaatcaggtgctccaatgcaggcacctccaggattcccagttgggatgccaccacatatgatggcccctcctatgggaatgcctccacagcacttccaaggtggctatgctatgcctcctccaccgccacctggaatgggacagccacgtataatgagcaacggtaaaggattccccgaacacttgggtaacccacaacagcagcctcctagcgctccaaaacagccagcaagtaaagttggtccgcaaggtcaagttccttcacaaggccatcctcaatcccacccacaacaaccttatatgatgtcaggtatgccaatgaacttcaatgggcaaaatgttccaattccagctcaaggtatcccaccaaatgcattcccatatggccatccaatgatggctctacagtttcaacaacaacaacagcagcagcagcaacaacaatacccgcagcaacaacaacacccgcagcaaccgcgccaaacaaatccgcgccaataa

SEQ ID NO: 17610 - protein, 634 aa, Kluyveromyces lactis NRRL Y-1140
MSDTAEENGLTRFLMKVKENLDTSQSEAQTETEPIEFKYTFDYKPEFSSGKVVYSRNELLAIREQVAEEDVTNLASELPNKKFWRLPVPGSNVGGRKGSNTRGNHDDKFGGKDRGAQSGSRNARNNRNSKRQGGKKAGKESNEEYIALEEQMESTGNPMADFENWRNKMKELERQKRGLDSDAGKDSDSPAGLPAQSFSSISDFFNLKPDDQKSAPLEELEPADSSEDVSKQTFEKQDRDSQDVQHGSQGQGISKSNSSRFSSFFQGGNSPDASDNRPIAKPPSQSSEDSRPAAGSRLLSLFNTDSPSSDSVVQHQQPEKPMVNNPPGLTQQSSTTSLSSVASSNHSQPHSGPRAAKDNDVNGSVFLKSLMTKGSENMMQQPLVSAPPGLSQNQSQIPNITQQQQQQQQQQQHQQQQQQQQQQHIQRPHQQQQQQPQQRKLQQIHQQHSQHAHPAQQQQHGKPPQNIAQSGAPMQAPPGFPVGMPPHMMAPPMGMPPQHFQGGYAMPPPPPPGMGQPRIMSNGKGFPEHLGNPQQQPPSAPKQPASKVGPQGQVPSQGHPQSHPQQPYMMSGMPMNFNGQNVPIPAQGIPPNAFPYGHPMMALQFQQQQQQQQQQQYPQQQQHPQQPRQTNPRQ

SEQ ID NO: 17611 - DNA, 1638 bp, Oryza sativa subsp
  CDS (1)..(1638)
atggcggatccgccgtccgcggccgccaccgcctcgccgcagcccgatcagctcgccgccgccgccgtctccaccccgcaaaaccccaaccctaaccccctcctctccccccaaatcccaccgtcgcccaccgtctccgacctgtccgccatctcgtccccgcagctcgacccgtccgcggcgggcggcggggccatggactaccccccgcggccgccgcagatgcaggctccttcgcccggtcaggcggcggccggggctggaggcttcggccagatccaccgctcgggctcgggctcccgcctcgccgctgtcggccagcttccacagtacgctgctgctgcggccaggatgtacggcagtcaggtgaacttctcgggaggtggaggacaggtgggacaacagcagcagcagcagcagcagcagcagctggctgctcgcgcggccatgcttagtcaaggccagattgggatgctgcaagggcaggggaacgcagcatctgcggcgcactatggtctccagtcacagatgatggcgcagccaaggcagaagggtatggtgcaaggtgcacaatttaataccgccaatgcagctcaagcattacaaggtatgcagtccatgggagtcatgggtggtatgagaggaaatggaactattccatataatcagcaacgttttgcccatgcacaagcacaattgaggccgcagcagacatcacagcaaggcacactgtctccacagaaggttgtgggtcaaggcttgacaagaacagcatcgattgctgcattaaatccacagctacctggatcgtcgacaaatgggccgatggcacaaatgtcccttcctcagaaacagcagcaggcagcatggttaaaacaaatgcaatcatcgctgggatcacctgcttctccacaacaatttcagcatcaacaaaggatgctattaatacatcaacttcaacagcagtcaggattgaatcaacaccaaatcgcacaaacccaacaacagcatcctcatctcaatacccagcttttacagcagcaacacattctacagcaacttcagcaacaacaacaatctccaaggatatcagcatctggttcccagaagtccatgaacctgacaggatcacaaccgggcactcctttatcaggtggaactatgactggtggaagtgcaagtcaaggagcagaagtaactaatcaacttcttgggaagagaaaaatacaagatttggtttcacaggtagatcccctgggcaaggttgatccagaagtggaagatttgcttttggagattgctgatgacttcattgattcggtgactgcatttgcgtgtacccttgcgaagcataggaaatcatcagtcctggaagccaaggatgtattgctgcacctagaaaaaaattggcacttatctgttcctggtttcttaagggaggacaagaatccgcaaagacatcctgtaaaggtatcagtggaccctcaacaaccagaatgtgatgctgctggtattagaagcacaggaaataaattggtaattaacaattcagttgccaaccatcaaacaagacctccggttgctgagccttcaccaatgcccacaatggggcctctgtcaaaagtgccccgtttctaa

SEQ ID NO: 17612 - protein, 545 aa, Oryza sativa subsp
MADPPSAAATASPQPDQLAAAAVSTPQNPNPNPLLSPQIPPSPTVSDLSAISSPQLDPSAAGGGAMDYPPRPPQMQAPSPGQAAAGAGGFGQIHRSGSGSRLAAVGQLPQYAAAAARMYGSQVNFSGGGGQVGQQQQQQQQQQLAARAAMLSQGQIGMLQGQGNAASAAHYGLQSQMMAQPRQKGMVQGAQFNTANAAQALQGMQSMGVMGGMRGNGTIPYNQQRFAHAQAQLRPQQTSQQGTLSPQKVVGQGLTRTASIAALNPQLPGSSTNGPMAQMSLPQKQQQAAWLKQMQSSLGSPASPQQFQHQQRMLLIHQLQQQSGLNQHQIAQTQQQHPHLNTQLLQQQHILQQLQQQQQSPRISASGSQKSMNLTGSQPGTPLSGGTMTGGSASQGAEVTNQLLGKRKIQDLVSQVDPLGKVDPEVEDLLLEIADDFIDSVTAFACTLAKHRKSSVLEAKDVLLHLEKNWHLSVPGFLREDKNPQRHPVKVSVDPQQPECDAAGIRSTGNKLVINNSVANHQTRPPVAEPSPMPTMGPLSKVPRF

SEQ ID NO: 17613 - DNA, 1632 bp, Oryza sativa subsp
  CDS (1)..(1632)
atggcggatccgccgtccgcggccgccaccgcctcgccgcagcccgatcagctcgccgccgccgccgtctccaccccgcaaaaccccaaccctaaccccctcctctccccccaaatcccaccgtcgcccaccgtctccgacctgtccgccatctcgtccccgcagctcgacccgtccgcggcgggcggcggggccatggactaccccccgcggccgccgcagatgcaggctccttcgcccggccaggcggcggccggggctggaggcttcggccagatccaccgctcgggctcgggctcccgcctcgccgctgtcggccagcttccacagtacgctgctgctgcggccaggatgtacggcagtcaggtgaacttctcgggaggtggaggacaggtgggacaacagcagcagcagcagcagcagctggctgctcgcgcggccatgcttagtcaaggccagattgggatgctgcaagggcaggggaacgcagcatctgcggcgcactatggtctccagtcacagatgatggcgcagccaaggcagaagggtatggtgcaaggtgcacaatttaatactgccaatgcagctcaagcattacaaggtatgcagtccatgggagtcatgggtggtatgagaggaaatggaactattccatataatcagcaacgttttgcccatgcacaagcacaattgaggccgcagcagacatcacagcaaggcacactgtctccacagaaggttgtgggtcaaggcttgacaagaacagcatcgattgctgcattaaatccacagctacctggatcgtcgacaaatgggccgatggcacaaatgtcccttcctcagaaacagcagcaggcagcatggttaaaacaaatgcaatcatcgctgggatcacctgtttctccacaacaatttcagcatcaacaaaggatgctattaatacatcaacttcaacagcagtcaggattgaatcaacaccaaatcgcacaaacccaacaacagcatcctcatctcaatacccagcttttacagcagcaacacattctacagcaacttcagcaacaacaacaatctccaaggatatcagcatctggttcccagaagtccatgaacctgacaggatcacaaccgggcactcctttatcaggtggaactatgactggtggaagtgcaagtcaaggagcagaagtaactaatcaacttcttgggaagagaaaaatacaagatttggtttcacaggtagatcccctgggcaaggttgatccagaagtggaagatttgcttttggagattgctgatgacttcattgattcggtgactgcatttgcgtgtacccttgcgaagcataggaaatcatcagtcctggaagccaaggatgtattgctgcacctagaaaaaaattggcacttatctgttcctggtttcttaagggaggacaagaatccgcaaagacatcctgtaaaggtatcagtggaccctcaacaaccagaatgtgatgctgctggtattagaagcacaggaaataaattggtaattaacaattcagttgccaaccatcaaacaagacctccggttactgagccttcaccaatgcccacaatggggcctctgtcaaaagtgccccgtttctaa

SEQ ID NO: 17614 - protein, 543 aa, Oryza sativa subsp
MADPPSAAATASPQPDQLAAAAVSTPQNPNPNPLLSPQIPPSPTVSDLSAISSPQLDPSAAGGGAMDYPPRPPQMQAPSPGQAAAGAGGFGQIHRSGSGSRLAAVGQLPQYAAAAARMYGSQVNFSGGGGQVGQQQQQQQQLAARAAMLSQGQIGMLQGQGNAASAAHYGLQSQMMAQPRQKGMVQGAQFNTANAAQALQGMQSMGVMGGMRGNGTIPYNQQRFAHAQAQLRPQQTSQQGTLSPQKVVGQGLTRTASIAALNPQLPGSSTNGPMAQMSLPQKQQQAAWLKQMQSSLGSPVSPQQFQHQQRMLLIHQLQQQSGLNQHQIAQTQQQHPHLNTQLLQQQHILQQLQQQQQSPRISASGSQKSMNLTGSQPGTPLSGGTMTGGSASQGAEVTNQLLGKRKIQDLVSQVDPLGKVDPEVEDLLLEIADDFIDSVTAFACTLAKHRKSSVLEAKDVLLHLEKNWHLSVPGFLREDKNPQRHPVKVSVDPQQPECDAAGIRSTGNKLVINNSVANHQTRPPVTEPSPMPTMGPLSKVPRF

SEQ ID NO: 17615 - DNA, 1554 bp, Oryza sativa subsp
  CDS (1)..(1554)
atgccagctaccatgtatgaaatgcaatctagaacctcatttagtccaagcagggagaacactatgttatctcaaagacataatcgatacgaagagttacctgacacatggtacaaacaatatgctgaaaaattcaggacatggcatggcaagttccgttcaggtgacaaagatataccaaaaagaacatcagagggaatgtccaattacctgaaggtttgcagtgtgcataaaaggaagagggctgtgtttatggatgatcagggtcacaacatctcagtcccaatgtcggaaaatggcccttcctcaaagaatgctggggactatagtaatttaacagatgatactttcattccagaaattaggtttccagctgactgtgtcccggaaagcgcaattcctagaacaagtgagacgtctaggatctacaaaatagaagttcatggggttcttgataatttaccggcgcctgttagtcgcaacactgcaatgcttgaaagatttggaatgatgcctgagtattataagaaagggaacaaatatcgagggaaagatggatccagagtagaaggaaaatctctaagccaagaacaagcaatgcttatgacaaggaagttggttgctcgctacttggcaaatgcaggatttgaaagtggaactgcaactgttggctacagtaacattggccccttgatggaaatcactaaaacgacaaatagaggggccaactaccctatgcagcaagatgcacaagtgcaaaatcaaaatgctcttcttcatgcacaacagctttcgaggcaatttgcaccccaaatgggaattaatacacagaatttgacaccacagcagcagcagcaactgctgcagcaacagtggttgaggcgcaatcaactggccagcccccgtggtcctcttacgatggcggacaaaaaccaggctatggtaaatgtgaagattgagaatacggtggactcacagattgatagcccctacggatcacttaccagacaacaattgcagcagctaaggcaccatcagcttctacagcagcagcagcagcagtttcagcagcaacagcaagttcaacagcagcagcaacaacaacaacaacaatttcaacaccagcagcaacaacagcagcagcaatttcaacaacagcatcagcagcagcaacaatcacagcaattgcaacaacagcatcagcagcagcaacaaccacaacaattgcagcagcagcatcagcagcaattggccatgtcaggaggccagaatgcccaactagcgcagcagctagcaatgtcaggaggccagaatgcacaactagcgcagcaattagccatgtcaggaggccagaatgcgcaactagctcagcaattagccatgtcaggaggccagaacccccaattagcacagcaatacaaacaaatgccatcgatgagtgcgtacggcatgaggatgccgccggtgaaagtggaagcgttccacgagctggtgagtggagattcgtctctgaaacccgatagcgactcaaacaaactcatgtctcccaagtag

SEQ ID NO: 17616 - protein, 517 aa, Oryza sativa subsp
MPATMYEMQSRTSFSPSRENTMLSQRHNRYEELPDTWYKQYAEKFRTWHGKFRSGDKDIPKRTSEGMSNYLKVCSVHKRKRAVFMDDQGHNISVPMSENGPSSKNAGDYSNLTDDTFIPEIRFPADCVPESAIPRTSETSRIYKIEVHGVLDNLPAPVSRNTAMLERFGMMPEYYKKGNKYRGKDGSRVEGKSLSQEQAMLMTRKLVARYLANAGFESGTATVGYSNIGPLMEITKTTNRGANYPMQQDAQVQNQNALLHAQQLSRQFAPQMGINTQNLTPQQQQQLLQQQWLRRNQLASPRGPLTMADKNQAMVNVKIENTVDSQIDSPYGSLTRQQLQQLRHHQLLQQQQQQFQQQQQVQQQQQQQQQQFQHQQQQQQQQFQQQHQQQQQSQQLQQQHQQQQQPQQLQQQHQQQLAMSGGQNAQLAQQLAMSGGQNAQLAQQLAMSGGQNAQLAQQLAMSGGQNPQLAQQYKQMPSMSAYGMRMPPVKVEAFHELVSGDSSLKPDSDSNKLMSPK

SEQ ID NO: 17617 - DNA, 1977 bp, Medicago truncatula
  CDS (1)..(1977)
atggctacaccaccatcaacaatggcgcaaaacatgatcagttcacaacaatccacaattgacacacaaactcaaaaccccatttcttcaaaccctacaatcccatctccttcaccaattccccaacagttacctgccatcatcaatcttaaccctagccctaaccctaatgttcccagttttcaaattcaacctctgcagcagcaagttgcggtgcagcaagccggactttacggtgggctgatgaatttcggtggatcagctgctgttcctgatcagcaacagcaattatctggaagtgtcggtgttggcgtcggaggcaacgcctctaacttgtctggtgctggagcaactcagtttaacctgttaacctcgccgggacagaaagttggtttggtgcaaacctcacaactttcttctgcgaattctgctggacagtcactgcaaggaatgcaacaagccattgggacgttggggtcgtccaatctagcttctcaactgatgactactaatagatctctttatggtcagaagcagcagctcgcgcaacaggcttcacttaacaatcaacaggctcagcaacagcaattagccggaggcgtcggtgtttgcattggcagcggtcctttcaattttggagggtcagctgttgttactgctcagcaacaacaattagccggaggcgttggtcttggcattggaggcaacacctctagcttgtcacagtcggcgttagctggaccgagtggtcccttccccaagttgtctggtgccagtgcaacacagtctaaccaattaacctcgccggggctgcaagttggtttggtgcaatcctcgcaattttcttcggggaattttgctggacagtcactgcaaggaacacaacaagccattgggaccatggggtcgtccaatctagcctctcaactgatgacgactaatggagctctttatgctcagcagctgcaactctcacagcaggctccgtttaacaatcaacagttggttgggttgcctcagagtggacagcctgccatgatacagaatcagttgcttaagcaaataccagcagtgtctggctctgcctccttgttgccccttcaacaacctcagagtcagcaacagctggcttcatctgctcaacttcaacaaagctctttgaccctgaaccaacagcaattgcctcagttgatgcagcagccgaaacccatggggcaaccgcagcttcagcagcagctacaacatcaacaacttctacagcagcagctacagctacaacaacaatatcagaggctgcaacaacagctggcttcatctgctcaactgcaacaaaactctttgaccctcaaccaacagcaattgcccttgttgatgcagcagccgaaatccatggggcaacctctgcttcagcagcagcagcaacaacttctacagcagcagctacagttacaacaacaatatcagaggttgcaacaacagctagcttcatctgctcaactgcaacaaaactcttcgaccctgaaccaattgccccagttgatgcagcagcagaaatccatggggcaacctctgcttcagcagcagctacaacaacaacaacttctactgcagcagcaacaactagttctacaacagcagcagcagcaacagcaacaacaacgaactcaacttctgcagcagcagatgcaggctctgaggattccaggacctgcaggtcataagtcactaagtttaacaggatctcagcctgaggctactgcatttggcatgaccacacctggcggaagtttaagtcaaggaaccagaacaaatgccatgtttggacaaactgaaatcatgtctgttgtgaatgaattgaaagaaacaagaaaggaagtcaaggctattatcaagatcctgctgaggtttttcaaggtcatttccattgttatggctttgttcattttcgtaactctttttgttgttttaatcaagtaa

SEQ ID NO: 17618 - protein, 658 aa, Medicago truncatula
MATPPSTMAQNMISSQQSTIDTQTQNPISSNPTIPSPSPIPQQLPAIINLNPSPNPNVPSFQIQPLQQQVAVQQAGLYGGLMNFGGSAAVPDQQQQLSGSVGVGVGGNASNLSGAGATQFNLLTSPGQKVGLVQTSQLSSANSAGQSLQGMQQAIGTLGSSNLASQLMTTNRSLYGQKQQLAQQASLNNQQAQQQQLAGGVGVCIGSGPFNFGGSAVVTAQQQQLAGGVGLGIGGNTSSLSQSALAGPSGPFPKLSGASATQSNQLTSPGLQVGLVQSSQFSSGNFAGQSLQGTQQAIGTMGSSNLASQLMTTNGALYAQQLQLSQQAPFNNQQLVGLPQSGQPAMIQNQLLKQIPAVSGSASLLPLQQPQSQQQLASSAQLQQSSLTLNQQQLPQLMQQPKPMGQPQLQQQLQHQQLLQQQLQLQQQYQRLQQQLASSAQLQQNSLTLNQQQLPLLMQQPKSMGQPLLQQQQQQLLQQQLQLQQQYQRLQQQLASSAQLQQNSSTLNQLPQLMQQQKSMGQPLLQQQLQQQQLLLQQQQLVLQQQQQQQQQQRTQLLQQQMQALRIPGPAGHKSLSLTGSQPEATAFGMTTPGGSLSQGTRTNAMFGQTEIMSVVNELKETRKEVKAIIKILLRFFKVISIVMALFIFVTLFVVLIK

SEQ ID NO: 17619 - DNA, 1716 bp, Medicago truncatula
  CDS (1)..(1716)
atggcggaaaacgtaattggttcaccggattctcaaattcagaacccctcttcttcaaacccttcaatcccatctccttcaccaatctctcaacaacaacaatctccttcaattcacatgtcaaattcatcaccatctctctctcaagatcaacaacagttacacaccatcaataccattaaccctaactccaattttcaacttcaacaaacgctacaacgttctccttctatgtcccgccttaatcaaattcaacctcagcagcagcagcaagttgttgccaggcagcaagctgcactttatggtgggcagatgaattttggaggatcagctgctgtctctgctcagcaacagcaattaagcggcggcgttgctgccatgggtggcagtgcttccaatttgtcgcgatcggcgttgattggacagagtggtcattttcctatgttgtctggtgctggagctgcacagtttaacctattaacctcgccgaggcaaaaaggtgggatggtgcaatcctcacaattttcttcggcgaattctgctggacaatcactgcaaggaatgcaacaagctattgggatgatggggtcgcccaatctagcctctcaaatgaggaccaatggaggtctttacactcagcagcagcagattcgattgactccagcccaaatgaggcagcagctctcacagcaggcacttaacagtcaacaggttcaaggtataccaaggtcatcatcccttgcttttatgaattctcagttgtctgggttgtctcagaatgggcagcctggcatgatgcataactctttaacacagagtcagtggcttaagcaaatgccagcaatgtctggccctgcctccccgctgcgtcttcaacaacatcagaggcagcaacagcagctggcttcatctggtcaactgcaacaaaactctatgaccctgaaccaacagcaattgtcccagtttatgcagcagcagaaatccatggggcaacctcagcttcatcagcagcagccatcccctcagcagcagcagcaacaacaacttctacagccacaacaacaatctcaactacaagcatctgttcatcaacagcaacatctgcactctcctagggtggcaggacctacaggtcaaaagtcaataagtttaacaggatcgcagccagatgctactgcatctggtgcgaccacacctggcggaagttcaagtcaaggaactgaagcagctacaaaccaagtacttggaaagagaaaaatacaggatttagttgcacaggtggatccacagggtaagctggaccctgaagttatagatcttcttttagagtttgccgatgacttcattgattctgtaactacacacggttgtattttggcaaaacatagaaaatcatcaactttggagtccaaggatttattgctacacctagagaaaaattgggatttgacaattcctggatattcaagtgaagagaagaagtaccagagtagacctctctccaatgagcttcacaagagacggctagatgcggttcgcatgttgatggaatcctcttcagtcccggaatcaattgttaacaattctaaagatatcagtagacagggccatcccaaccctgcaggttcccatcatctaatgagacccctgagttcagaccagctggtttctcattcaactagttctcaaatgctacagcagatgacaaggttttag

SEQ ID NO: 17620 - protein, 571 aa, Medicago truncatula
MAENVIGSPDSQIQNPSSSNPSIPSPSPISQQQQSPSIHMSNSSPSLSQDQQQLHTINTINPNSNFQLQQTLQRSPSMSRLNQIQPQQQQQVVARQQAALYGGQMNFGGSAAVSAQQQQLSGGVAAMGGSASNLSRSALIGQSGHFPMLSGAGAAQFNLLTSPRQKGGMVQSSQFSSANSAGQSLQGMQQAIGMMGSPNLASQMRTNGGLYTQQQQIRLTPAQMRQQLSQQALNSQQVQGIPRSSSLAFMNSQLSGLSQNGQPGMMHNSLTQSQWLKQMPAMSGPASPLRLQQHQRQQQQLASSGQLQQNSMTLNQQQLSQFMQQQKSMGQPQLHQQQPSPQQQQQQQLLQPQQQSQLQASVHQQQHLHSPRVAGPTGQKSISLTGSQPDATASGATTPGGSSSQGTEAATNQVLGKRKIQDLVAQVDPQGKLDPEVIDLLLEFADDFIDSVTTHGCILAKHRKSSTLESKDLLLHLEKNWDLTIPGYSSEEKKYQSRPLSNELHKRRLDAVRMLMESSSVPESIVNNSKDISRQGHPNPAGSHHLMRPLSSDQLVSHSTSSQMLQQMTRF

SEQ ID NO: 17621 - DNA, 2115 bp, Macrobrachium rosenbergii
  CDS (1)..(2115)
atggacgatgatgccgacgaaaaagatgacgttaagaggaaatctcgcaacctgtcggaaaagaagcgccgcgatcagtttaacctcctcatcaacgaactgtccagtatggtggcttccaacaaccgtaagatggacaagtccactgtcctcaaggccaccatcgcatttctcaagaaccaaaaagagatctccgtgcgaacccaaagtaacgaaattcgtgaggactggaaaccgtcctttctgtccaacgaagaatttactcaccttatgcttgaggcgctggatggcttcatcatgacagtgtcgtgctccggccgagtcttatatacctccgagtcaatcacccccttaatcggtcaccttccgagtgatctagcggggaccccgttatatgacttgatgttggaggaggagagaggggaaatgagaagatttctctctaaccctgctctagcgcccaatcctagtacctgtttcgacaatacaaaagaaaaatatacaatagcggtccatctcagaagagggacaataaactcatcggatgccacaaattatgagcgagtgcacttaatgggatattttgaacgttatagcggtccgagtgaagatggcgttttggacttcagctgcagcgaggctgaagattcggtatcagttagtagctgtagtagaagtatgttcggtggtaatgccgggggaggagttactggtagcagtaatgctggttctggtctctgtcagagctctcttgtacagactaatccatctcaggaacctacgaagctagtgtttgtggctattggtcgactggaacggccacagctggttagggaaatgatgataatagaaccaagtaaaacagaatttacttcaagacacagtttagaatggaaatttctttttctagaccacagagctcctaccatcattggctaccttccatttgaagtgttaggaacttcggggtatgactattatcacgtagaagatctggacaaagtcgcatcatgccatgaacaattaatgaagactggaaagggaacatcttgttactacagattcttgaccaaaggacaacaatggatatggttgcaaacccagtattacattacttatcatcagtggaactccaagccagaattcattgtttgtaccaatacagttgtaagttacagtgatgtgaaagcagaacttgtaaaggagcaaatgcccaatggattatctgaacttgaaattaatcagtcagaaagtagtatgggactcagtggtgcaggaccgtctggtacaaattctatgtctggtcaaactggtgtaggggtgggagtgtctgtatcagtttctggtgtacaggaacatagccagtctcagctctcagaggaggacactagtttgcagccagctagaacacctcaacctggcccttctcatttactcttacagcatcaacaccaagaacataatattccacaaactcacctacctctcacacaaaatcagcaacagcatattcaacatctacagcagcaacagcagcagcaacagcagcagcagcagcagcagcaacagcaacagcagcagcagcagcagcagcaacagcaacagcagcagcagcaacaacaacaacaacaacaacaacagcagcagcaacaacaacaacaacagcagcagcagcagcagcagcaacagcaacaacaacaacaacagcagcagcagcagcaacaacaacaacaacaacagcagcagcagcaacagcagcagcaacaacaacagcagcagcagcaacaacagcaacagcagcaacaacaacagcagcagcagcagcagcaggagcagcagcagcagcagcaccagcaacaacaacaacaacagcagcagcaacaacagcaacagcaacagttacaacagcagcagttacaacagcatctacaacagcagcaacacatgacacagtgtatgccgcaacaaacactacaattagcagcccccagctccccctcctccaaaatctcctgtagtccatcatcaaaacagacagcaagaaggtggtgtagcaagattacgagatactttaaatgtcgcacaacaatctcctggcccagtgtctccaaatag

SEQ ID NO: 17622 - protein, 704 aa, Macrobrachium rosenbergii
MDDDADEKDDVKRKSRNLSEKKRRDQFNLLINELSSMVASNNRKMDKSTVLKATIAFLKNQKEISVRTQSNEIREDWKPSFLSNEEFTHLMLEALDGFIMTVSCSGRVLYTSESITPLIGHLPSDLAGTPLYDLMLEEERGEMRRFLSNPALAPNPSTCFDNTKEKYTIAVHLRRGTINSSDATNYERVHLMGYFERYSGPSEDGVLDFSCSEAEDSVSVSSCSRSMFGGNAGGGVTGSSNAGSGLCQSSLVQTNPSQEPTKLVFVAIGRLERPQLVREMMIIEPSKTEFTSRHSLEWKFLFLDHRAPTIIGYLPFEVLGTSGYDYYHVEDLDKVASCHEQLMKTGKGTSCYYRFLTKGQQWIWLQTQYYITYHQWNSKPEFIVCTNTVVSYSDVKAELVKEQMPNGLSELEINQSESSMGLSGAGPSGTNSMSGQTGVGVGVSVSVSGVQEHSQSQLSEEDTSLQPARTPQPGPSHLLLQHQHQEHNIPQTHLPLTQNQQQHIQHLQQQQQQQQQQQQQQQQQQQQQQQQQQQQQQQQQQQQQQQQQQQQQQQQQQQQQQQQQQQQQQQQQQQQQQQQQQQQQQQQQQQQQQQQQQQQQQQQQQQQQQQEQQQQQHQQQQQQQQQQQQQQQQLQQQQLQQHLQQQQHMTQCMPQQTLQLAAPSSPSSKISCSPSSKQTARRWCSKITRYFKCRTTISWPSVSK

SEQ ID NO: 17623 - DNA, 2456 bp, Solanum tuberosum
  CDS (113)..(2029)
ccacagtccccaaaatccccaaactgaaaattcaaagtttccgatgactctgttgatctgaattccgttcagtcgacgaatcatcatcatcacaacaccaaccgataaacaaatggctgaaattccgtcatcttcaccaaaattaactcaaccatcgaaccctataatggataccacaaaccaagtatccgccgccggagctgcatcgtcggcgacgtcgtctaatcccggaattacgatgacttctccgtctaacaacaattcaatcgcacaatcgccttcaattgacctccctcaaatcccgttaacccaatctcagcaacagcagcagcagcatcaaattcagatgcagcagcctcaacaaatgcagcagcagcagcagcaattgacacaatctcaacaacagcagcaaatgcagctccagcagcagcagaataattcgagtaatcttaacggcagtaacagcaacttgatgtccgcctctaattttcagatgcagcaaaacttgcagagatcaccctcaatggcgagaatgagtcaattgcaaatgcaacagcagcaacaacaatttggtttgatgaggcagcaatcaggaggactttatggtcaaatgaattttggggttggaggtacttcgctccagcaacagcaacaacaacaattacaacagcagcaacagcaattgcagcaacaatttcaacaacagcaacagcagcagcaacaacagaaccaacagcagcagcaaataggtggtcagatgggtagcggaaatttagctagggcagctttaatgggacagacgggccatctgcccatgttatctggacaagctgctgttgcagcagcggctgttgcccagttcaatttgcaatctcaatttttgaattcgccacgacagaaggcgggtctaatgcaggggaatcaattccatacagggaattcccatggccagtccttacaggcaatggggatgatgggatctctcaacatgagctctcagctaagggcaaacggggccctggcatatgcacaaagggtgaatcaaagtcagctgaggcaacagcagttgtcccagcaaaattctctcaccactactcagaaaatatcggctcagagtcttccaaggacgtcatttgctaactctcagttacctgggttgactcagaatggacaatctgcaattatgcagaacaattcatcacagcagcagtggttgaagccaatgcctgcgatttctactcctaattccccttcctttcgtcttcaacagcaaaggcagcaaatgcttctacaacaccaaaactcaatgggtttgaacccacaacaactatcccaaattgtacaacagcagcaacagattgggcaccctcagatgcatcaacagcaacagcagcagcaacaacaacagcagctttcacatcagcagcaatcttccccgaggatggctgctccagctggccaaaaatctttgagtttaactggatcacaaccagatgctactggatccggaacaactactccggggggaagttcaagtcaggggactgaagcaagcaatcagcttcttggaaagagaaagatacaggatttggtttcacaggtggatgcgcagggaaagcttgatcctgaagttgaagatcttcttctagagattgctgatgacttcattgattcggttactacatttgcttgcaatttggcgaagcatcggaaatcttcaactttggagtccaaggatgtactgctacatctagagaaaaactggcacttgactattccaggcttctcaagtgaagagaggaaacactatccagaaaattcatcaagtgatctccacaaaaagcgtttggatgtgatacgtaccttgatggagacctcacaaacagaaacaagtacaaatagtagtgctaaggaaaccgtcagaccaggggcgggtgaatcaaatcacatgatcagacctccaagttcagacaacatggtttcacagtctaatgcttctcaaatgttgcatgagatgacaaggttttgatggtccctggagttcttggtgtatctcccgtgttaactgtacagaccttgatgatcaagaaatgggaggcataggttatataggtgtagcataatggaagtttttacaagacgttggaggcatctaaaggaacattgcagtatgaaccaccaatagttgaatggttttgaagggcctgtaattacgcagtttagtttacagtagctagctaattcagcctgtgaggatgaagttgctcaaatttggtttctccaccatacccctctggaaaacatgtttactagtcctgtaaattaattcctgataccaaagaatgaggttaagttctttgttttcccctttatcatggttgaaacgctgtatcaaacaggttttatgatgttacaaatcacaaacgtttttcttttcaaaaaaaaaaaaaaaaaaa

SEQ ID NO: 17624 - protein, 638 aa, Solanum tuberosum
MAEIPSSSPKLTQPSNPIMDTTNQVSAAGAASSATSSNPGITMTSPSNNNSIAQSPSIDLPQIPLTQSQQQQQQHQIQMQQPQQMQQQQQQLTQSQQQQQMQLQQQQNNSSNLNGSNSNLMSASNFQMQQNLQRSPSMARMSQLQMQQQQQQFGLMRQQSGGLYGQMNFGVGGTSLQQQQQQQLQQQQQQLQQQFQQQQQQQQQQNQQQQQIGGQMGSGNLARAALMGQTGHLPMLSGQAAVAAAAVAQFNLQSQFLNSPRQKAGLMQGNQFHTGNSHGQSLQAMGMMGSLNMSSQLRANGALAYAQRVNQSQLRQQQLSQQNSLTTTQKISAQSLPRTSFANSQLPGLTQNGQSAIMQNNSSQQQWLKPMPAISTPNSPSFRLQQQRQQMLLQHQNSMGLNPQQLSQIVQQQQQIGHPQMHQQQQQQQQQQQLSHQQQSSPRMAAPAGQKSLSLTGSQPDATGSGTTTPGGSSSQGTEASNQLLGKRKIQDLVSQVDAQGKLDPEVEDLLLEIADDFIDSVTTFACNLAKHRKSSTLESKDVLLHLEKNWHLTIPGFSSEERKHYPENSSSDLHKKRLDVIRTLMETSQTETSTNSSAKETVRPGAGESNHMIRPPSSDNMVSQSNASQMLHEMTRF

SEQ ID NO: 17625 - DNA, 2205 bp, Arabidopsis thaliana
  CDS (1)..(2205)
atggcggaaccgattccctcatcgtctctgtcaccgaaatctctacaatctcctaatcctatggaaccttctcctgcatcttctactcctttaccttcatcatcatctcaacaacaacaactcatgacagctccgatttccaattctgttaattccgctgcgtctccggcgatgactgtaactaccaccgaaggtattgtaattcagaacaattcgcaacctaacatctcctctcccaaccctacttcttctaacccaccaatcggagctcagatcccgtcgccttctcctctctctcacccttcttcatctttagatcagcaaacacagactcagcaactcgttcaacaaactcagcaattgcctcaacaacaacaacagattatgcagcaaatctcttcatctccgattccacaattatcgccgcaacagcaacagattctgcagcaacaacacatgacttcacagcaaatcccaatgtcgagttaccaaattgctcaatctcttcagcgatccccttctctttctcgcctgagccaaattcagcaacaacagcagcagcagcatcaaggtcaatacggcaacgtgttgagacagcaagctggtttgtacggaaccatgaactttggtggctcaggttcagttcaacagagccagcagaatcagcagatggttaaccctaatatgtccagagcaggtttagttggccaaagcggtcacttgcctatgcttaacggtgctgctggagctgctcagatgaatattcaaccccaattattggctgcttcgaaatctggcatggttcaaggttcgcagtttcatccgggaagttctggacaacagttacaagggatgcaagctatgggaatgatgggatcactgaatttgacctcgcaaatgagaggtaaccctgctctctatgcgcagcagagaatcaacccggggcagatgagacagcaattgtcacagcaaaacgctcttacttcacctcaggtccagaacctccagagaacatcttctctcgcatttatgaatcctcagctatcgggtttggcccagaatggacaagctggcatgatgcaaaactctttgtcacagcagcaatggctgaagcaaatgtcgggaataacgagccccaattcattccgactccaaccgagtcaaagacaggctcttctcttacagcagcagcagcagcaacaacaacaactgtcctctcctcagttacatcaatcttctatgtccttgaatcagcagcagatatcacagataatacaacagcagcagcaacaatcacaattaggccagtcgcagatgaaccaatcccattcccaacaacaactacaacagatgcagcagcaactacagcagcaaccacaacagcagatgcagcagcagcagcaacaacaacagcaaatgcagattaatcaacaacagccatctccaaggatgttgagtcatgcaggacaaaaatctgtcagtttaacgggttcacaaccagaggctacacaatcgggtacaacaacaccaggtggtagctcaagccagggaacagaagcaacaaaccaactccttggtaaaaggaagatacaggatctggtttcgcaggtggatgtacatgcgaaactggatcctgatgttgaagacctccttttggaggtggcagatgacttcattgattcggtcacatcttttgcatgtagcttggctaagcatcgtaaatcatctgtattggagcccaaggatatattactccacctagagaaaaacttgcacttgacaattcctggattctcaagtgaggataaacgtcaaacaaaaactgtaagtgcgtgcattactagaatcctcaaaaccagagacgaatgcaagcaattccaaggaaactatgagacaagcgatggtgaacccaaatggtccgaatcatctcttaagaccctcccaaagttcagaacaattggtttcgcagacatccggttgcaggagtttacacatctatggagagttgaaggcacaagtagtgaaactgtatgtattatatataaaattcatgagtcttataggcaatcaaataatacagttatttttttcgtagttgtgggactttctaactatttcgtcttcttttttagtgggtttttgttttttccttttgtaattttagttgtcctctccattttaagcttgaaagttttagctctttga

SEQ ID NO: 17626 - protein, 734 aa, Arabidopsis thaliana
MAEPIPSSSLSPKSLQSPNPMEPSPASSTPLPSSSSQQQQLMTAPISNSVNSAASPAMTVTTTEGIVIQNNSQPNISSPNPTSSNPPIGAQIPSPSPLSHPSSSLDQQTQTQQLVQQTQQLPQQQQQIMQQISSSPIPQLSPQQQQILQQQHMTSQQIPMSSYQIAQSLQRSPSLSRLSQIQQQQQQQHQGQYGNVLRQQAGLYGTMNFGGSGSVQQSQQNQQMVNPNMSRAGLVGQSGHLPMLNGAAGAAQMNIQPQLLAASKSGMVQGSQFHPGSSGQQLQGMQAMGMMGSLNLTSQMRGNPALYAQQRINPGQMRQQLSQQNALTSPQVQNLQRTSSLAFMNPQLSGLAQNGQAGMMQNSLSQQQWLKQMSGITSPNSFRLQPSQRQALLLQQQQQQQQQLSSPQLHQSSMSLNQQQISQIIQQQQQQSQLGQSQMNQSHSQQQLQQMQQQLQQQPQQQMQQQQQQQQQMQINQQQPSPRMLSHAGQKSVSLTGSQPEATQSGTTTPGGSSSQGTEATNQLLGKRKIQDLVSQVDVHAKLDPDVEDLLLEVADDFIDSVTSFACSLAKHRKSSVLEPKDILLHLEKNLHLTIPGFSSEDKRQTKTVSACITRILKTRDECKQFQGNYETSDGEPKWSESSLKTLPKFRTIGFADIRLQEFTHLWRVEGTSSETVCIIYKIHESYRQSNNTVIFFVVVGLSNYFVFFFSGFLFFPFVILVVLSILSLKVLAL

SEQ ID NO: 17627 - DNA, 2025 bp, Arabidopsis thaliana
  CDS (1)..(2025)
atggcggaaccgattccctcatcgtctctgtcaccgaaatctctacaatctcctaatcctatggaaccttctcctgcatcttctactcctttaccttcatcatcatctcaacaacaacaactcatgacagctccgatttccaattctgttaattccgctgcgtctccggcgatgactgtaactaccaccgaaggtattgtaattcagaacaattcgcaacctaacatctcctctcccaaccctacttcttctaacccaccaatcggagctcagatcccgtcgccttctcctctctctcacccttcttcatctttagatcagcaaacacagactcagcaactcgttcaacaaactcagcaattgcctcaacaacaacaacagattatgcagcaaatctcttcatctccgattccacaattatcgccgcaacagcaacagattctgcagcaacaacacatgacttcacagcaaatcccaatgtcgagttaccaaattgctcaatctcttcagcgatccccttctctttctcgcctgagccaaattcagcaacaacagcagcagcagcatcaaggtcaatacggcaacgtgttgagacagcaagctggtttgtacggaaccatgaactttggtggctcaggttcagttcaacagagccagcagaatcagcagatggttaaccctaatatgtccagagcaggtttagttggccaaagcggtcacttgcctatgcttaacggtgctgctggagctgctcagatgaatattcaaccccaattattggctgcttcgccgaggcagaaatctggcatggttcaaggttcgcagtttcatccgggaagttctggacaacagttacaagggatgcaagctatgggaatgatgggatcactgaatttgacctcgcaaatgagaggtaaccctgctctctatgcgcagcagagaatcaacccggggcagatgagacagcaattgtcacagcaaaacgctcttacttcacctcaggtccagaacctccagagaacatcttctctcgcatttatgaatcctcagctatcgggtttggcccagaatggacaagctggcatgatgcaaaactctttgtcacagcagcaatggctgaagcaaatgtcgggaataacgagccccaattcattccgactccaaccgagtcaaagacaggctcttctcttacagcagcagcagcagcaacaacaacaactgtcctctcctcagttacatcaatcttctatgtccttgaatcagcagcagatatcacagataatacaacagcagcagcaacaatcacaattaggccagtcgcagatgaaccaatcccattcccaacaacaactacaacagatgcagcagcaactacagcagcaaccacaacagcagatgcagcagcagcagcaacaacaacagcaaatgcagattaatcaacaacagccatctccaaggatgttgagtcatgcaggacaaaaatctgtcagtttaacgggttcacaaccagaggctacacaatcgggtacaacaacaccaggtggtagctcaagccagggaacagaagcaacaaaccaactccttggtaaaaggaagatacaggatctggtttcgcaggtggatgtacatgcgaaactggatcctgatgttgaagacctccttttggaggtggcagatgacttcattgattcggtcacatcttttgcatgtagcttggctaagcatcgtaaatcatctgtattggagcccaaggatatattactccacctagagaaaaacttgcacttgacaattcctggattctcaagtgaggataaacgtgcgtgcattactagaatcctcaaaaccagagacgaatgcaagcaattccaaggaaactatgagacaagcgatggtgaacccaaatggtccgaatcatctcttaagaccctcccaaagttcagaacaattggtttcgcagacatccggtcctcacatattacaacacatgacacgatactaaaggacttgaatatagaagcctga

SEQ ID NO: 17628 - protein, 674 aa, Arabidopsis thaliana
MAEPIPSSSLSPKSLQSPNPMEPSPASSTPLPSSSSQQQQLMTAPISNSVNSAASPAMTVTTTEGIVIQNNSQPNISSPNPTSSNPPIGAQIPSPSPLSHPSSSLDQQTQTQQLVQQTQQLPQQQQQIMQQISSSPIPQLSPQQQQILQQQHMTSQQIPMSSYQIAQSLQRSPSLSRLSQIQQQQQQQHQGQYGNVLRQQAGLYGTMNFGGSGSVQQSQQNQQMVNPNMSRAGLVGQSGHLPMLNGAAGAAQMNIQPQLLAASPRQKSGMVQGSQFHPGSSGQQLQGMQAMGMMGSLNLTSQMRGNPALYAQQRINPGQMRQQLSQQNALTSPQVQNLQRTSSLAFMNPQLSGLAQNGQAGMMQNSLSQQQWLKQMSGITSPNSFRLQPSQRQALLLQQQQQQQQQLSSPQLHQSSMSLNQQQISQIIQQQQQQSQLGQSQMNQSHSQQQLQQMQQQLQQQPQQQMQQQQQQQQQMQINQQQPSPRMLSHAGQKSVSLTGSQPEATQSGTTTPGGSSSQGTEATNQLLGKRKIQDLVSQVDVHAKLDPDVEDLLLEVADDFIDSVTSFACSLAKHRKSSVLEPKDILLHLEKNLHLTIPGFSSEDKRACITRILKTRDECKQFQGNYETSDGEPKWSESSLKTLPKFRTIGFADIRSSHITTHDTILKDLNIEA

SEQ ID NO: 17629 - DNA, 1644 bp, Zea mays
  CDS (1)..(1644)
atggcggatccgccgcccgtggctgcctccgccttgccggcgcagcccgaccaggtcgccgcctccgtgtccaccccgcagaaccccaaccctaaccccctcctctccccccaaatccccccgtccccgaccgtctccgacctctccgcgcacatctcgtcccctcagcagctcgacccggtggctgcggcagctgccgcttcgggcggcgggggatccatggattaccccccgcgcccgccgcagctgcaggcgccttcgcccacgcaggcggggcccggcgccgccgggtttggccagatcccccgctcggggtcggcctcacgcctctccacggccagccagctccagcagtacgcggctaggatgtacggcgggcagatgagcttctcgggtggcggaggtctcgtgggccaacagcagcagctggcggggcgcacccccgtgcttgggcagggccagctggggatgctgcaaggccagggtaacgcgggatctgcggcacattttgggcttcagtcgcagatgatggcgcaggctaggcaaaagggcatggcacaaggcacccaattgaataatgctaatacagctcaagcgctacaagggatgcagcacatgggtgtcatgggtactatggggatgaaccagatgagaccaaatggaactattccctatggtgctcaacaaaggttcgcccatgcgcaaatgagaccacaagcgtctcaacaacctgcactgtctccacagaaggtgcctggtcaaggtctgtcgaggacagcatcaattgcagcattaaattcacaactgtctggatcatcacaaaatggacagatggtggcaatgtctatgcctcagcaacagcagtggttgaagcaaatacaatcatccatgggctcaccagtttccccacagcaacaatatcagcagcagaggctcctgtttatgcagcaactgcagcagaagacaggattgagccaacaacaacttctccaaatccaacaacagcatccacatctcactgcccaacagctgattcagcagcaacaaattttgcagcagtttcagcagcagcaactgctacaatctccgcgtgtttcagcatctggttcacagaagtctgcgaaccttacaggctcgcagccgggtacaccattgtcaggtggaaccatgactggtggaagtgcaagtcagggagctgaaggaactagccaacttcttgggaaaagaaaaatacaagatctggttgcacaggtagatcccctaggcaaggttgaccctgaagtggaggatttacttctagaaatcgctgatgacttcattgactcggtgactgcatttgcgtgtaccttggcaaagcacaggaaatcatcagttgtcgaagccaaggatgtgttgctgcacttagaaagaaattggcatttatctgttcctggtttctcaagggaggataagaatccccaaagaaattctgtaaagccattggtagatccccaacaatcagaaagtgacgttactggtattagaggtacaagcaataaactagctgctaataactcggttggcaaccatcaaatacgacctccaatggcagaaacttcggctgtgtcaacagtgggctctctatcgaaagcccctcgcttctaa

SEQ ID NO: 17630 - protein, 547 aa, Zea mays
MADPPPVAASALPAQPDQVAASVSTPQNPNPNPLLSPQIPPSPTVSDLSAHISSPQQLDPVAAAAAASGGGGSMDYPPRPPQLQAPSPTQAGPGAAGFGQIPRSGSASRLSTASQLQQYAARMYGGQMSFSGGGGLVGQQQQLAGRTPVLGQGQLGMLQGQGNAGSAAHFGLQSQMMAQARQKGMAQGTQLNNANTAQALQGMQHMGVMGTMGMNQMRPNGTIPYGAQQRFAHAQMRPQASQQPALSPQKVPGQGLSRTASIAALNSQLSGSSQNGQMVAMSMPQQQQWLKQIQSSMGSPVSPQQQYQQQRLLFMQQLQQKTGLSQQQLLQIQQQHPHLTAQQLIQQQQILQQFQQQQLLQSPRVSASGSQKSANLTGSQPGTPLSGGTMTGGSASQGAEGTSQLLGKRKIQDLVAQVDPLGKVDPEVEDLLLEIADDFIDSVTAFACTLAKHRKSSVVEAKDVLLHLERNWHLSVPGFSREDKNPQRNSVKPLVDPQQSESDVTGIRGTSNKLAANNSVGNHQIRPPMAETSAVSTVGSLSKAPRF

SEQ ID NO: 17631 - DNA, 20 bp, Artificial sequence
  primer
atggcggaaccgattccctc

SEQ ID NO: 17632 - DNA, 28 bp, Artificial sequence
  primer
ttagtatcgtgtcatgtgttgtaatatg

SEQ ID NO: 17633 - protein, 686 aa, Artificial sequence
  consensus sequence
  Variant (3)..(74): Xaa in position 3 to 74 is any amino acid
  Variant (75)..(171): Xaa in position 75 to 171 is any or no amino acid
  Variant (173)..(173): Xaa in position 173 is any amino acid
  Variant (175)..(189): Xaa in position 175 to 189 is any amino acid
  Variant (190)..(204): Xaa in position 190 to 204 is any or no amino acid
  Variant (206)..(262): Xaa in position 206 to 262 is any amino acid
  Variant (263)..(309): Xaa in position 263 to 309 is any or no amino acid
  Variant (311)..(320): Xaa in position 311 to 320 is any amino acid
  Variant (321)..(321): Xaa in position 321 is any or no amino acid
  Variant (323)..(324): Xaa in position 323 to 324 is any amino acid
  Variant (326)..(329): Xaa in position 326 to 329 is any amino acid
  Variant (330)..(333): Xaa in position 330 to 333 is any or no amino acid
  Variant (335)..(360): Xaa in position 335 to 360 is any amino acid
  Variant (361)..(385): Xaa in position 361 to 385 is any or no amino acid
  Variant (387)..(410): Xaa in position 387 to 410 is any amino acid
  Variant (411)..(413): Xaa in position 411 to 413 is any or no amino acid
  Variant (415)..(418): Xaa in position 415 to 418 is any amino acid
  Variant (420)..(428): Xaa in position 420 to 428 is any amino acid
  Variant (429)..(436): Xaa in position 429 to 436 is any or no amino acid
  Variant (438)..(450): Xaa in position 438 to 450 is any amino acid
  Variant (451)..(466): Xaa in position 451 to 466 is any or no amino acid
  Variant (468)..(468): Xaa in position 468 is any amino acid
  Variant (471)..(480): Xaa in position 471 to 480 is any amino acid
  Variant (481)..(484): Xaa in position 481 to 484 is any or no amino acid
  Variant (486)..(488): Xaa in position 486 to 488 is any amino acid
  Variant (490)..(491): Xaa in position 490 to 491 is any amino acid
  Variant (493)..(494): Xaa in position 493 to 494 is any amino acid
  Variant (497)..(502): Xaa in position 497 to 502 is any amino acid
  Variant (503)..(515): Xaa in position 503 to 515 is any or no amino acid
  Variant (517)..(520): Xaa in position 517 to 520 is any amino acid
  Variant (522)..(523): Xaa in position 522 to 523 is any amino acid
  Variant (524)..(540): Xaa in position 524 to 540 is any or no amino acid
  Variant (542)..(545): Xaa in position 542 to 545 is any amino acid
  Variant (547)..(555): Xaa in position 547 to 555 is any amino acid
  Variant (556)..(575): Xaa in position 556 to 575 is any or no amino acid
  Variant (577)..(580): Xaa in position 577 to 580 is any amino acid
  Variant (583)..(584): Xaa in position 583 to 584 is any amino acid
  Variant (586)..(601): Xaa in position 586 to 601 is any amino acid
  Variant (603)..(608): Xaa in position 603 to 608 is any amino acid
  Variant (609)..(609): Xaa in position 609 is any or no amino acid
  Variant (611)..(617): Xaa in position 611 to 617 is any amino acid
  Variant (619)..(622): Xaa in position 619 to 622 is any amino acid
  Variant (624)..(655): Xaa in position 624 to 655 is any amino acid
  Variant (657)..(670): Xaa in position 657 to 670 is any amino acid
  Variant (671)..(673): Xaa in position 671 to 673 is any or no amino acid
  Variant (676)..(685): Xaa in position 676 to 685 is any amino acid
MAXXXXXXXXXXXXXXXXXXXXXXXXXXXXXXXXXXXXXXXXXXXXXXXXXXXXXXXXXXXXXXXXXXXXXXXXXXXXXXXXXXXXXXXXXXXXXXXXXXXXXXXXXXXXXXXXXXXXXXXXXXXXXXXXXXXXXXXXXXXXXXXXXXXXXXXXXXXXXXXXXXXXXXXXXSXSXXXXXXXXXXXXXXXXXXXXXXXXXXXXXXGXXXXXXXXXXXXXXXXXXXXXXXXXXXXXXXXXXXXXXXXXXXXXXXXXXXXXXXXXXXXXXXXXXXXXXXXXXXXXXXXXXXXXXXXXXXXXXXXXXXXXXXXQXXXXXXXXXXXQXXQXXXXXXXXMXXXXXXXXXXXXXXXXXXXXXXXXXXXXXXXXXXXXXXXXXXXXXXXXXXXQXXXXXXXXXXXXXXXXXXXXXXXXXXXGXXXXGXXXXXXXXXXXXXXXXXLXXXXXXXXXXXXXXXXXXXXXXXXXXXXXQXQQXXXXXXXXXXXXXXLXXXQXXQXXQQXXXXXXXXXXXXXXXXXXXQXXXXQXXXXXXXXXXXXXXXXXXXLXXXXQXXXXXXXXXXXXXXXXXXXXXXXXXXXXXQXXXXLTXXQXXXXXXXXXXXXXXXXQXXXXXXXQXXXXXXXQXXXXQXXXXXXXXXXXXXXXXXXXXXXXXXXXXXXXXLXXXXXXXXXXXXXXXXXLLXXXXXXXXXXP

SEQ ID NO: 17634 - protein, 33 aa, Artificial sequence
  protein pattern
  Variant (2)..(2): Xaa in position 2 is any amino acid
  Variant (3)..(3): Xaa in position 3 is Gly, Asn or Ser
  Variant (5)..(5): Xaa in position 5 is any amino acid
  Variant (6)..(6): Xaa in position 6 is any or no amino acid
  Variant (8)..(9): Xaa in position 8 to 9 is any amino acid
  Variant (10)..(10): Xaa in position 10 is Asn, Pro or Gln
  Variant (11)..(11): Xaa in position 11 is Asp, Glu, Gly, Asn or Ser
  Variant (12)..(12): Xaa in position 12 is Ala, Asn, Ser or Thr
  Variant (13)..(13): Xaa in position 13 is Pro, Gln, Ser or Thr
  Variant (14)..(14): Xaa in position 14 is any amino acid
  Variant (16)..(16): Xaa in position 16 is any or no amino acid
  Variant (18)..(18): Xaa in position 18 is Ala, Gly, Asn or Thr
  Variant (19)..(19): Xaa in position 19 is any amino acid
  Variant (20)..(20): Xaa in position 20 is Ala or Thr
  Variant (21)..(21): Xaa in position 21 is Ala, Gly or Pro
  Variant (22)..(22): Xaa in position 22 is Gly or Gln
  Variant (23)..(23): Xaa in position 23 is Asp, Gly or Ser
  Variant (24)..(25): Xaa in position 24 to 25 is any amino acid
  Variant (26)..(26): Xaa in position 26 is Gly, Gln or Ser
  Variant (27)..(27): Xaa in position 27 is any amino acid
  Variant (28)..(28): Xaa in position 28 is Ala, Gly, Gln or Thr
  Variant (29)..(29): Xaa in position 29 is Glu, Gln or Thr
  Variant (30)..(31): Xaa in position 30 to 31 is any amino acid
  Variant (32)..(32): Xaa in position 32 is Ala, Gly, Asn, Ser, Thr or Val
  Variant (33)..(33): Xaa in position 33 is Asn, Pro, Gln or Thr
SXXLXXGXXXXXXXSXGXXXXXXXXXXXXXXXX

SEQ ID NO: 17635 - protein, 14 aa, Artificial sequence
  protein pattern
  Variant (2)..(2): Xaa in position 2 is any or no amino acid
  Variant (5)..(5): Xaa in position 5 is any amino acid
  Variant (6)..(6): Xaa in position 6 is Gly or Ser
  Variant (7)..(8): Xaa in position 7 to 8 is any amino acid
  Variant (9)..(9): Xaa in position 9 is Gly, Gln or Thr
  Variant (10)..(10): Xaa in position 10 is Asn, Pro or Ser
  Variant (11)..(11): Xaa in position 11 is Gly or Leu
  Variant (12)..(12): Xaa in position 12 is Pro, Gln or Thr
  Variant (13)..(13): Xaa in position 13 is any amino acid
  Variant (14)..(14): Xaa in position 14 is Ala, Gly or Val
NXQLXXXXXXXXXX

SEQ ID NO: 17636 - protein, 33 aa, Artificial sequence
  protein pattern
  Variant (2)..(2): Xaa in position 2 is Asn, Gln or Ser
  Variant (3)..(3): Xaa in position 3 is Pro or Gln
  Variant (4)..(4): Xaa in position 4 is any amino acid
  Variant (5)..(5): Xaa in position 5 is Gln or Arg
  Variant (6)..(7): Xaa in position 6 to 7 is any amino acid
  Variant (9)..(9): Xaa in position 9 is any amino acid
  Variant (10)..(10): Xaa in position 10 is any or no amino acid
  Variant (14)..(19): Xaa in position 14 to 19 is any amino acid
  Variant (20)..(20): Xaa in position 20 is any or no amino acid
  Variant (22)..(24): Xaa in position 22 to 24 is any amino acid
  Variant (25)..(25): Xaa in position 25 is Asn or Gln
  Variant (27)..(31): Xaa in position 27 to 31 is any amino acid
  Variant (32)..(32): Xaa in position 32 is any or no amino acid
LXXXXXXQXXQQQXXXXXXXQXXXXQXXXXXXQ

SEQ ID NO: 17637 - DNA, 1053 bp, Arabidopsis thaliana
  CDS (1)..(1053)
atgatgcagacttgttgtatccatcaatcgttttgtttccctcatagagtctttccacggtttgatgcttcgattggtattaagcccccaaagctttgtcaagttggtttcattggaaagactcaatcttatgggatttcaagtccgatacggcaaagaagattatatgtgaatttgaatgctaatgatggtcacccatccatgtctatgttggaagaagaaacctctactgaaaacaacgcacccagtcaagaagccgagcttccgttcagcaaatggtcaccttctaagtacatatggagaggtttatcagttcctattatagcaggacaagtcgttctccggattttaaagggtaagattcactggagaaacactcttcaacagctggagagaaccggaccgaaatctctaggagtttgtcttctgacttctacatttgttggtatggctttcacaatccagttcgttagagaattcactagactaggtctaaacagatccattggaggtgtcttggctttagccttctctagagagctaagtccagtcatcacatcgattgttgttgctggacgaatgggaagtgcatttgcagctgaactagggacaatgcaagtctcagagcaaactgatacactccgtgttttaggagctgacccaattgattatctaatcactccaagagtcatcgcctcgtgtttggctctaccgtttctgacactcatgtgtttcactgttggtatggcttcaagcgctctgctctctgatgcagtttacgggatcagcattaacataatcatggactcggctcaccgagcacttagaccatgggacattgtgagtgccatgattaaatctcaagtctttggagctataatatcggtaattagttgttcttggggagtaaccactactggaggtgctaaaggtgttggagaatctacaacttctgctgtcgtcatgtctcttgtcggaatcttcatcgcggactttgtgctttcttccttcttctttcaaggtgctggagattctttgaagaactgtgtttga

SEQ ID NO: 17638 - protein, 350 aa, Arabidopsis thaliana
MMQTCCIHQSFCFPHRVFPRFDASIGIKPPKLCQVGFIGKTQSYGISSPIRQRRLYVNLNANDGHPSMSMLEEETSTENNAPSQEAELPFSKWSPSKYIWRGLSVPIIAGQVVLRILKGKIHWRNTLQQLERTGPKSLGVCLLTSTFVGMAFTIQFVREFTRLGLNRSIGGVLALAFSRELSPVITSIVVAGRMGSAFAAELGTMQVSEQTDTLRVLGADPIDYLITPRVIASCLALPFLTLMCFTVGMASSALLSDAVYGISINIIMDSAHRALRPWDIVSAMIKSQVFGAIISVISCSWGVTTTGGAKGVGESTTSAVVMSLVGIFIADFVLSSFFFQGAGDSLKNCV

SEQ ID NO: 17639 - DNA, 1038 bp, Oryza sativa (japonica cultivar-group)
  CDS (1)..(1038)
atgccgtccgccggtgccggcgccgccttcctactccgtccaatctccgctaccacccaccctctcatcagcttatcctgtaccggcgccggcgacagcgcgaaccacaagtctcacctcctcttccgcctccaccattcgtgccgccgcctgcccgtgccccgcctctccctcaccccggcccccaccggcagcaataattctccgccctcgcctccgccggcgtccccggagcccccgccccctcccttctccaggtggtccccgccgcgcgcgatctggcgggggctctcggcgctgcttctcgcggggcaggtcttccaccgcgtcctcaccggccgcgtccaccgccgcaacctcctcgcgcagctccgccgcgtgggccccgggagcgcgggggtctcgctcctcaccgcggcattcgtcggcatggccttcacaatccagttcgtgcgcgagttcactcgcctcggcctccaccgctccgtcggcggcgtcctcgccctcgcgctctcccgcgagctctccccggtcgtcaccgccgtcgtcgccgcgggccgggtcggctccgcgtttgctgcagagctggggaccatgcaggtgtcggagcagaccgacaccctccgcgtccttggtgcgcagcccgtcgattacctcgtggtccctcgcgtcgtcgcttgtgtgcttgcgctgcccgtgctaaccctcatgagcttcgcgctcggtctggcgtcctcggcattcttagctgattcgatcttcggtgtcagtaccagcatcattctggagtcagcgcgaagggcgctgcggccatgggacttgatcagttccttgctaaaatctcaggtgtttggcgccattattgctgttgtgagctgtgcttggggtgtcaccacccatggtggagccaagggcgttggagagtccaccacatctgcagtggtcgtttctttagttgggattttcgttgcggatttcgctctatcatgcctgttcttccaaggagctggtgattctctcaaatatgcaatgggttga

SEQ ID NO: 17640 - protein, 345 aa, Oryza sativa (japonica cultivar-group)
MPSAGAGAAFLLRPISATTHPLISLSCTGAGDSANHKSHLLFRLHHSCRRLPVPRLSLTPAPTGSNNSPPSPPPASPEPPPPPFSRWSPPRAIWRGLSALLLAGQVFHRVLTGRVHRRNLLAQLRRVGPGSAGVSLLTAAFVGMAFTIQFVREFTRLGLHRSVGGVLALALSRELSPVVTAVVAAGRVGSAFAAELGTMQVSEQTDTLRVLGAQPVDYLVVPRVVACVLALPVLTLMSFALGLASSAFLADSIFGVSTSIILESARRALRPWDLISSLLKSQVFGAIIAVVSCAWGVTTHGGAKGVGESTTSAVVVSLVGIFVADFALSCLFFQGAGDSLKYAMG

SEQ ID NO: 17641 - DNA, 852 bp, Synechocystis sp. PCC 6803
  CDS (1)..(852): transl_table=11
atgcgcctatggtttcgtcccccctaccgtcccattcttcaaaccccggcgatgacccaatcaattatcttggcagaattaagctcctggctccggcgatcgggacaagcaattttattgttgggcaacacttcctttcagctttttaccggcaaaattgatgggcgcaacaccactcaacaattgatgtttgttggccccgcttccctccccattaccctaattaccgccgctgtcattggcatgattttcaccatccaggtagcaagggaatttttagcttttggagcaggcagtgctgtgggggggattttaatgttggccctgggccgagaactatgcccgatcatgacagccgtggtggtggccgggcgggttgggtcagcctttgccgccgaaataggtactatgcgggtgacagaacaaattgatgccctctatatgctcaacactaacccggtggaatatttagtcattcctcgactgttggcctgttgcattatggtgcccactttgagtgtgctggctttagtaaccggcatgatggggggagcggtaatttccagcaatgtttatggcattgccaaccaggtattttttgaatccatacagacctttgttaccccctgggacatattctgcggccccgtcaagggcattgtgtttggagttttaatcgccatcattggttgtaactggggcctgactactaggggcggagccaaaggagtgggggaatccaccaccgccgcagtggtaacttctctgttggcaatttttgtgagtaactttctgatgtcttggattatgttccagggcagtggttctggtgctgtgctaatggggaattaa

SEQ ID NO: 17642 - protein, 283 aa, Synechocystis sp. PCC 6803
MRLWFRPPYRPILQTPAMTQSIILAELSSWLRRSGQAILLLGNTSFQLFTGKIDGRNTTQQLMFVGPASLPITLITAAVIGMIFTIQVAREFLAFGAGSAVGGILMLALGRELCPIMTAVVVAGRVGSAFAAEIGTMRVTEQIDALYMLNTNPVEYLVIPRLLACCIMVPTLSVLALVTGMMGGAVISSNVYGIANQVFFESIQTFVTPWDIFCGPVKGIVFGVLIAIIGCNWGLTTRGGAKGVGESTTAAVVTSLLAIFVSNFLMSWIMFQGSGSGAVLMGN

SEQ ID NO: 17643 - DNA, 792 bp, Nostoc sp. PCC 7120
  CDS (1)..(792): transl_table=11
atgaccacatccaaatccagcataggaacatggagtcagcgattgctggcagcaatatttctgggtggacaagctatagttcacctcttgaggggtaaaatccactggcgcaacaccaaagaacaaatggcagcagtggggccagattcgttatttattgccctattaacagcagtttttgttggtgcagtttttaccattcaggtagcacgggagtttattaattttggcgcaggtaatcttgtcggcggagtgttagcagtagcattgacgagggaattatcgccagtactaacagccgtgatattagccggacgtgttggttctgcttttgccgcagaaatcggcacaatgcgggtaacagaacaaatcgatgccatgttgatgttaaaaactgacccaattgactatttagttataccccgtctgctggcttgcttcctcatgctgccaattttaaccctcctatccttagtcacaggaatgttagggggattaatcattgccacaaatatgtatggaatctccgacacagtatttttagattccgcccgtaacttactagaaatctgggatatttgtagcgccatgattaaggcgtgctgctttggggtattaattgccattattggttgtagttggggtttgaccaccacaggtggagctaaaggagtaggacaatcgactacaacggctgttgttacggccttattaattatcttcgttagtaactttttcttatcctgggtaatgtttcaaggaactggtggtgcattccagccagggatataa

SEQ ID NO: 17644 - protein, 263 aa, Nostoc sp. PCC 7120
MTTSKSSIGTWSQRLLAAIFLGGQAIVHLLRGKIHWRNTKEQMAAVGPDSLFIALLTAVFVGAVFTIQVAREFINFGAGNLVGGVLAVALTRELSPVLTAVILAGRVGSAFAAEIGTMRVTEQIDAMLMLKTDPIDYLVIPRLLACFLMLPILTLLSLVTGMLGGLIIATNMYGISDTVFLDSARNLLEIWDICSAMIKACCFGVLIAIIGCSWGLTTTGGAKGVGQSTTTAVVTALLIIFVSNFFLSWVMFQGTGGAFQPGI

SEQ ID NO: 17645 - DNA, 804 bp, Thermosynechococcus elongatus BP-1
  CDS (1)..(804): transl_table=11
gtgaaggcgatgaagtggccacggctacgctggcgtgcaagccaaggtgtccaacgcttgggtacagcccttctcttagggggtcaagtcatctaccgtgtgctgcgggggcggattgctctgcgtaacttgatcgagcaaatggctttggtggggcctgcctccctcagtgttgccctgattacagctgccttcgtgggtatggtgtttacgattcaagtcgcccgtgaatttattgcctttggtgccacgtctgcggtgggtggggtgctggcgatcgcccttgcgcgggaactagggcctgtactgacagcggtggtgctcgccggccgggttggctccgcctttgcagctgaaattggtaccatgaaagtcactgagcaaattgacgccctctatatgttaggcaccaaccccgtagattacttagtggtgccacggtttattgcctgtgtggtcatgttgccaattcttaatatcctagcactggtaacgggtttgtggggggggttgattattggcgattatctctacggtattccccctggggtatatattgagtccattcagaactttctgcaaacttgggatctgtggagttcaattatcaaatcgggcatttttggtggtgtggtggccatcattggctgcagttggggcattacaaccacggggggcgccaagggagtcggtcaatccaccacggcagcagtggtgatctcgctactggccatttttattctcaactttttcctgtcttgggcactctttggcggcaacagtagcctcgtacccacgttctag

SEQ ID NO: 17646 - protein, 267 aa, Thermosynechococcus elongatus BP-1
MKAMKWPRLRWRASQGVQRLGTALLLGGQVIYRVLRGRIALRNLIEQMALVGPASLSVALITAAFVGMVFTIQVAREFIAFGATSAVGGVLAIALARELGPVLTAVVLAGRVGSAFAAEIGTMKVTEQIDALYMLGTNPVDYLVVPRFIACVVMLPILNILALVTGLWGGLIIGDYLYGIPPGVYIESIQNFLQTWDLWSSIIKSGIFGGVVAIIGCSWGITTTGGAKGVGQSTTAAVVISLLAIFILNFFLSWALFGGNSSLVPTF

SEQ ID NO: 17647 - DNA, 768 bp, Gloeobacter violaceus PCC 7421
  CDS (1)..(768): transl_table=11
atggaatggatccagaggctgatctcggccggattgctggcgggtcaagtgctcattcatctgctgcgcgggcgcattcactggcgcaacacggtcgatcaactctcggtggtcggcaccgaatcggtactggtggccgtgatcaccgccatcacgatcggcatggtcttcacgatccaggtggcgcgtgaattcatttctttcggtgcttcctccgccatcggcggtgtgcttgccatcgccctcacccgcgaactggccccggtgctcaccgccgtgatcatcgccgggcgggtgggttcggcttttgcggccgaggtaggcacgatgcgcgtcaccgagcaaatcgacgcgctggaggtgctgcgcaccgatccgatcgactatttggtcaccccacgggtgattgcctgcgcggtgatgctgccggtactcaccatcgtggcggacgtcacgggattggcgggcggattattcatcactacccagctttacggcatctcggccacgctctaccttgattcggcccgcaacttgctggagagctgggacatgattagcggcctgatcaaggcgggcattttcggggtgctcatcgccctcatcggcaccaattggggactgaccaccaccggcggcgcccggggggtgggcaactccaccacccagtcggtggtgacggcccttttgacgatttttatcgtcaatttcatcctctcggccttgatgtttcggggagcgggcgaggccctgcaaagggggttctag

SEQ ID NO: 17648 - protein, 255 aa, Gloeobacter violaceus PCC 7421
MEWIQRLISAGLLAGQVLIHLLRGRIHWRNTVDQLSVVGTESVLVAVITAITIGMVFTIQVAREFISFGASSAIGGVLAIALTRELAPVLTAVIIAGRVGSAFAAEVGTMRVTEQIDALEVLRTDPIDYLVTPRVIACAVMLPVLTIVADVTGLAGGLFITTQLYGISATLYLDSARNLLESWDMISGLIKAGIFGVLIALIGTNWGLTTTGGARGVGNSTTQSVVTALLTIFIVNFILSALMFRGAGEALQRGF

SEQ ID NO: 17649 - DNA, 792 bp, Anabaena variabilis ATCC 29413
  CDS (1)..(792): transl_table=11
atgaccacatccaaatccagcttaggaacatggagtcagcgattgctggcggcaatatttctgggtggacaagctatagttcacctcttgaggggtaaaatccactggcgcaacaccagagaacaaatggcagccgtagggccagattcgttatttattgccctattaacagcagttttcgtaggtgcagtgtttaccattcaggtagcacgggagttcattaattttggcgcaggtaatcttgtcggcggagtattagcagtagcattgacgcgggaattatcaccagtactcacagccgtgatattagcaggacgtgtgggttctgcctttgccgcagaaattggcacaatgcgggtaacagaacaaatcgatgccatgttgatgttaaaaactgacccaattgactatttagtcataccccgtctgctggcttgttttctcatgctgccaattttaaccctcttgtccttagtcacaggaattttggggggactaatcatcgccacaaatatgtatggaatctccgacacagtatttttagattccgcccgtaacctgctggaagtctgggatatttgtagcgccatgattaaggcgtgctgctttggtgtgttaatcgccattattggctgtagttggggtttgacaaccacaggcggagctaaaggagtaggacaatcaactacaactgctgttgttacggccttattaattatcttcgtgagcaactttttcttgtcctgggtaatgtttcaaggaactggtggtgcattccagcaagggttataa

SEQ ID NO: 17650 - protein, 263 aa, Anabaena variabilis ATCC 29413
MTTSKSSLGTWSQRLLAAIFLGGQAIVHLLRGKIHWRNTREQMAAVGPDSLFIALLTAVFVGAVFTIQVAREFINFGAGNLVGGVLAVALTRELSPVLTAVILAGRVGSAFAAEIGTMRVTEQIDAMLMLKTDPIDYLVIPRLLACFLMLPILTLLSLVTGILGGLIIATNMYGISDTVFLDSARNLLEVWDICSAMIKACCFGVLIAIIGCSWGLTTTGGAKGVGQSTTTAVVTALLIIFVSNFFLSWVMFQGTGGAFQQGL

SEQ ID NO: 17651 - DNA, 795 bp, Synechococcus elongatus PCC 7942
  CDS (1)..(795): transl_table=11
atgcggagaactcctctgaacggcctcaagcgctgggtcaatcgactgttgctcgcccttttgttggctgggcaggtcgtgctgcatctcttccgcgcccggattgacccctacaacacccgggagcaaatggccaacgtggggccatcctcactgctgatcacgctactgacgggtgtttccgttggagcggtattcaccattcaagttgcccgcgagtttatcaatttcggagccgggaacatcgtagggggcatcttggctctggcactcttccgcgaactggcacccgtgttgacgggggtcgtggtggcgggtcggattggctcagcttttgcggcggagatcggcacgatgcaagtcacggagcaaatcgatgcgctgttgatgctgcgcactgatcccgttgactatctggtggtgccgcggaccttggcctgctgtctgatgatgcccattctctgtctagggtttggcctgatcggggtgactgccggtagtctggtggctcaatcggcctacggcatcccggttagtgtcttttttgatggcatccgcaacttcctcgaaccgtgggatgtcgtcagtagcctgatcaaagccgtgatttttggctgggtggtggccgcgatcggtacgaactggggcctgacaaccactggcggtgcacggggcgttggcgaatcgacgaccggtgcagttgttaccgcactcctagtgatttttgtgctggacttcttcctgtcgcagctgatgttcagtggcgtgggagatgccgctttgcaggcaccctaa

SEQ ID NO: 17652 - protein, 264 aa, Synechococcus elongatus PCC 7942
MRRTPLNGLKRWVNRLLLALLLAGQVVLHLFRARIDPYNTREQMANVGPSSLLITLLTGVSVGAVFTIQVAREFINFGAGNIVGGILALALFRELAPVLTGVVVAGRIGSAFAAEIGTMQVTEQIDALLMLRTDPVDYLVVPRTLACCLMMPILCLGFGLIGVTAGSLVAQSAYGIPVSVFFDGIRNFLEPWDVVSSLIKAVIFGWVVAAIGTNWGLTTTGGARGVGESTTGAVVTALLVIFVLDFFLSQLMFSGVGDAALQAP

SEQ ID NO: 17653 - DNA, 780 bp, Syntrophus aciditrophicus SB
  CDS (1)..(780): transl_table=11
atgggaatcctcacggctttcgccgattctctgggaaggagaatcctgcacggggttgaggaaatgggcaggattatccttctttttctttctgttgtcgcttggacgtttcgccccccccttcgcctccgactcatattcaaacagatggaatttgtcggcgtgaagtcgatttttgttgtcgtacttacaggggcctttaccggcatggtcatggcccttcagggatatcacggcttcaagatgttcagcgcggagagtctggtcggggccaccgttgccctggggatgacccgggagctcggaccggtgcttacgtccctgatggtcaccgcccgggcgggttccgccatggcggccgaactgggaaccatgcgagtgacggaacagatcgatgctctttacgtcatggcggcgaatccgattcagcacctcatcgtgccaagaatgatcgcctcgatcctgatgctgcctctgctaactgttgtttctgattttgtagggattttaggcggctattttgtaggggtcagcgtacttaacatcaatgaaggggtttttgtaaagaacatcaccagaatcgtcgaactgggagacatctacaacggcttgatcaaggcagcctgcttcggtctgatcctctcgctcataggctgttacaaagggtttcatgcccggggaggggctgaaggcgtcggccgggcgaccacggaagccgttgtgctttcgtcgatcagcatcctggtcggcgactatttcctgaccgccatcatgttttag

SEQ ID NO: 17654 - protein, 259 aa, Syntrophus aciditrophicus SB
MGILTAFADSLGRRILHGVEEMGRIILLFLSVVAWTFRPPLRLRLIFKQMEFVGVKSIFVVVLTGAFTGMVMALQGYHGFKMFSAESLVGATVALGMTRELGPVLTSLMVTARAGSAMAAELGTMRVTEQIDALYVMAANPIQHLIVPRMIASILMLPLLTVVSDFVGILGGYFVGVSVLNINEGVFVKNITRIVELGDIYNGLIKAACFGLILSLIGCYKGFHARGGAEGVGRATTEAVVLSSISILVGDYFLTAIMF

SEQ ID NO: 17655 - DNA, 753 bp, Myxococcus xanthus DK 1622
  CDS (1)..(753): transl_table=11
atggaccgcgcgaaggagcgcctggagtcactgggcgccctgtcgcggatgacggggcaggtgttcagtcgcgcggtgcgtccgccctttgactggcgcgggctcgtgtaccacacggagtcgctgggcgtgcgctcgctgcccatcgccctgctcaccgcgatgttcgcggggctcgtcatctcgttgcagttcggctacttcctgtcgcgcttcggcgtgcagtacaccgtgggccgcgtggtcatcctcacgctgttccgcgagctggcgccggtgctcaccgcgctcaccgtgggcgcgcgcatcggcagtggcatcgccgcggagctgggcgcgatgacggtgacggagcaggtggacgccatccgcgcgctgggcgccgacccgctgcgcaagttggtggtgccccgcgtgctggcgtgcctgattgtgttgccggtgctcaccgtgttcgcggacgtcgtgggcctggtggcgggcgcgctggtggtgaacatccagtacgcgattacgctcaacctcttcttccagggcgcgctggacgcggtgctgatgccggacttcgcctcgggtgtgttcaagggcgcggtgttcggactcatcatcggcctggtgggctgcttccgcggcctcaccgtggagggcggcacggagggcgtgggccgcgccaccacccagacggtggcgaccacgtccgtctccgtgtgcctggcggacttcttcatcacccagctcacgctgagcctgtga

SEQ ID NO: 17656 - protein, 250 aa, Myxococcus xanthus DK 1622
MDRAKERLESLGALSRMTGQVFSRAVRPPFDWRGLVYHTESLGVRSLPIALLTAMFAGLVISLQFGYFLSRFGVQYTVGRVVILTLFRELAPVLTALTVGARIGSGIAAELGAMTVTEQVDAIRALGADPLRKLVVPRVLACLIVLPVLTVFADVVGLVAGALVVNIQYAITLNLFFQGALDAVLMPDFASGVFKGAVFGLIIGLVGCFRGLTVEGGTEGVGRATTQTVATTSVSVCLADFFITQLTLSL

SEQ ID NO: 17657 - DNA, 750 bp, Trichodesmium erythraeum IMS101
  CDS (1)..(750): transl_table=11
atgttggcagctacatatttagctggccaagtatttgtccatttattccatggcaaaatttatcgtcgtaataccattgagcaaatggcgatcgtcggtccagaatctttactaattgtcttgctgacagctagttttgtcggtatggtatttactattcaggttgccagggaacttgtagcttttggtacagctaatatggttggaggtatgttggctctaactttatctagggaacttggtcctgttttaacagcagttgttgttgcggggcgagtaggttcagcatttgcggcagaaataggcacgatgaaagtgacagagcaaatagatgctctatatatactgaaaacagatccagtagattatttagttattcccagagttattgcttgtggtgtaatgatgccaatcttaactttattgtgtttggtggctgctatatttggtggactaataattgcagtaaatctatacgatattccccaaagcatgtatattgattctgtccggagttttttaactctttgggatctgtgcagtggattaactaaatcagttgtctttggtgttttaattgctgtaattggtacaagctggggtttaactactactggtggggcaaaaggtgtgggaaaatctacaactacggccgttgtgacatccttaatatctatctttatttttaatttctttttatcttgggcaatgttccaaggtatgggtggggccatgaagcagggcctttga

SEQ ID NO: 17658 - protein, 249 aa, Trichodesmium erythraeum IMS101
MLAATYLAGQVFVHLFHGKIYRRNTIEQMAIVGPESLLIVLLTASFVGMVFTIQVARELVAFGTANMVGGMLALTLSRELGPVLTAVVVAGRVGSAFAAEIGTMKVTEQIDALYILKTDPVDYLVIPRVIACGVMMPILTLLCLVAAIFGGLIIAVNLYDIPQSMYIDSVRSFLTLWDLCSGLTKSVVFGVLIAVIGTSWGLTTTGGAKGVGKSTTTAVVTSLISIFIFNFFLSWAMFQGMGGAMKQGL

SEQ ID NO: 17659 - DNA, 798 bp, Nostoc punctiforme PCC 73102
  CDS (1)..(798): transl_table=11
ttgaaccagactacatccaaatccagtttaggagaatggagtcagcgattgctggcagcgatttttctgggtgggcaagtactagttcacctattgaggggcaaaatccatcggcgcaacaccttagaacaaatggcagcggttgggccagattccctatttattgccctattgacggctattttcgtcggcgcggtgtttaccattcaagtggcacgggaatttatcaactttggtgcaggaaacattatagggggggtgctttctatagcgttgacacgagaactctctcccgtgttgacagcagtggttttggcagggcgagtcggttctgcctttgcagccgaaatcggtaccatgcgcgtaacagaacaaatcgatgccatgttgatgttaaaaacagatccaatcgattatctggttattccccgcgttattgcttgctgtttaatgctaccaattttaaccctcctgtctttgatcacagggatgtttggaggattcataattgcgacaaatgtctacaacctttctgatacggtatttctagactcagcccgtaactttcttgggatctgggatattattagcgccatgcttaaggcgttttgctttgggattttaatcgccgtaattggttgcagttggggattgacgacaacgggaggagctaaaggagtaggacagtcaaccacaactgctgttgtgactgccttgctaattatatttgttagcaacttctttctttcttggttaatgtttcaaggacttggcagtgcatttttgaaaggcttataa

SEQ ID NO: 17660 - protein, 265 aa, Nostoc punctiforme PCC 73102
MNQTTSKSSLGEWSQRLLAAIFLGGQVLVHLLRGKIHRRNTLEQMAAVGPDSLFIALLTAIFVGAVFTIQVAREFINFGAGNIIGGVLSIALTRELSPVLTAVVLAGRVGSAFAAEIGTMRVTEQIDAMLMLKTDPIDYLVIPRVIACCLMLPILTLLSLITGMFGGFIIATNVYNLSDTVFLDSARNFLGIWDIISAMLKAFCFGILIAVIGCSWGLTTTGGAKGVGQSTTTAVVTALLIIFVSNFFLSWLMFQGLGSAFLKGL

SEQ ID NO: 17661 - DNA, 780 bp, Rickettsia rickettsii
  CDS (1)..(780): transl_table=11
atgttattcaatatagctaattcggtcggtaaacgtactgtaaagtttgcacaaagtgtaggtagtttttctctatttagctttgctgccgttagcagtatcataagaccgcctttatatttgagtttaatcatcagacaattattatttatcgggtttcactcgcttccggttgttgcaatgacgacttttttctcaggggcagtacttgcattacagagctatatcggtttttcccgtttctcagctgaaagctctattgcaacggtagtagtattgtcgctgactagagagcttggacctgtcttagctggactaatggtagcgggaagagttggggcatcaatcgccgccgaaatagccacaatgagagtaacggagcaggtagatgctttatatactttatctaccgatcctattaaatatttagtttttccaagagtaataacagctattattacaatgccttgtcttgttttaatcggggatataattggtgttatgggcggttatttggtaggggtatataaacttgattttaatagtgcagcttatttaaccagtacttttcagtatttagaaccgattgacgtaatttccggtcttgttaaagcgggagtttttgggtttattatttctataataagttgctatagcggctattattcaggtaaaggggctaagggagttggaagagcaactacctcggcagtagtgaattcttctatccttatcttaatcagtaattatttaataaccgaattattttttaaagtatag

SEQ ID NO: 17662 - protein, 259 aa, Rickettsia rickettsii
MLFNIANSVGKRTVKFAQSVGSFSLFSFAAVSSIIRPPLYLSLIIRQLLFIGFHSLPVVAMTTFFSGAVLALQSYIGFSRFSAESSIATVVVLSLTRELGPVLAGLMVAGRVGASIAAEIATMRVTEQVDALYTLSTDPIKYLVFPRVITAIITMPCLVLIGDIIGVMGGYLVGVYKLDFNSAAYLTSTFQYLEPIDVISGLVKAGVFGFIISIISCYSGYYSGKGAKGVGRATTSAVVNSSILILISNYLITELFFKV

SEQ ID NO: 17663 - DNA, 792 bp, Crocosphaera watsonii WH 8501
  CDS (1)..(792): transl_table=11
atgacaaacccaaaccattcaagaagaggactcggtatttggtttgagagattgatagcagccattttattagggggtcaagttttctttcatctgctcaaaactaagattcatcggcgaaataccttagatcagatgagtgttgtcggtccagaatcgttgacgatcgctttaataacagcggggtttgtgggcatggtgtttaccattcaagttgctagggaatttatcagttttggggcagcttcaactgttgggggagtattagccctagctttaaccagagaattagcaccagtgttaacggcggttgtcgtggcaggaagagtgggatcagcctttgccgccgaaattggcacaatgcgagtcaccgaacaaattgacgctttatatatgctcaaaaccgatcccgttgactatttagtggtgcctcgtgtcttagcttgttgtttgatgttaccagttttgaacatcctttccttaataacgggaatgacaggaggattattgattgccaatggattgtacgatatttccccctatgttttcttaacctccatccgtaactttttagaattgtgggatttagtgacttctgtgattaaatccgttgcttttgggggattaattgccgtcattggttgtagttggggactcaccaccactgggggagcaaaaggagtgggacagtccacaacaacggcagtagtaacagctttattagcagtttttgtggttaactttttcttatcttgggttatgttccaaggaaccggctcaggctctttgtga

SEQ ID NO: 17664 - protein, 263 aa, Crocosphaera watsonii WH 8501
MTNPNHSRRGLGIWFERLIAAILLGGQVFFHLLKTKIHRRNTLDQMSVVGPESLTIALITAGFVGMVFTIQVAREFISFGAASTVGGVLALALTRELAPVLTAVVVAGRVGSAFAAEIGTMRVTEQIDALYMLKTDPVDYLVVPRVLACCLMLPVLNILSLITGMTGGLLIANGLYDISPYVFLTSIRNFLELWDLVTSVIKSVAFGGLIAVIGCSWGLTTTGGAKGVGQSTTTAVVTALLAVFVVNFFLSWVMFQGTGSGSL

SEQ ID NO: 17665 - DNA, 747 bp, Prochlorococcus marinus str. MIT 9211
  CDS (1)..(747): transl_table=11
atgaaatcacctcgctggctaaaaagactgggatcaagcatgcttataggaggtcaagcaataacttcttcgacaaaagggaatataaacaagtcagacttaattgatcaattaatggaagctggtccagcaagtttcattatcgttttaatcacagggatttcagcaggcacggtttttaatattcaggtcgcagctgaactaagtagacaaggagtcggttcagaagttggtggtctcctagccattggattagcaagagaaattgctcctttacttacggcaactcttttaacaggaaaagtggcaacagcatatgccgctcaacttggaacgatgaaggttactgagcagatcgatgcaatcacaatgctccaaactgatccaattgattacctggttgtccctagagtgattgcaatggtcataatggctcctttgcaatgcctgctattttttacagtggctttatggagtggccaaatcagtagtacgtacttttacagcattccaataaatgtattttggaattcagtgaatgaatggttagttatcagtgatatccctttcatgcttattaaagcagtagtatttggctttcaaattgctgttattgcctgtggatgggggcttactactagaggtggcgctaaagaagttggaacaagtactactggagctgtagttatgacattattaagtgtctcattaatggatgtccttttaaccaaagtacttttcggctaa

SEQ ID NO: 17666 - protein, 248 aa, Prochlorococcus marinus str. MIT 9211
MKSPRWLKRLGSSMLIGGQAITSSTKGNINKSDLIDQLMEAGPASFIIVLITGISAGTVFNIQVAAELSRQGVGSEVGGLLAIGLAREIAPLLTATLLTGKVATAYAAQLGTMKVTEQIDAITMLQTDPIDYLVVPRVIAMVIMAPLQCLLFFTVALWSGQISSTYFYSIPINVFWNSVNEWLVISDIPFMLIKAVVFGFQIAVIACGWGLTTRGGAKEVGTSTTGAVVMTLLSVSLMDVLLTKVLFG

SEQ ID NO: 17667 - DNA, 1038 bp, Oryza sativa subsp
  CDS (1)..(1038)
atgccgtccgccggtgccggcgccgccttcctactccgtccaatctccgctaccacccaccctctcatcagcttatcctgtaccggcgccggcgacagcgcgaaccacaagtctcacctcctcttccgcctccaccattcgcgccgccgcctgcccgtgccccgcctctccctcaccccggcccccaccggcagcaataattctccgccctcgcctccgccggcgtccccggagcccccgccccctcccttctccaggtggtccccgccgcgcgcgatctggcgggggctctcggcgctgcttctcgcggggcaggtcttccaccgcgtcctcaccggccgcgtccaccgccgcaacctcctcgcgcagctccgccgcgtgggccccgggagcgcgggggtctcgctcctcaccgcggcattcgtcggcatggccttcaccatccagttcgtgcgcgagttcactcgcctcggcctccaccgctccgtcggcggcgtcctcgccctcgcgctctcccgcgagctctccccggtcgtcaccgccgtcgtcgccgcgggccgggtcggctccgcgtttgctgcagagctggggaccatgcaggtgtcggagcagaccgacaccctccgcgtccttggtgcgcagcccgtcgattacctcgtggtccctcgcgtcgtcgcttgtgtgcttgcgctgcccgtgctaaccctcatgagcttcgcgctcggtctggcgtcctcggcattcttagctgattcgatcttcggtgtcagtaccagcatcattctggagtcagcgcgaagggcgctgcggccatgggacttgatcagttccttgctaaaatctcaggtgtttggcgccattattgctgttgtgagctgtgcttggggtgtcaccacccatggtggagccaagggcgttggagagtccaccacatctgcagtggtcgtttctttagttgggattttcgttgcggatttcgctctatcatgcctgttcttccaaggagctggtgattctctcaaatatgcaatgggttga

SEQ ID NO: 17668 - protein, 345 aa, Oryza sativa subsp
MPSAGAGAAFLLRPISATTHPLISLSCTGAGDSANHKSHLLFRLHHSRRRLPVPRLSLTPAPTGSNNSPPSPPPASPEPPPPPFSRWSPPRAIWRGLSALLLAGQVFHRVLTGRVHRRNLLAQLRRVGPGSAGVSLLTAAFVGMAFTIQFVREFTRLGLHRSVGGVLALALSRELSPVVTAVVAAGRVGSAFAAELGTMQVSEQTDTLRVLGAQPVDYLVVPRVVACVLALPVLTLMSFALGLASSAFLADSIFGVSTSIILESARRALRPWDLISSLLKSQVFGAIIAVVSCAWGVTTHGGAKGVGESTTSAVVVSLVGIFVADFALSCLFFQGAGDSLKYAMG

SEQ ID NO: 17669 - DNA, 969 bp, Oryza sativa subsp
  CDS (1)..(969)
atgccgtccgccggtgccggcgccgccttcctactccgtccaatctccgctaccacccaccctctcatcagcttatcctgtaccggcgccggcgacagcgcgaaccacaagtctcacctcctcttccgcctccaccattcgtgccgccgcctgcccgtgccccgcctctccctcaccccggcccccaccggcagcaataattctccgccctcgcctccgccggcgtccccggagcccccgccccctcccttctccaggtggtccccgccgcgcgcgatctggcgggggctctcggcgctgcttctcgcggggcaagtcttccaccgcgtcctcaccggccgcgtccaccgccgcaacctcctcgcgcagctccgccgcgtgggccccgggagcgcgagggtctcgctcctcaccgcggcattcgtcggcatggccttcaccatccagttcgtgcgcgagttcactcgcctcggcctccaccgctccgtcgacagcgtcctcgccctcgcgctctcccgcgagctctccccggtgtcggagcagaccgacaccctccgcgtccttggtgcgcagcccgtcgattacctcgtggtccctcgcgtcgtcgcttgtgtgcttgcgctgcccgtgctaaccctcatgagcttcgcgctcggtctggcgtcctcggcattcttagctgattcgatcttcggtgtcagtaccagcatcattctggagtcagcgcgaagggcgctgcggccatgggacttgatcagttccttgctaaaatctcaggtgtttggcgccattattgctgttgtgagctgtgcttggggtgtcaccacccatggtggagccaagggcgttggagagtccaccacatctgcagtggtcgtttctttagttgggattttcgttgcggatttcgctctatcatgcctgttcttccaaggagctggtgattctctcaaatatgcaatgggttga

SEQ ID NO: 17670 - protein, 322 aa, Oryza sativa subsp
MPSAGAGAAFLLRPISATTHPLISLSCTGAGDSANHKSHLLFRLHHSCRRLPVPRLSLTPAPTGSNNSPPSPPPASPEPPPPPFSRWSPPRAIWRGLSALLLAGQVFHRVLTGRVHRRNLLAQLRRVGPGSARVSLLTAAFVGMAFTIQFVREFTRLGLHRSVDSVLALALSRELSPVSEQTDTLRVLGAQPVDYLVVPRVVACVLALPVLTLMSFALGLASSAFLADSIFGVSTSIILESARRALRPWDLISSLLKSQVFGAIIAVVSCAWGVTTHGGAKGVGESTTSAVVVSLVGIFVADFALSCLFFQGAGDSLKYAMG

SEQ ID NO: 17671 - DNA, 1086 bp, Ostreococcus tauri
  CDS (1)..(1086)
atggcgtcgttcacgatgcgcccgtcgacgtcgacctcgcgaggcgtcgcgtcgacgaacgacgggcggcgacgcctcgctcgcgcgcgcgcggcgctcgcgtcgcgcgtcgtcgtccgaggcactcgaacgggctcgacggacccgacgcccacgcctgcgcgcgccgtggtccgtcgcgcgtccgcgtcgagcgcgcgcgatgacgcgtcgtcgtcggcggcgtcaccgatcgggagctcgccgttggagcgcgcggaggcgatcgcgcgggcgtggttgacgcggcgcgcgcgcgggtggacgccgccaaagtttttgtggcgcgccacggcgacggcgttgttgttcggaagcgtgctgtatcggttggtgcgggagccgaaacgggtgaattgggagcagacgttacagcaaatcgcgcgcgtcgggccgcagaccctgggggtgtcgcttctcacgagctcattcgtcgggatggtttttacgattcagttttgtaaggagttcgcaaaggttgggttgaagaacgctatcgggggattgctcggtctggcgttcgcgcgagagctcacgccggtgatttgtgcgatcgttctcacggggcgcatcgggagctcgatcgcggcggagctcgggacgatgcaggtgacggagcaggtggaccagctcacggtgctcgggacggatccggtggattatctcgtgataccgcgcgtgatcgcgtgttcgatctcgctcccgatcctgagcgtgctgtcgttcgcgcaatccctcggggcgtccatcctactcgcggatttgcgctacggggtgtcgccaaacgtcatcatcgacagcgtggccaagtacgtggagccgagcgacatcggtgtcatggcggcgaagtccatcgccttcggcgccgtcatcgccgccatctcgtgcggatggggaacgacgacgaccggtggggccaagggctctcaccgccatctttgtcgtcgatttcgtcctgtcgctcgtcttcttccaaaagtagcggcgcgccgcatgaccgtttcatcggtgccatcgcctcgcattctcatcgcaaagcgtttgtaa

SEQ ID NO: 17672 - protein, 361 aa, Ostreococcus tauri
MASFTMRPSTSTSRGVASTNDGRRRLARARAALASRVVVRGTRTGSTDPTPTPARAVVRRASASSARDDASSSAASPIGSSPLERAEAIARAWLTRRARGWTPPKFLWRATATALLFGSVLYRLVREPKRVNWEQTLQQIARVGPQTLGVSLLTSSFVGMVFTIQFCKEFAKVGLKNAIGGLLGLAFARELTPVICAIVLTGRIGSSIAAELGTMQVTEQVDQLTVLGTDPVDYLVIPRVIACSISLPILSVLSFAQSLGASILLADLRYGVSPNVIIDSVAKYVEPSDIGVMAAKSIAFGAVIAAISCGWGTTTTGGAKGSHRHLCRRFRPVARLLPKVAARRMTVSSVPSPRILIAKRL

SEQ ID NO: 17673 - DNA, 1038 bp, Oryza sativa
  CDS (1)..(1038)
atgccgtccgccggtgccggcgccgccttcctactccgtccaatctccgctaccacccaccctctcatcagcttatcctgtaccggcgccggcgacagcgcgaaccacaagtctcacctcctcttccgcctccaccattcgcgccgccgcctgcccgtgccccgcctctccctcaccccggcccccaccggcagcaataattctccgccctcgcctccgccggcgtccccggagcccccgccccctcccttctccaggtggtccccgccgcgcgcgatctggcgggggctctcggcgctgcttctcgcggggcaggtcttccaccgcgtcctcaccggccgcgtccaccgccgcaacctcctcgcgcagctccgccgcgtgggccccgggagcgcgggggtctcgctcctcaccgcggcattcgtcggcatggccttcaccatccagttcgtgcgcgagttcactcgcctcggcctccaccgctccgtcggcggcgtcctcgccctcgcgctctcccgcgagctctccccggtcgtcaccgccgtcgtcgccgcgggccgggtcggctccgcgtttgctgcaaagctggggaccatgcaggtgtcggagcagaccgacaccctccgcgtccttggtgcgcagcccgtcgattacctcgtggtccctcgcgtcgtcgcttgtgtgcttgcgctgcccgtgctaaccctcatgagcttcgcgctcggtctggcgtcctcggcattcttagctgattcgatcttcggtgtcagtaccagcatcattctggagtcagcgcgaagggcgctgcggccatgggacttgatcagttccttgctaaaatctcaggtgtttggcgccattattgctgttgtgagctgtgcttggggtgtcaccacccatggtggagccaagggcgttggagagtccaccacatctgcagtggtcgtttctttagttgggattttcgttgcggatttcgctctatcatgcctgttcttccaaggagctggtgattctctcaaatatgcaatgggttga

SEQ ID NO: 17674 - protein, 345 aa, Oryza sativa
MPSAGAGAAFLLRPISATTHPLISLSCTGAGDSANHKSHLLFRLHHSRRRLPVPRLSLTPAPTGSNNSPPSPPPASPEPPPPPFSRWSPPRAIWRGLSALLLAGQVFHRVLTGRVHRRNLLAQLRRVGPGSAGVSLLTAAFVGMAFTIQFVREFTRLGLHRSVGGVLALALSRELSPVVTAVVAAGRVGSAFAAKLGTMQVSEQTDTLRVLGAQPVDYLVVPRVVACVLALPVLTLMSFALGLASSAFLADSIFGVSTSIILESARRALRPWDLISSLLKSQVFGAIIAVVSCAWGVTTHGGAKGVGESTTSAVVVSLVGIFVADFALSCLFFQGAGDSLKYAMG

SEQ ID NO: 17675 - DNA, 1068 bp, Medicago truncatula
  CDS (1)..(1068)
atgcaaacagcattttatagccatcctgtattctgcttctcttgcagaaacttaagtataaatccgaagagtggtttggtgaaaatccgtgcaccttatctctctcaattggattcgaaatgtgaattcaataggaggcctcatatttataactctcccatcacaattaaaccaaacagattgtttgtgctccctaacacagatgatggccacccaactgcttctaccatggatgacgaaatgaacacaaaccatgctcctaatgttatatcacccatgtttctcagcaattggtcaccgccaaggtacctatggaggggattgtcagttttaatcctagcagggcaggtaattatgaagattttaaagggaaaagttcattggaggaatactcttcaacaacttgaaagagttggtccaaagtcggttggagtatgtcttttaacctcagcctttgttgggatggccttcacgatacaatttgtgagggagttcactaggttaggattgaatagatctgtaggcggtgttttagctctggctttctctagggaactaagtcctgtggttacagcaatagttgtcgccggccgcattggaagtgcttttgcagcagaactaggaactatgcaggtttctgaacaaattgacacattaagagttcttggatcagaccctgttgattatctggtgacaccaagagtgattgcttcttgtattgccttacctcttttgaccctattgtgttttacattagggttggcatctagtgccctactcgccgatggtgtttatggaattagcattaacattatattggattcggcccaacgatctctcagagcatgggacattattagtgcaatgatcaagtcaggggcttttggtgctataatatctattgtgagctgtgcttggggagttacaacaatgggaggtgctaaaggtgttggagaatcaacaacttcagctgttgtgatttctcttgttgggatcttcattgccgattttgctctttcttgttgtttcttccaaggagctggggatcagctgaagaattgcgtttaa

SEQ ID NO: 17676 - protein, 355 aa, Medicago truncatula
MQTAFYSHPVFCFSCRNLSINPKSGLVKIRAPYLSQLDSKCEFNRRPHIYNSPITIKPNRLFVLPNTDDGHPTASTMDDEMNTNHAPNVISPMFLSNWSPPRYLWRGLSVLILAGQVIMKILKGKVHWRNTLQQLERVGPKSVGVCLLTSAFVGMAFTIQFVREFTRLGLNRSVGGVLALAFSRELSPVVTAIVVAGRIGSAFAAELGTMQVSEQIDTLRVLGSDPVDYLVTPRVIASCIALPLLTLLCFTLGLASSALLADGVYGISINIILDSAQRSLRAWDIISAMIKSGAFGAIISIVSCAWGVTTMGGAKGVGESTTSAVVISLVGIFIADFALSCCFFQGAGDQLKNCV

SEQ ID NO: 17677 - DNA, 1035 bp, Oryza sativa subsp
  CDS (1)..(1035)
atgccgtccgccggtgccggcgccgccttcctactccgtccaatctccgctaccacccaccctctcatcagcttatcctgtaccggcgccggcgacagcgcgaaccacaagtctcacctcctcttccgcctccaccattcgtgccgccgcctgcccgtgccccgcctctccctcaccccggcccccaccggcagcaataattctccgcctcgcctccgcggcgtccccggagcccccgccccctcccttctcaggtggtccccgccgcgcgcgatctggcgggggctctcggcgctgcttctcgcggggcaggtcttccaccgcgtcctcaccggccgcgtccaccgccgcaacctcctcgcgcagctccgccgcgtgggccccgggagcgcgggggtctcgctcctcaccgcggcattcgtcggcatggccttcacaatccagttcgtgcgcgagttcactcgcctcggcctccaccgctccgtcggcggcgtcctcgccctcgcgctctcccgcgagctctccccggtcgtcaccgccgtcgtcgccgcgggccgggtcggctccgcgtttgctgcagagctggggaccatgcaggtgtcggagcagaccgacaccctccgcgtccttggtgcgcagcccgtcgattacctcgtggtccctcgcgtcgtcgcttgtgtgcttgcgctgcccgtgctaaccctcatgagcttcgcgctcggtctggcgtcctcggcattcttagctgattcgatcttcggtgtcagtaccagcatcattctggagtcagcgcgaagggcgctgcggccatgggacttgatcagttccttgctaaaatctcaggtgtttggcgccattattgctgttgtgagctgtgcttggggtgtcaccacccatggtggagccaagggcgttggagagtccaccacatctgcagtggtcgtttctttagttgggattttcgttgcggatttcgctctatcatgcctgttcttccaaggagctggtgattctctcaaatatgcaatgggttga

SEQ ID NO: 17678 - protein, 344 aa, Oryza sativa subsp
MPSAGAGAAFLLRPISATTHPLISLSCTGAGDSANHKSHLLFRLHHSCRRLPVPRLSLTPAPTGSNNSPPRLRGVPGAPAPSLLRWSPPRAIWRGLSALLLAGQVFHRVLTGRVHRRNLLAQLRRVGPGSAGVSLLTAAFVGMAFTIQFVREFTRLGLHRSVGGVLALALSRELSPVVTAVVAAGRVGSAFAAELGTMQVSEQTDTLRVLGAQPVDYLVVPRVVACVLALPVLTLMSFALGLASSAFLADSIFGVSTSIILESARRALRPWDLISSLLKSQVFGAIIAVVSCAWGVTTHGGAKGVGESTTSAVVVSLVGIFVADFALSCLFFQGAGDSLKYAMG

SEQ ID NO: 17679 - DNA, 1053 bp, Arabidopsis thaliana; identical to SEQ ID NO: 17637
  CDS (202)..(1053)

SEQ ID NO: 17680 - protein, 283 aa, Arabidopsis thaliana
MSMLEEETSTENNAPSQEAELPFSKWSPSKYIWRGLSVPIIAGQVVLRILKGKIHWRNTLQQLERTGPKSLGVCLLTSTFVGMAFTIQFVREFTRLGLNRSIGGVLALAFSRELSPVITSIVVAGRMGSAFAAELGTMQVSEQTDTLRVLGADPIDYLITPRVIASCLALPFLTLMCFTVGMASSALLSDAVYGISINIIMDSAHRALRPWDIVSAMIKSQVFGAIISVISCSWGVTTTGGAKGVGESTTSAVVMSLVGIFIADFVLSSFFFQGAGDSLKNCV

SEQ ID NO: 17681 - DNA, 780 bp, Rickettsia felis
  CDS (1)..(780): transl_table=11
atgttattaaatatagctaattcggtcggtaaacgtactataaagtttgcacaaagtgtaggtagtttttctctatttagctttgctgccgttagcagtatcataagaccgcctttatatttgagtttaataatcagacaattattatttatcgggtttcactcgcttccggttgttgcgatgacgacttttttctcaggtgcggtacttgcattacagagctatacaggcttttctcgtttctcggctgaaagttccattgcaacggtagtagtattatcgctgactagagagcttggacctgtcttagccggactaatggtagctggaagagtcggggcatcaatcgccgccgaaatagctacgatgagagtaacggagcaggtagatgctttatatactttatctaccgatcctattaaatatttagtttttccaagagtaatagcagctattattacaatgccttgtcttgttttaatcggtgatataattggtgttatgggcggttatttggtaggggtatataaacttgattttaatagcacggcttatttaaccagtacttttcactatttagaaccgattgacgtaatttccggtcttgttaaagcgggagtttttgggtttattatttctataataagttgttatagcggctattattcaggtaaaggggctaagggagtgggaagagctactacctcggcagtagtaaattcttctatccttatcttaatcagtaattatttaataaccgaattattttttaaagtataa

SEQ ID NO: 17682 - protein, 259 aa, Rickettsia felis
MLLNIANSVGKRTIKFAQSVGSFSLFSFAAVSSIIRPPLYLSLIIRQLLFIGFHSLPVVAMTTFFSGAVLALQSYTGFSRFSAESSIATVVVLSLTRELGPVLAGLMVAGRVGASIAAEIATMRVTEQVDALYTLSTDPIKYLVFPRVIAAIITMPCLVLIGDIIGVMGGYLVGVYKLDFNSTAYLTSTFHYLEPIDVISGLVKAGVFGFIISIISCYSGYYSGKGAKGVGRATTSAVVNSSILILISNYLITELFFKV

SEQ ID NO: 17683 - DNA, 792 bp, Synechocystis sp
  CDS (1)..(792): transl_table=11
atgtcggatcgaggctctcgccactccctcagtctttggttccagcgtttggttgcagccttttttttaaccggccaagtttttttgcacattttgcaagggcgcattaatcggcgcaataccctggagcaaatgaatatggtcggccccgaatccatggcgatcgccttgattactgctggttttgtgggtatggtgttcaccattcaagtggcgagagaatttatttactatggggccaccacgaccattgggggagttttatccctatcgttaactagggaattggccccggtgctgacagcggtggtgatcgccgggcgggtggggtccgcctttgcggcggaaattggcaccatgcgggtaacagaacaattggatgctctgtatatgctcaggacagatccgattgattatttggtcgttccccgggtgatcgcctgtggattaatgttaccgattttgaccggattgtctctgtttgtgggcatggcgggaggattggtaatttcctccagtctttatgccattaatccaaccatttttttaaactctgtgcaaaatttcacccagctatgggatgtatttgcttgtttgttcaaatctttggtatttggcgtcatcatcgccattattggttgtagttggggcttaaccaccactgggggggccaagggagtaggcgagtccaccaccactgcagtggtcacgtccctattggccattttcatcagcaactttttcctatcttggttaatgtttcaggggacgggggataccgccctaggctag

SEQ ID NO: 17684 - protein, 263 aa, Synechocystis sp
MSDRGSRHSLSLWFQRLVAAFFLTGQVFLHILQGRINRRNTLEQMNMVGPESMAIALITAGFVGMVFTIQVAREFIYYGATTTIGGVLSLSLTRELAPVLTAVVIAGRVGSAFAAEIGTMRVTEQLDALYMLRTDPIDYLVVPRVIACGLMLPILTGLSLFVGMAGGLVISSSLYAINPTIFLNSVQNFTQLWDVFACLFKSLVFGVIIAIIGCSWGLTTTGGAKGVGESTTTAVVTSLLAIFISNFFLSWLMFQGTGDTALG

SEQ ID NO: 17685 - DNA, 1044 bp, Brassica napus
  CDS (1)..(1044)
atgatgcagacttgttgtatccatcagtcattgccatttcctcagagaattcttccaaggcacgatgcttccatcggttttaagcctcccaaactcggtttcattggaaagaatcagcctttggggattttgaatcttatacggcaaagaagattatacgtgaacttgaatgctaatgacgctcacccatccatgtctatcctagaagaagaaacctcctctgaaaacagcgcaccgactccagaagctgagcttccattcagcgaatggtcaccttctaaatccatatggagaggcttatcagtccccatcatagcaggacaagtccttctccggatactcaagggcaagatccactggagaaacactctccaacagctcgagagaaccggacccaaatctctaggagtctgccttctcacttccacattcgtcggcatggctttcaccatccagttcgttagagaattcaccaggctaggcctcaacagatccatcggaggcgtcttggctctcgccttctccagagagctcagtcctgtcatcacgtccatcgttgtcgccgggagaatgggaagcgcgtttgcagctgagctggggacaatgcaagtctcggagcaaaccgatacgctccgtgtcttaggagctgacccgattgattatctcatcacgccgagagtcatcgcttcgtgtctggccttgccgtttctgactctcatgtgttttactgtcgggatggcttcgagcgctctgctatccgatgcggtttatgggattagtattaacataatcatggactcggctcatagagcgcttagaccgtgggacattgtgagtgccatgattaagtctcaggtgtttggtgctataatatctgtgattagttgttcttggggagttaccactacgggaggtgctaaaggtgttggagaatccacaacttctgcagttgtcatgtctcttgtcggaatctttattgctgattttgtgctttcttccttcttctttcagggtgctggagattctttaaagaactgtgtgtaa

SEQ ID NO: 17686 - protein, 347 aa, Brassica napus
MMQTCCIHQSLPFPQRILPRHDASIGFKPPKLGFIGKNQPLGILNLIRQRRLYVNLNANDAHPSMSILEEETSSENSAPTPEAELPFSEWSPSKSIWRGLSVPIIAGQVLLRILKGKIHWRNTLQQLERTGPKSLGVCLLTSTFVGMAFTIQFVREFTRLGLNRSIGGVLALAFSRELSPVITSIVVAGRMGSAFAAELGTMQVSEQTDTLRVLGADPIDYLITPRVIASCLALPFLTLMCFTVGMASSALLSDAVYGISINIIMDSAHRALRPWDIVSAMIKSQVFGAIISVISCSWGVTTTGGAKGVGESTTSAVVMSLVGIFIADFVLSSFFFQGAGDSLKNCV

SEQ ID NO: 17687 - DNA, 1053 bp, Brassica napus
  CDS (1)..(1053)
atgatgcagacttgttgtattcatcatccgtctttgagttcccctcttagaactcttccaaggtgtgatgcttctgccatcggtgttaaacccccaagagtttgtaaagttggtttcactggaaaaaaacatcctttggggatttcgaggggaaggagattagatgtgaatttgaatgctaatgacgcgcacccatccatgtctatgtttgaagaagaaacctcccctgaaaacaccgcgccggtttctccagaggctgagcttccatttggcaaatggtcaccttctaaatacatttggagaggcttatcggtacctatcatagcaggacaagtcattctccggatactgaaaggtaagatccactggagaaacactcttcagcagctggagagaaccggacccaagtctctaggagtctgcctcctgacttctacgtttgttggcatggctttcactatccagttcgttagagagtttactagactaggcctcaacagatccattggaggcgtcttggctctcgccttctccagagagctcagtccagtcatcacgtccatcgttgtcgctgggagaatgggaagcgcgtttgcagctgagctggggacaatgcaagtctcggagcaaaccgatacgctccgtgtcttaggagctgacccgattgattatctcatcacgccgagagtcatcgcttcgtgtctggccttgccgtttctgactctcatgtgttttactgtcgggatggcttcgagcgctctgctatccgatgcggtttatgggattagtattaacataatcatggactcggctcatagagcgcttagaccgtgggacattgtgagtgccatgattaagtctcaggtgtttggtgctataatatctgtgattagttgttcttggggagttaccactacgggaggtgctaaaggtgttggagaatccacaacttctgcagttgtcatgtctcttgtcggaatctttattgctgattttgtgctttcttccttcttctttcagggtgctggagattctttaaagaactgtgtgtaa

SEQ ID NO: 17688 - protein, 350 aa, Brassica napus
MMQTCCIHHPSLSSPLRTLPRCDASAIGVKPPRVCKVGFTGKKHPLGISRGRRLDVNLNANDAHPSMSMFEEETSPENTAPVSPEAELPFGKWSPSKYIWRGLSVPIIAGQVILRILKGKIHWRNTLQQLERTGPKSLGVCLLTSTFVGMAFTIQFVREFTRLGLNRSIGGVLALAFSRELSPVITSIVVAGRMGSAFAAELGTMQVSEQTDTLRVLGADPIDYLITPRVIASCLALPFLTLMCFTVGMASSALLSDAVYGISINIIMDSAHRALRPWDIVSAMIKSQVFGAIISVISCSWGVTTTGGAKGVGESTTSAVVMSLVGIFIADFVLSSFFFQGAGDSLKNCV

SEQ ID NO: 17689 - DNA, 1047 bp, Brassica napus
  CDS (1)..(1047)
atgatgcagacttgttgtatccatcagtcattgccatttcctcagagaattcttccaaggcacgatgcttccatcggttttaagcctcccaaactcggtttcattggaaagaatcagcctttggggattttgaatcttatacggcaaagaagattatacgtgaacttgaatgctaatgacgcgcacccatccatgtctatcctagaagaagaaacctcccctgaaaacaccgcaccgatttctccagaagctgagcttccattcagcaaatggtcaccttctaaatacatatggagaggcttatcagtacccatcatagcaggacaagtcattctccggatactcaaaggcaagatccactggagaaacactctccaacagctcgagagaaccggacccaagtctctaggagtctgcctcctgacttctacgtttgttggcatggctttcactatccagttcgttagagagtttactagactaggcctcaacagatccattggaggcgtcttggctctagccttctccagagagctcagtccagtcatcacgtccatcgttgtcgccggaagaatgggaagcgcgtttgcagctgagctagggacaatgcaagtctcggagcaaaccgatacgctccgtgtcttaggagctgacccgattgattatctcatcacgccgagagtcatcgcttcgtgtctggccttgccgtttctgactctcatgtgttttactgtcgggatggcttcgagcgctctgctatccgatgcggtttatgggattagtattaacataatcatggactcggctcatagagcgcttagaccgtgggacattgtgagtgccatgattaagtctcaggtgtttggtgctataatatctgtgattagttgttcttggggagttaccactacgggaggtgctaaaggtgttggagaatccacaacttctgcagttgtcatgtctcttgtcggaatctttattgctgattttgtgctttcttccttcttctttcagggtgctggagattctttaaagaactgtgtgtaa

SEQ ID NO: 17690 - protein, 348 aa, Brassica napus
MMQTCCIHQSLPFPQRILPRHDASIGFKPPKLGFIGKNQPLGILNLIRQRRLYVNLNANDAHPSMSILEEETSPENTAPISPEAELPFSKWSPSKYIWRGLSVPIIAGQVILRILKGKIHWRNTLQQLERTGPKSLGVCLLTSTFVGMAFTIQFVREFTRLGLNRSIGGVLALAFSRELSPVITSIVVAGRMGSAFAAELGTMQVSEQTDTLRVLGADPIDYLITPRVIASCLALPFLTLMCFTVGMASSALLSDAVYGISINIIMDSAHRALRPWDIVSAMIKSQVFGAIISVISCSWGVTTTGGAKGVGESTTSAVVMSLVGIFIADFVLSSFFFQGAGDSLKNCV

SEQ ID NO: 17691 - DNA, 1113 bp, Zea mays
  CDS (1)..(1113)
atggaccggccgggggtttccccatctggccatctctttccccacccccacccacacgcactccagtcaccgccggcgccaagccgatctccgaccaccgcagccatgtctttcgccgccgcgctccacctacgccccacctccgccacgacgcacccgcgcctccaccaatccacccgcaaatcgtacttcctccgcttacagccgtctcgccgccgcctacccgtcccgcgcctgtccctcacgcccaccaccgccagcaatagcaacagctctcctcccccaccgtccccttcgcccgcccccgccgccccgggttccctgctcgccaactggtccccgccgcgcgcgatctggcgggggctgtcggcgctgctcctcgcgggccaggtcttccaccgcgtcctcacgggccgcgtccaccgccgcaacctcctggcgcagctccgtagggtgggtcccgggagcgcgggggtcgcgctcctcaccgctgccttcgtgggcatggccttcaccatccagttcgtgcgcgagttcacccgcctccgcctccaccgctccgtcggcggcgtcctcgcgctcgcgctcgcgcgcgagctctcgccggtcgtcacggccgtcgtcgccgcgggccgcgtcggctccgcgttcgccgccgagctcggcaccatgcaggtgtcggagcagaccgacaccttacgcgtcctcggtgcccaccccgtcgactacctcgtggtccctcgcgtgctcgcatgcgtgctcgcgctcccggtcttgacattgatcagcttcgcgctcggcctcgcgtcctcggcgttcctggccgattctgtgtttggcgtcagcgtcagcatcattttggagtcggcgcgcagggcgctgcggccatgggacttgatcagctctttgctcaaatctcaagtgtttggtgccattatcgcggtggtgagctgtgcctggggagttacaacccatggaggagccaagggtgttggcgagtctacaacatctgccgtagttgtttccttggttggaatcttcattgcagactttgctctctcgtgcctgttcttccagggtgctggtgattcgctcaagtatgcaatgggttga

SEQ ID NO: 17692 - protein, 370 aa, Zea mays
MDRPGVSPSGHLFPHPHPHALQSPPAPSRSPTTAAMSFAAALHLRPTSATTHPRLHQSTRKSYFLRLQPSRRRLPVPRLSLTPTTASNSNSSPPPPSPSPAPAAPGSLLANWSPPRAIWRGLSALLLAGQVFHRVLTGRVHRRNLLAQLRRVGPGSAGVALLTAAFVGMAFTIQFVREFTRLRLHRSVGGVLALALARELSPVVTAVVAAGRVGSAFAAELGTMQVSEQTDTLRVLGAHPVDYLVVPRVLACVLALPVLTLISFALGLASSAFLADSVFGVSVSIILESARRALRPWDLISSLLKSQVFGAIIAVVSCAWGVTTHGGAKGVGESTTSAVVVSLVGIFIADFALSCLFFQGAGDSLKYAMG

SEQ ID NO: 17693 - DNA, 1008 bp, Zea mays
  CDS (1)..(1008)
atgtctttcgccgccgcgctccacctacgccccacctccgccacgacgcacccgcgcctccaccaatccacccgcaaatcgtacttcctccgcttacagccgtctcgccgccgcctacccgtcccgcgcctgtccctcacgcccaccaccgccagcaatagcaacagctctcctcccccaccgtccccttcgcccgcccccgccgccccgggttccctgctcgccaactggtccccgccgcgcgcgatctggcgggggctgtcggcgctgctcctcgcgggccaggtcttccaccgcgtcctcacgggccgcgtccaccgccgcaacctcctggcgcagctccgtagggtgggtcccgggagcgcgggggtcgcgctcctcaccgctgccttcgtgggcatggccttcaccatccagttcgtgcgcgagttcacccgcctcggcctccaccgctccgtcggcggcgtcctcgcgctcgcgctcgcgcgcgagctctcgccggtcgtcacggccgtcgtcgccgcgggccgcgtcggctccgcgttcgccgccgagctcggcaccatgcaggtgtcggagcagaccgacaccttacgcgtcctcggtgcccaccccgtcgactacctcgtggtccctcgcgtgctcgcctgcgtgctcgcgctcccggtcttgacattgatcagcttcgcgctcggcctcgcgtcctcggcgttcctggccgattctgtgtttggcgtcagcgtcagcatcattttggagtcggcgcgcagggcgctgcggccatgggacttgatcagctctttgctcaaatctcaagtgtttggtgccattatcgcggtggtgagctgtgcctggggagttacaacccatggaggagccaagggtgttggcgagtctacaacatctgccgtagttgtttccttggttggaatcttcattgcagactttgctctctcgtgcctgttcttccagggtgctggtgattcgctcaagtatgcaatgggttga

SEQ ID NO: 17694 - protein, 335 aa, Zea mays
MSFAAALHLRPTSATTHPRLHQSTRKSYFLRLQPSRRRLPVPRLSLTPTTASNSNSSPPPPSPSPAPAAPGSLLANWSPPRAIWRGLSALLLAGQVFHRVLTGRVHRRNLLAQLRRVGPGSAGVALLTAAFVGMAFTIQFVREFTRLGLHRSVGGVLALALARELSPVVTAVVAAGRVGSAFAAELGTMQVSEQTDTLRVLGAHPVDYLVVPRVLACVLALPVLTLISFALGLASSAFLADSVFGVSVSIILESARRALRPWDLISSLLKSQVFGAIIAVVSCAWGVTTHGGAKGVGESTTSAVVVSLVGIFIADFALSCLFFQGAGDSLKYAMG

SEQ ID NO: 17695 - DNA, 21 bp, Artificial sequence
  primer
atgatgcagacttgttgtatc

SEQ ID NO: 17696 - DNA, 20 bp, Artificial sequence
  primer
tcaaacacagttcttcaaag

SEQ ID NO: 17697 - protein, 244 aa, Artificial sequence
  consensus sequence
  Variant (2)..(9): Xaa in position 2 to 9 is any amino acid
  Variant (12)..(23): Xaa in position 12 to 23 is any amino acid
  Variant (24)..(25): Xaa in position 24 to 25 is any or no amino acid
  Variant (27)..(30): Xaa in position 27 to 30 is any amino acid
  Variant (32)..(35): Xaa in position 32 to 35 is any amino acid
  Variant (38)..(38): Xaa in position 38 is any amino acid
  Variant (40)..(43): Xaa in position 40 to 43 is any amino acid
  Variant (45)..(45): Xaa in position 45 is any amino acid
  Variant (47)..(48): Xaa in position 47 to 48 is any amino acid
  Variant (50)..(50): Xaa in position 50 is any amino acid
  Variant (52)..(53): Xaa in position 52 to 53 is any amino acid
  Variant (58)..(60): Xaa in position 58 to 60 is any amino acid
  Variant (63)..(65): Xaa in position 63 to 65 is any amino acid
  Variant (67)..(71): Xaa in position 67 to 71 is any amino acid
  Variant (74)..(74): Xaa in position 74 is any amino acid
  Variant (76)..(80): Xaa in position 76 to 80 is any amino acid
  Variant (84)..(84): Xaa in position 84 is any amino acid
  Variant (87)..(87): Xaa in position 87 is any amino acid
  Variant (89)..(92): Xaa in position 89 to 92 is any amino acid
  Variant (96)..(96): Xaa in position 96 is any amino acid
  Variant (100)..(100): Xaa in position 100 is any amino acid
  Variant (104)..(104): Xaa in position 104 is any amino acid
  Variant (108)..(108): Xaa in position 108 is any amino acid
  Variant (110)..(110): Xaa in position 110 is any amino acid
  Variant (113)..(113): Xaa in position 113 is any amino acid
  Variant (115)..(115): Xaa in position 115 is any amino acid
  Variant (117)..(118): Xaa in position 117 to 118 is any amino acid
  Variant (120)..(122): Xaa in position 120 to 122 is any amino acid
  Variant (124)..(124): Xaa in position 124 is any amino acid
  Variant (128)..(129): Xaa in position 128 to 129 is any amino acid
  Variant (132)..(133): Xaa in position 132 to 133 is any amino acid
  Variant (135)..(139): Xaa in position 135 to 139 is any amino acid
  Variant (141)..(141): Xaa in position 141 is any amino acid
  Variant (143)..(149): Xaa in position 143 to 149 is any amino acid
  Variant (151)..(171): Xaa in position 151 to 171 is any amino acid
  Variant (173)..(176): Xaa in position 173 to 176 is any amino acid
  Variant (178)..(180): Xaa in position 178 to 180 is any amino acid
  Variant (182)..(187): Xaa in position 182 to 187 is any amino acid
  Variant (189)..(191): Xaa in position 189 to 191 is any amino acid
  Variant (194)..(195): Xaa in position 194 to 195 is any amino acid
  Variant (197)..(200): Xaa in position 197 to 200 is any amino acid
  Variant (202)..(202): Xaa in position 202 is any amino acid
  Variant (205)..(205): Xaa in position 205 is any amino acid
  Variant (208)..(208): Xaa in position 208 is any amino acid
  Variant (216)..(216): Xaa in position 216 is any amino acid
  Variant (220)..(220): Xaa in position 220 is any amino acid
  Variant (221)..(223): Xaa in position 221 to 223 is any or no amino acid
  Variant (227)..(228): Xaa in position 227 to 228 is any amino acid
  Variant (230)..(231): Xaa in position 230 to 231 is any amino acid
  Variant (233)..(236): Xaa in position 233 to 236 is any amino acid
  Variant (238)..(238): Xaa in position 238 is any amino acid
  Variant (241)..(243): Xaa in position 241 to 243 is any amino acid
RXXXXXXXXGQXXXXXXXXXXXXXXRXXXXQXXXXGPXSXXXXLXTXXFXGXXFTIQXXXEFXXXGXXXXXGGXLXXXXXRELXPVXTXXXXAGRXGSAXAAEXGTMXVXEQXDXLXXLXXXPXDYLXXPRXXAXXXXXPXLXXXXXXXGXXXXXXXXXXXXXXXXXXXXXSXXXXLXXXDXXXXXXKXXXFGXXIXXXXCXWGXTTXGGAKGVGXSTTXXXXAVVXXLXXIXXXXFXLSXXXF

SEQ ID NO: 17698 - protein, 33 aa, Artificial sequence
  protein pattern
  Variant (2)..(2): Xaa in position 2 is any amino acid
  Variant (5)..(5): Xaa in position 5 is any amino acid
  Variant (7)..(7): Xaa in position 7 is any amino acid
  Variant (8)..(8): Xaa in position 8 is any or no amino acid
  Variant (10)..(10): Xaa in position 10 is any amino acid
  Variant (11)..(11): Xaa in position 11 is any or no amino acid
  Variant (13)..(13): Xaa in position 13 is any amino acid
  Variant (14)..(14): Xaa in position 14 is Ala or Thr
  Variant (15)..(15): Xaa in position 15 is any amino acid
  Variant (17)..(17): Xaa in position 17 is Ile or Val
  Variant (18)..(18): Xaa in position 18 is Asp, Glu or Lys
  Variant (21)..(21): Xaa in position 21 is Ile or Val
  Variant (22)..(22): Xaa in position 22 is any amino acid
  Variant (25)..(25): Xaa in position 25 is any amino acid
  Variant (26)..(26): Xaa in position 26 is Ile, Leu or Val
  Variant (28)..(28): Xaa in position 28 is Ala, Cys or Ser
  Variant (29)..(29): Xaa in position 29 is any amino acid
  Variant (30)..(30): Xaa in position 30 is Ile, Leu or Val
  Variant (31)..(31): Xaa in position 31 is any amino acid
  Variant (32)..(32): Xaa in position 32 is Leu, Met or Val
VXEQXDXXLXXLXXXPXXYLXXPRXXAXXXXXP

SEQ ID NO: 17699 - protein, 42 aa, Artificial sequence
  protein pattern
  Variant (2)..(2): Xaa in position 2 is Ile, Leu, Met or Val
  Variant (3)..(3): Xaa in position 3 is any amino acid
  Variant (4)..(4): Xaa in position 4 is Ala, Cys, Asn, Ser or Thr
  Variant (5)..(5): Xaa in position 5 is Ala, Cys, Gly or Ser
  Variant (6)..(7): Xaa in position 6 to 7 is any amino acid
  Variant (9)..(9): Xaa in position 9 is Ala, Gly or Ser
  Variant (10)..(11): Xaa in position 10 to 11 is any amino acid
  Variant (14)..(14): Xaa in position 14 is any amino acid
  Variant (15)..(16): Xaa in position 15 to 16 is Ile, Leu or Val
  Variant (17)..(17): Xaa in position 17 is Ala or Ser
  Variant (18)..(18): Xaa in position 18 is Ala, Ile, Leu or Val
  Variant (19)..(19): Xaa in position 19 is Ile or Val
  Variant (20)..(20): Xaa in position 20 is Gly or Ser
  Variant (21)..(21): Xaa in position 21 is Cys or Thr
  Variant (22)..(23): Xaa in position 22 to 23 is any amino acid
  Variant (25)..(25): Xaa in position 25 is Phe, Ile, Leu or Val
  Variant (26)..(26): Xaa in position 26 is any amino acid
  Variant (27)..(27): Xaa in position 27 is Ala or Thr
  Variant (28)..(28): Xaa in position 28 is any amino acid
  Variant (32)..(32): Xaa in position 32 is Glu, Lys or Arg
  Variant (36)..(36): Xaa in position 36 is any amino acid
  Variant (37)..(37): Xaa in position 37 is Ala or Ser
  Variant (40)..(40): Xaa in position 40 is Ala, Glu, Gly, Gln, Ser or Thr
  Variant (41)..(41): Xaa in position 41 is Ala or Ser
DXXXXXXKXXXFGXXXXXXXXXXGXXXXGGAXGVGXXTTXXV

SEQ ID NO: 17700 - protein, 27 aa, Artificial sequence
  protein pattern
  Variant (4)..(4): Xaa in position 4 is Ala, Cys, Gly or Ser
  Variant (6)..(6): Xaa in position 6 is Ile or Val
  Variant (7)..(7): Xaa in position 7 is Ile, Leu, Met or Val
  Variant (8)..(8): Xaa in position 8 is Ala or Thr
  Variant (9)..(9): Xaa in position 9 is Ala, Gly or Ser
  Variant (10)..(10): Xaa in position 10 is Ile, Leu or Val
  Variant (11)..(11): Xaa in position 11 is Ile, Met or Val
  Variant (12)..(12): Xaa in position 12 is Ala, Ile, Leu or Val
  Variant (16)..(16): Xaa in position 16 is Ile, Met or Val
  Variant (18)..(18): Xaa in position 18 is any or no amino acid
  Variant (20)..(20): Xaa in position 20 is any or no amino acid
  Variant (22)..(22): Xaa in position 22 is any or no amino acid
  Variant (24)..(24): Xaa in position 24 is Ala or Glu
  Variant (25)..(25): Xaa in position 25 is any amino acid
  Variant (26)..(26): Xaa in position 26 is Ala, Ile, Leu or Val
  Variant (27)..(27): Xaa in position 27 is Gly or Thr
RELXPXXXXXXXAGRXGXSXAXAXXXX

SEQ ID NO: 17701 - DNA, 2199 bp, Arabidopsis thaliana
  CDS (1)..(2199)
atgagtaatcagaagaagaggaattttcagatagaggcgtttaagcatcgagtcgttgtggatcccaaatacgctgataaaacttggcagattcttgagcgtgcgatccatcagatttacaatcaagatgctagcggtctcagtttcgaagaactttacagaaatgcgtacaacatggtcctgcacaagtttggtgagaagctatatactgggtttattgctactatgacttctcatctcaaagaaaaatccaagcttatcgaggcagctcagggagggtcgtttctagaagagcttaataagaaatggaatgagcacaacaaagcgttagagatgattcgagacattctcatgtatatggataggacttatattgagagcaccaaaaagactcatgttcatccgatggggcttaacttgtggagggataatgttgtgcatttcactaagatacatacaaggcttctaaacactcttcttgatctagtgcagaaggaacggataggtgaagttattgatagggggttgatgaggaatgtcattaagatgtttatggatttgggtgaatctgtgtatcaggaggattttgagaagccgtttttggatgcgtcttctgagttttataaggttgagtctcaggagtttattgaatcttgtgattgtggggactatctgaagaaatcagagaaacgccttactgaagagatagagagggtagcgcactacttagatgccaagagcgaagagaagattactagtgtggttgagaaagagatgattgccaaccacatgcagagactggttcacatggagaactcaggtctggttaatatgcttctgaatgacaagtatgaggatttgggtagaatgtacaacttgtttcgcagggttactaatggtcttgttactgtcagagacgttatgacttcgcatcttagggagatgggaaaacaactggttactgatccggaaaagtcaaaggatccggtggaatttgtacaacgtctattggatgagcgggataaatatgacaaaatcatcaacaccgcatttggcaatgataaaacctttcagaatgccctgaattcttcattcgagtatttcatcaacttgaatgctcgttctcctgagtttatctccctgtttgttgatgacaagctacggaaaggacttaagggtatcaccgatgtggatgttgaggttatccttgataaagtgatgatgctgttccgttatttacaagagaaagatgtctttgagaagtactacaagcagcatttggctaaaaggcttctctcaggcaaaactgtgtcagatgacgcagaaaggagtttaatagtgaaactaaagacagaatgtggctatcagttcacttcaaaattggaaggcatgttcactgacatgaagacttcagaggacacaatgcgtgggttttatggcagtcaccccgagctttcagaaggacctacacttattgttcaggtacttacaactggttcttggccaacacagcctgcagtaccttgtaatctcccagctgaagtttcagttctctgtgagaagttccgttcttactaccttgggacacataccggtagaagattgtcctggcaaacaaacatgggcacagcagatatcaaagccatctttggaaagggtcagaaacatgaactgaacgtgtcgactttccagatgtgtgttctcatgttgttcaacaattctgatcgactcagctacaaagagatcgaacaggctacagaaatcccggcagcagatcttaaacgctgtttgcagtcgctagcttgtgtaaagggcaaaaacgtgataaagaaagaacccatgagcaaagacataggagaggaggatttgttcgttgtgaacgacaagttcactagcaagttttacaaagtgaagatcggaactgtggttgcccaaaaggaaacagaaccggagaagcaagagacgagacagagagtggaggaagacagaaaacctcagattgaagcagccatcgtaaggatcatgaagtccaggaaaatactagaccacaacaacataatcgccgaggtgacgaaacagttgcagccacggttcctagctaatcccacggagataaagaagagaatcgagtcgctcattgaacgagatttcttggaaagggatagtacagaccggaaactttaccgctatctagcctaa

SEQ ID NO: 17702 - protein, 732 aa, Arabidopsis thaliana
MSNQKKRNFQIEAFKHRVVVDPKYADKTWQILERAIHQIYNQDASGLSFEELYRNAYNMVLHKFGEKLYTGFIATMTSHLKEKSKLIEAAQGGSFLEELNKKWNEHNKALEMIRDILMYMDRTYIESTKKTHVHPMGLNLWRDNVVHFTKIHTRLLNTLLDLVQKERIGEVIDRGLMRNVIKMFMDLGESVYQEDFEKPFLDASSEFYKVESQEFIESCDCGDYLKKSEKRLTEEIERVAHYLDAKSEEKITSVVEKEMIANHMQRLVHMENSGLVNMLLNDKYEDLGRMYNLFRRVTNGLVTVRDVMTSHLREMGKQLVTDPEKSKDPVEFVQRLLDERDKYDKIINTAFGNDKTFQNALNSSFEYFINLNARSPEFISLFVDDKLRKGLKGITDVDVEVILDKVMMLFRYLQEKDVFEKYYKQHLAKRLLSGKTVSDDAERSLIVKLKTECGYQFTSKLEGMFTDMKTSEDTMRGFYGSHPELSEGPTLIVQVLTTGSWPTQPAVPCNLPAEVSVLCEKFRSYYLGTHTGRRLSWQTNMGTADIKAIFGKGQKHELNVSTFQMCVLMLFNNSDRLSYKEIEQATEIPAADLKRCLQSLACVKGKNVIKKEPMSKDIGEEDLFVVNDKFTSKFYKVKIGTVVAQKETEPEKQETRQRVEEDRKPQIEAAIVRIMKSRKILDHNNIIAEVTKQLQPRFLANPTEIKKRIESLIERDFLERDSTDRKLYRYLA

SEQ ID NO: 17703 - DNA, 2579 bp, Zea mays
  CDS (106)..(2316)
gggcgggccggccgggggctctccctgtgtgcggtgtgcatcccgcttccgcccgcgtccacccacccgtcccgccccgcccccgaaccctaacctctggcggcgatgagcagcggcggcccgccgaggaagcgcaacttcaagatcgaggcgttcaagaaccgtgtggacctcgaccccaagtacgcggagcggacatggaaggtcctcgagcacgccatccacgagatctacaaccgtaacgccagtggtctctccttcgaggagctttacaggagtgcctacaacatggtgcttcacaagtacggagagaagctgtatgatggccttcagagcacaatgacttggcgcttgaaggaaatatcaaaatcaatagaggctgcacagggtggcttatttttggaggagctgaatgcaaagtggatggatcacaacaaggcactacagatgatacgagatattcttatggacatggacaggacatatgtccctacatctcataggacacctgttcatgagcttggtctgaatttgtggagggatcacataattcactcccccatgatccatagtcggctggttaacacccttttggatcttataaaaagggaaagaatgggtgaagtgattaacagaggcctgatgaggagcataacaaagatgctgatggacctgggtcctgctgtgtatcaagacgattttgagaaaccatttctggatgtttcagcccgcttctacagtgtggagtctcaagagttcattgtgtgctgtgactgtgggaactaccttaagaaggccgagagacgtctaaatgaggaaatggagcgtgtctcacactacttggatgctggcagtgaggcaaagataactagtgtagtggagaaagaaatgatagccaatcacatgcacagattggttcacatggaaaattcagggcttgttaacatgctagtagatgaccaatacaaagatttgggtcggatgtattccttgttccgaagggttcctgatgggttatcaacgattagagatgtcatgacttcttacttgagggaaacagggaagcagttagtgatagatccagaaagtttgaaagatccagtggaatttgttcaacgcttgttaaatgagaaggacaaacatgataagatcatcagtgttgccttcggcaatgacaaaaccttccagaatgctctgaattcgtctttcgagtatttcctcaacttaaacagccgatcacctgaattcatatcattatatgttgatgacaaactccgcaaaggacttaaaggagcaacggaagaagatgtggaagttatattggacaaagtcatgatgctgttccgatacctccaggagaaggatgtgtttgaaaagtactataagcagcatttggcgaaaaggctcctgtctagcaaaactgtttctgatgatgctgagagaagtatgatagttaaactcaagacagaatgtggataccagttcacttccaagctagagggcatgttcactgatatgaaaacctcccaggacaccatgcaagacttctatgccaagaagtctgaggaacttggggatggccctacgcttgatgtccacattttgacaactggttcttggcctacgcagcccagtcctccttgcaaccttccaactgaaatacttacagtatgtgagaaattccgggcatattatcttggaactcacaatggcaggagattgacatggcaaacaaacatgggtacagctgatataaaagccacatttggaaaaggccagaagcatgaactaaatgtatccacttatcagatgtgtgttctcatgctgtttaacaatgctgatggattgacctacaaagacattgaacgggatactgagatacctgcctcagacctaaagagatgtctgcagtcacttgcttgtgtcaaggggaaaaatgttctccgtaaggagcctatgagcaaggacatatctgaggatgacacattctacttcaatgataagttcacaagcaagcttgttaaagtgaagattgggacagtggtggcacagaaggaatctgaaccagagaaacaggagactcgccaacgggttgaggaggacaggaaacctcagatcgaagcagccattgtcaggatcatgaaatcacggagggtgttggatcataacagcattgtagctgaggtcaccaagcaattgcaagcccgtttcttgccaaatcctgttgtcataaagaaacgcattgaatctctgattgaacgagagttcttggaaagagacaaagtagatagaaaattatatcgttatcttgcatagaaaactgtcatgagataattcattagcagttggcatccttctgctcttgtaaaacggttttctttatgctcgagttctcttttatcagttgcattggccgctgggttcatagatgttcaaacattggttattggttgaccgcgaactgaagtggtgattgtattgaagtggttcatagatgttcaacacttactctttttgtttgatgggtctgcaactgcaagaactaagaagccatattatctgtttcctgtgttgcattc

SEQ ID NO: 17704 - protein, 736 aa, Zea mays
MSSGGPPRKRNFKIEAFKNRVDLDPKYAERTWKVLEHAIHEIYNRNASGLSFEELYRSAYNMVLHKYGEKLYDGLQSTMTWRLKEISKSIEAAQGGLFLEELNAKWMDHNKALQMIRDILMDMDRTYVPTSHRTPVHELGLNLWRDHIIHSPMIHSRLVNTLLDLIKRERMGEVINRGLMRSITKMLMDLGPAVYQDDFEKPFLDVSARFYSVESQEFIVCCDCGNYLKKAERRLNEEMERVSHYLDAGSEAKITSVVEKEMIANHMHRLVHMENSGLVNMLVDDQYKDLGRMYSLFRRVPDGLSTIRDVMTSYLRETGKQLVIDPESLKDPVEFVQRLLNEKDKHDKIISVAFGNDKTFQNALNSSFEYFLNLNSRSPEFISLYVDDKLRKGLKGATEEDVEVILDKVMMLFRYLQEKDVFEKYYKQHLAKRLLSSKTVSDDAERSMIVKLKTECGYQFTSKLEGMFTDMKTSQDTMQDFYAKKSEELGDGPTLDVHILTTGSWPTQPSPPCNLPTEILTVCEKFRAYYLGTHNGRRLTWQTNMGTADIKATFGKGQKHELNVSTYQMCVLMLFNNADGLTYKDIERDTEIPASDLKRCLQSLACVKGKNVLRKEPMSKDISEDDTFYFNDKFTSKLVKVKIGTVVAQKESEPEKQETRQRVEEDRKPQIEAAIVRIMKSRRVLDHNSIVAEVTKQLQARFLPNPVVIKKRIESLIEREFLERDKVDRKLYRYLA

SEQ ID NO: 17705 - DNA, 2235 bp, Oryza sativa (japonica cultivar-group)
  CDS (1)..(2235)
atggcgacccacgagcggaagacgatcgatctggagcaggggtgggagttcatgcagaagggcatcaccaagctgaagaacatcctcgaggggaagcccgaaccccagttcagctccgaggactacatgatgctctacacgacgatttacaacatgtgcacgcagaagccgccgcacgactactcgcagcagctctacgagaagtaccgcgagtccttcgaggagtacatcacgtccatggtcttaccttcattaagagagaaacatgatgagtttatgctgagagagctagtaaaacggtggtcaaaccataaagtgatggttcggtggctatcacgcttcttccattatcttgatcggtactttatttcaaggaggtccctaccacaactaagtgaagttgggcttagctgtttccgggatctggtatatcaagagatcaaaggaaaagtaaaaagtgcggtgatatccttgatagatcaagaacgtgagggtgaacaaattgatagggccctgttaaagaatgttctggatatatttgttgagattggcttgactagcatggactactacgaaaatgattttgaagatttcttgctcaaagatactgcagactattactctataaaagcccagacctggattcttgaggactcttgtccagattacatgttaaaggcagaggagtgtctgaaaagggagaaagagcgagttgctcattatttgcactccagtagtgaacagaagttgttggagaaagtgcaacatgagttgctaactcaatacgcaagtcagctcctggagaaggagcattctggatgccatgcattgcttcgtgatgacaaggttgatgatctctctagaatgtacaggctcttttccagaataactcgtggtttagaacctgtttctcaaatatttaagcagcatgttactaatgagggcactgccttagtgaagcaagccgaagatgctgctagtaataagaagccagagaagaaggagatagttggtttacaggaacaggtttttgtccggaaaatcattgagcttcatgacaagtatgtagcttatgttacggattgttttcaggggcacactctcttccataaggcacttaaggaggcttttgaagttttttgcaacaaaggtgtttctggcagttcaagtgctgaattactagctaccttctgtgacaatatcttaaagaaaggcggtagtgaaaagcttagtgatgaagcaattgaagatacccttgagaaggttgtaaggttacttgcctacattagtgacaaggacttgtttgctgagttctatagaaagaagcttgcaaggagattgctttttgacaagagtgctaatgatgaacatgagagaagcatccttaccaagctaaagcaacaatgtggagggcagttcacttccaaaatggagggcatggttactgatctcactgtggcaagagatcaccaggctaaatttgaagagttcataagcacacactcagagttgaatcctggaatagccttagctgttactgtcctcacaacaggattttggccaagttacaaatcttttgatataaatctacctgcagaaatggtgaaatgtgtagaggttttcaaggagttttaccaaacaagaacaaaacacaggaaacttacctggatttattcactgggaacctgtaatattaatgctaaatttgaggccaaaactattgagctcattgttacaacttatcaggctgcattgctgctgctgtttaatggagttgatagactcagctattctgagattgtgacacagttaaatctctcagatgatgatgttgttcgattgctccattctctatcttgtgcaaaatacaagattcttagcaaagaaccaaataatagatctatttcaccaaatgatgtcttcgagttcaactcaaagtttactgacaagctgcgaagattaaagatacctcttcctccagttgatgagaagaagaaagtagttgaagatgttgataaggatcgcagatacgcaattgatgcatcaattgtgcgtattatgaagagtcgcaaagtattgggtcatcagcaacttgtgatggaatgtgtggagcagcttggacgcatgtttaagcctgacttcaaggcaataaagaagcgaattgaggatcttatcacaagggattacttggagagggataaagacaacccaaatgtgtacagatacttggcttga

SEQ ID NO: 17706 - protein, 744 aa, Oryza sativa (japonica cultivar-group)
MATHERKTIDLEQGWEFMQKGITKLKNILEGKPEPQFSSEDYMMLYTTIYNMCTQKPPHDYSQQLYEKYRESFEEYITSMVLPSLREKHDEFMLRELVKRWSNHKVMVRWLSRFFHYLDRYFISRRSLPQLSEVGLSCFRDLVYQEIKGKVKSAVISLIDQEREGEQIDRALLKNVLDIFVEIGLTSMDYYENDFEDFLLKDTADYYSIKAQTWILEDSCPDYMLKAEECLKREKERVAHYLHSSSEQKLLEKVQHELLTQYASQLLEKEHSGCHALLRDDKVDDLSRMYRLFSRITRGLEPVSQIFKQHVTNEGTALVKQAEDAASNKKPEKKEIVGLQEQVFVRKIIELHDKYVAYVTDCFQGHTLFHKALKEAFEVFCNKGVSGSSSAELLATFCDNILKKGGSEKLSDEAIEDTLEKVVRLLAYISDKDLFAEFYRKKLARRLLFDKSANDEHERSILTKLKQQCGGQFTSKMEGMVTDLTVARDHQAKFEEFISTHSELNPGIALAVTVLTTGFWPSYKSFDINLPAEMVKCVEVFKEFYQTRTKHRKLTWIYSLGTCNINAKFEAKTIELIVTTYQAALLLLFNGVDRLSYSEIVTQLNLSDDDVVRLLHSLSCAKYKILSKEPNNRSISPNDVFEFNSKFTDKLRRLKIPLPPVDEKKKVVEDVDKDRRYAIDASIVRIMKSRKVLGHQQLVMECVEQLGRMFKPDFKAIKKRIEDLITRDYLERDKDNPNVYRYLA

SEQ ID NO: 17707 - DNA, 2241 bp, Oryza sativa (japonica cultivar-group)
  CDS (1)..(2241)
atgaatatgtcgccgcgcattccggtggtggacctcgaggacgggtggcgcgacgtgctcgccggcgtcgccaagctcaagtgcatcctcgatggctccaacgtcgtgcacttcgtccccgacgagtacatgcacctctacacgacggtttacaacatgtgcacgcagaagccgccgaacgactactcgcaggtgctctacgatcgctacaagcaggccctggacgatcacatcgaatccgtcgtgttgccctccttgaatgagaagcatggcgtgttccttctgagggaaatagtgcagaggtgggagaaacacaagctaatggtaaggtggctgaggaggttctttgactacctcgatcgttactatgttacacggaggtcccttgattcactcaaagatctgggctggagtagcttccgggatttggttttcgataagctcaaaagtactgtggcaacaattatgattggcatgattgatgatgagagggaaggcaatctaatagaccgtccactcctgaagaatgcccttgatatctatgttgaaattggggatagtcaactgaattattacagtgatgattttgaacaatcatttctcaacggaacaacagattactattctaagaaggcacaaacatggattcttgagaattcttgccctgaatacatgctcaaggctgaggaatgcttacaaaaagagaaagaccgggttgcaaattacttgcattctactacagaaccaaagctatttgcggctgcactcttcgagttgatagataggcgtgcagaagaaattctgaacaaggagaactccggatgcaaagtgttgctttgtgatgaaaagaccgaggatctagcaaggatgtttaggctcttctctaggataactgacgggctgcttccagtatcgaaaatatttaaggagcatgtcattgctgagggtatgtctctgctgaaacatgcaacagatgctgccaacagcagaaaggatgagaagaagggggtggtggtgggattgccggagcaggattttgtgaggagtgtcatagagctccatgacaaatatatggcatatgtcaccaactgtttccagagcaactcagtatttcacaaggcacttaaggaggcctttgaagttatttgcaacaaagatgttgttggttgcagtagtgctgaactgtttgcggcatactgtgatagtatcttaaaaagaggtggaagtgaaaagctaagtgatgaagctatagatgaaagtcttgagaaggttgtcaagcttctaacatatctcagcgacaaggacctctttgtagagtttcataggaagaaacttggaaggagattgctgtttgataagaatacaaatgacgaacatgagagaatcctactctccaagctgaagcaattcttcgggggacagtttacatcaaaaatggaggggatgctcaaagatattacattggcaaaagaacatcagtcaagttttgaggagtacgtaagcaacaatccagagtcaaatcctctgatagacttgaatgtgactgtcttgacaacaggatactggccaacatacaagaactcagatataaatcttccattggagatggttaaatgcgtggaggttttcaaggaatattatcggtccgacaagcaacacagaaagcttacctggatcttttccttgggaaactgcgtcgtcattggaaattttgatgctaaacctgttgagttcgttctcaacacttatcaggctgcattgttgctgctattcaatgaagctgataaactgagttactctgatattgtgtcacaattaaaactgtctgatgatgatgccgtgcgtttgcttcattcgctttcttgtgcaaagtataagattctcaacaaagagcctagcaacagagtgatttctccagaggacgagtttgagttcaattccaaatttaccgataggatgcgaaggattaaggtaccacttcctcaaatcgatgagaagaaaaaggttgtcgatgatgtcaacaaggacaggaggttcgcaattgatgcatctcttgtgcgcatcatgaaaagccgcaaagttctgggccatcagcaacttgtagcggaatgcgtggagcagctcagccgcatgtttaagcctgacatcaagatcatcaagaggaggatcgaggatcttatcagcagggagtacttggagcgtgattcggagaatgcccagacctacaaatacttggcttga

SEQ ID NO: 17708 - protein, 746 aa, Oryza sativa (japonica cultivar-group)
MNMSPRIPVVDLEDGWRDVLAGVAKLKCILDGSNVVHFVPDEYMHLYTTVYNMCTQKPPNDYSQVLYDRYKQALDDHIESVVLPSLNEKHGVFLLREIVQRWEKHKLMVRWLRRFFDYLDRYYVTRRSLDSLKDLGWSSFRDLVFDKLKSTVATIMIGMIDDEREGNLIDRPLLKNALDIYVEIGDSQLNYYSDDFEQSFLNGTTDYYSKKAQTWILENSCPEYMLKAEECLQKEKDRVANYLHSTTEPKLFAAALFELIDRRAEEILNKENSGCKVLLCDEKTEDLARMFRLFSRITDGLLPVSKIFKEHVIAEGMSLLKHATDAANSRKDEKKGVVVGLPEQDFVRSVIELHDKYMAYVTNCFQSNSVFHKALKEAFEVICNKDVVGCSSAELFAAYCDSILKRGGSEKLSDEAIDESLEKVVKLLTYLSDKDLFVEFHRKKLGRRLLFDKNTNDEHERILLSKLKQFFGGQFTSKMEGMLKDITLAKEHQSSFEEYVSNNPESNPLIDLNVTVLTTGYWPTYKNSDINLPLEMVKCVEVFKEYYRSDKQHRKLTWIFSLGNCVVIGNFDAKPVEFVLNTYQAALLLLFNEADKLSYSDIVSQLKLSDDDAVRLLHSLSCAKYKILNKEPSNRVISPEDEFEFNSKFTDRMRRIKVPLPQIDEKKKVVDDVNKDRRFAIDASLVRIMKSRKVLGHQQLVAECVEQLSRMFKPDIKIIKRRIEDLISREYLERDSENAQTYKYLA

SEQ ID NO: 17709 - DNA, 2211 bp, Oryza sativa (japonica cultivar-group)
  CDS (1)..(2211)
atgagcgggggcgggccgccgaagaaacgcaacttcaagatcgagctgttcaagcaccgcgtggagctcgaccccaagtacgcggagcggacatggaaggtcctggagcacgccatccacgagatctacaaccacaacgccagtggcctctccttcgaggagctctacaggagtgcctacaacatggtgctccacaagtatggtgagaagctatatgatggcctggagagaactatgacatggcgcttgaaggaaatatcaaaatcaatagaggctgcacagggtggtttgtttctggaggagctgaatgccaagtggatggatcacaataaggcattgcagatgatccgagatattctaatgtacatggatcgaacatatgtcccgcaatcccgtagaacacctgttcatgagcttggtttgaatttgtggagggatcacataattcactctcccatgattcatagtcggctgcttgatacccttctggatcttattcacagggagagaatgggtgaaatgattaacagaggcctgatgaggagcataacgaaaatgttaatggatcttggtgctgctgtatatcaagatgactttgagaagccgtttttggatgttacagctagcttctacagtggagagtctcaggagttcattgagtgctgtgactgtgggaactatcttaagaagtccgagagacgtctcaatgaggaaatggaacgtgtctcacactacttggattctggcactgaggcaaagataactagtgtggttgagaaagaaatgattgccaatcacatgcatagattggttcatatggaaaactcaggccttgtaaatatgcttgtagatgacaaatatgacgacttggctaggatgtacaacttattccgaagggtttttgatgggctatcgacaatcagagatgtgatgacttcatacctaagggaaacagggaagcagttagtgacagatcctgagaggttgaaagacccagtggaatttgttcagcgcttgttaaatgagaaggacaagcatgataagatcatcaacgttgcttttggcaatgacaaaactttccagaatgctctaaattcatcctttgagtacttcatcaacttaaacaacaggtcacctgaattcatatcgttgtatgttgatgataaacttcggaaaggattgaaaggagccacagaagaggatgtggaggttattctggacaaagtcatgatgctgtttcggtacctccaggagaaggatgtatttgagaagtactacaagcagcatttggcgaaaagactattgtctggcaaaactgtttctgatgatgctgagaggagtatgatagttaaactcaagacagaatgtgggtaccagttcacttccaaattagagggcatgttcactgacatgaagacctctcaggacactatgatagacttttatgccaagaagtctgaggaacttggcgatggcccaacacttgatgtccacattcttacaactggttcttggccaacacagccctgccctccctgcaaccttccaactgaaatccttgcaatatgtgataagttccggacatactaccttggaactcacagtggccggagattgacatggcaaacaaacatgggaacagctgacataaaagccacatttgggaaaggtcagaagcatgaactaaatgtatccacttatcagatgtgtgttctcatgctgtttaattctaccgatgggttaacctacaaagacatcgaacaagatactgcgatacctgcctcggatctaaagagatgccttcaatctcttgcttgtgtcaaggggaagaatgttctccgcaaggaacccatgagcaaagatatatcggaggatgacacattctacttcaacgacaagttcacaagcaagcttgttaaggtcaagattgggacagtagtggcgcaaaaggaatctgagccagagaaacaagagactcgtcaacgggttgaggaggacaggaaacctcaaattgaggctgctatcgtcaggattatgaaatccaggagggtcttggatcataacagcattgtagctgaggttaccaagcaattgcaagcccgattcatgccgaatcctgttgtcataaagaaacgcatagaatctctaattgagcgtgaattcttagagagggacaaagcagataggaagttatatcgctatcttgcatag

SEQ ID NO: 17710 - protein, 736 aa, Oryza sativa (japonica cultivar-group)
MSGGGPPKKRNFKIELFKHRVELDPKYAERTWKVLEHAIHEIYNHNASGLSFEELYRSAYNMVLHKYGEKLYDGLERTMTWRLKEISKSIEAAQGGLFLEELNAKWMDHNKALQMIRDILMYMDRTYVPQSRRTPVHELGLNLWRDHIIHSPMIHSRLLDTLLDLIHRERMGEMINRGLMRSITKMLMDLGAAVYQDDFEKPFLDVTASFYSGESQEFIECCDCGNYLKKSERRLNEEMERVSHYLDSGTEAKITSVVEKEMIANHMHRLVHMENSGLVNMLVDDKYDDLARMYNLFRRVFDGLSTIRDVMTSYLRETGKQLVTDPERLKDPVEFVQRLLNEKDKHDKIINVAFGNDKTFQNALNSSFEYFINLNNRSPEFISLYVDDKLRKGLKGATEEDVEVILDKVMMLFRYLQEKDVFEKYYKQHLAKRLLSGKTVSDDAERSMIVKLKTECGYQFTSKLEGMFTDMKTSQDTMIDFYAKKSEELGDGPTLDVHILTTGSWPTQPCPPCNLPTEILAICDKFRTYYLGTHSGRRLTWQTNMGTADIKATFGKGQKHELNVSTYQMCVLMLFNSTDGLTYKDIEQDTAIPASDLKRCLQSLACVKGKNVLRKEPMSKDISEDDTFYFNDKFTSKLVKVKIGTVVAQKESEPEKQETRQRVEEDRKPQIEAAIVRIMKSRRVLDHNSIVAEVTKQLQARFMPNPVVIKKRIESLIEREFLERDKADRKLYRYLA

SEQ ID NO: 17711 - DNA, 2196 bp, Oryza sativa (japonica cultivar-group)
  CDS (1)..(2196)
atgaactcgcagaagaagcgcagccccaagatcgagcccttccggcaccgcgtggatgcggacccaaagtccttcgacaaatcgtggaagaagctcgaggacgccatccgcgagatttacaaccacaacgccagcggcctctccttcgaggagctgtacaggactgcttataacttggttcttcacaagcatggtctgaagctatatgataaactcacagagaatttaaaaggacacctgaaagaaatgtgcagatcaatagaggatgcccaaggtagtttgtttctggaggaactgcagagaagatgggctgatcacaataaggcactacaaatgatcagagatatactcatgtatatggataggacatttattgcaactaacaaaaagacacctgtctttgaccttggtctagagttgtggagagatatcgttgtccgcactcccaaaattcatgggaggttgcttgacacactccttgaactcattcatagagagaggatgggtgagatgataaacagaggtctgatgaggagtaccaccaaaatgttgatggatctagggtcttctgtctatcatgatgactttgagaagccattccttgaggtatccgcaagtttctatagtggtgagtcacaacagttcattgagtgctgtgattgtggcgaatatctcaagaaagctgagagacggcttgctgaagagttggagcgtgtttctcagtatatggatgccaaaaccgcagacaaaataactagtgttgtggacactgagatgcttgcaaatcacatgcagcggttgattcttatggagaattctggtcttgtgaatatgcttgttgatgacaaacatgaagaccttagcaggatgtacaacttgtttaaacgtgttcctgatgggcattcaacaattagatctgtgatggcctctcatgttaaggaaagtggaaaggcattggtatctgacccagagaagataaaggaccctgttgagtttgtccagcgtcttctaaatgagaaagacaagtatgatgagatcataagtatttcattcagcaatgacaaggctttccaaaatgctctgaattcctccttcgagaatttcatcaacttgaacaaccgatctcctgaattcatttcgctgtttgttgatgacaagctccggaaaggggtgaaaggggccaatgaagaggatgttgaaactgtcttggacaaggtgatgatgctcttcagatatttgcaggagaaagatgtttttgagaaatattacaagcaacacttggccaaacgtcttctatctgggaaaactacttctgatgaagctgagaggagtatgcttgtgaagctgaagacggaatgtggctaccagtttacgtcaaaattggaaggcatgttcaatgatctgaagacatcgcatgatactatgcaaagtttttatgctaatctctctggtgatactgatagcccaacaatatcagtccagatactcaccactgggtcttggccaacacagccatgtaccccctgcaaacttccacctgaaattgttgatatatctgagaaattccgggcattctaccttggcacccacaatggcaggagattgacatggcaaacaaacatggggaatgcagatatcaaagcaacgttcggaggccgcaggcatgagttgaatgtctcgacatatcagatgtgtgtcctgatgctgtttaattcagcagatggcttgacttacggtgacattgagcaggccacaggtataccacatgctgatctgaaacgctgcctccagtctcttgcttgtgttaagggtaagaatgtgctgcggaaggaacccatgagcaaggatatatctgaagatgacactttctactacaatgacaagttcacaagcaagttggtcaaggtgaagattggcaccgtggttgctcagaaagaaacagaaccagagaagttggaaactcgccagagagttgaggaagacaggaaacctcaaattgaggctgcaattgtcagaatcatgaagtccagaagagtcttggaccacaatagcataatcacggaggtgacaaagcagcttcaatcgcgctttttgccaaatcctgttgtgataaagaaaagaatagagtccctgatcgagagggagttcttggagagggacaaggtagataggaagatgtaccgttatcttgcatag

SEQ ID NO: 17712 - protein, 731 aa, Oryza sativa (japonica cultivar-group)
MNSQKKRSPKIEPFRHRVDADPKSFDKSWKKLEDAIREIYNHNASGLSFEELYRTAYNLVLHKHGLKLYDKLTENLKGHLKEMCRSIEDAQGSLFLEELQRRWADHNKALQMIRDILMYMDRTFIATNKKTPVFDLGLELWRDIVVRTPKIHGRLLDTLLELIHRERMGEMINRGLMRSTTKMLMDLGSSVYHDDFEKPFLEVSASFYSGESQQFIECCDCGEYLKKAERRLAEELERVSQYMDAKTADKITSVVDTEMLANHMQRLILMENSGLVNMLVDDKHEDLSRMYNLFKRVPDGHSTIRSVMASHVKESGKALVSDPEKIKDPVEFVQRLLNEKDKYDEIISISFSNDKAFQNALNSSFENFINLNNRSPEFISLFVDDKLRKGVKGANEEDVETVLDKVMMLFRYLQEKDVFEKYYKQHLAKRLLSGKTTSDEAERSMLVKLKTECGYQFTSKLEGMFNDLKTSHDTMQSFYANLSGDTDSPTISVQILTTGSWPTQPCTPCKLPPEIVDISEKFRAFYLGTHNGRRLTWQTNMGNADIKATFGGRRHELNVSTYQMCVLMLFNSADGLTYGDIEQATGIPHADLKRCLQSLACVKGKNVLRKEPMSKDISEDDTFYYNDKFTSKLVKVKIGTVVAQKETEPEKLETRQRVEEDRKPQIEAAIVRIMKSRRVLDHNSIITEVTKQLQSRFLPNPVVIKKRIESLIEREFLERDKVDRKMYRYLA

SEQ ID NO: 17713 - DNA, 2229 bp, Oryza sativa (japonica cultivar-group)
  CDS (1)..(2229)
atgggcgttcatgcagaagggcatcaccaagctgaagaacatcctcgagggcaagcccgagccacagttcagctccgaggactacatgatgctctacacgtacgtcccccgccgccgccgccgcctcctcctgggacgatatacaacatgtgcacgcagaagccgccgcacgactactcgcagcagctctacgacaagtaccgggagtcattcgaggagtacatcacctccatggtcttaccttcattaagagataaacatgacgagtttatgctgagggaactagtaaagaggtggtcaaaccataaaatcatggttcggtggctgtcacgtttcttcttttatcttgatcgatacttcatctcacggaggtcgcttataccacttgaacaagttgggcttacttgcttccgagatttgatataccaagaaatcaaaggacaagttaaaggtgcagtgatagctctgattgacaaagagcgtgaaggcgaacagatagacagggccctgctgaagaatgtcctgggcatatttgttgaaattggactaggcagtatggaatgttatgagaatgactttgaagatttcttgcttaaggatactacagattactactctctcaaggctcaaagctggattctcgaggactcttgtcctgattacatgataaaggctgaggagtgcttgaagaaagagaaggagcgagttggtcactacttgcatattagtagtgaacagaagttactggagaaagtgcaaaatgaattgcttgcacaatatgcaactcccctgttggagaaggagcattctgggtgttttgcattgcttcgtgatgacaaggaggaagacctttctaggatgtacaggctcttctccaaaattaaccgcggtctagaacctattgctaacatgtttaaaacgcatgttacaaatgagggcacagccttggtcaagcaagcagaagattctgctagtaataagaagcccgagaaaaaggacatggttggtatgcaggaacaggtttttgtctggaaaatcattgagctccatgacaagtatgtagcttatgtcacagaatgtttccagggtcacaccctctttcataaggcccttaaagaagcattcgaggtcttctgtaacaagggtgtctctggcagttcaagtgctgaactgcttgccaccttctgtgacaatattctgaagaaaggttgcagtgaaaagctcagtgatgaagccatcgaagatgctcttgagaaggtggtgcgattgcttgcatacatcagcgataaagacctctttgctgagttttacaggaaaaaacttgcaaggagattgctttttgataagagtgccaatgatgaacatgaaagaagcatacttaccaaactcaagcagcagtgtggtggacaatttacttctaaaatggagggaatggttactgatcttactgttgcaagggaccatcaaactaagtttgaagagtttgtggctgcacatcaggagttgaatcctgggatagacttggctgtcactgttttgacaacaggattctggccaagttacaagactttcgatattaaccttcctgctgagatggtgaaatgcgtggaggttttcaaggagttttaccaaacaagaacaaaacacagaaagcttacctggatatattccttgggaacctgcaatatcaatgcaaagtttgaggcaaaaactattgagctcattgtcacaacatatcaggctgcgttgctgctgctattcaacggatctgacaggcttacttattctgagattgtaacacagctaaacttatcagatgatgatgtagtgcgtttgctccattctctctcctgtgcaaaatacaagattcttaacaaggaaccagctaatagatctatttctcccaacgatgtttttgagttcaattcaaaattcactgacaggatgagaagaattaagatacccctacctcctgttgatgaaaagaaaaaggttgtcgaagatgttgacaaggacaggcggtatgcaattgatgcatcgattgtgcgcattatgaagagtcgcaaagttatgggccatcagcagctagttgcggaatgtgtggagcagctcagccgcatgttcaagcctgacttcaaagccatcaagaagcgaatcgaggacctcatcacaagggattacctggaacgcgagaaggacaacgctaatgtgtacagatacctggcttga

SEQ ID NO: 17714 - protein, 742 aa, Oryza sativa (japonica cultivar-group)
MGVHAEGHHQAEEHPRGQARATVQLRGLHDALHVRPPPPPPPPPGTIYNMCTQKPPHDYSQQLYDKYRESFEEYITSMVLPSLRDKHDEFMLRELVKRWSNHKIMVRWLSRFFFYLDRYFISRRSLIPLEQVGLTCFRDLIYQEIKGQVKGAVIALIDKEREGEQIDRALLKNVLGIFVEIGLGSMECYENDFEDFLLKDTTDYYSLKAQSWILEDSCPDYMIKAEECLKKEKERVGHYLHISSEQKLLEKVQNELLAQYATPLLEKEHSGCFALLRDDKEEDLSRMYRLFSKINRGLEPIANMFKTHVTNEGTALVKQAEDSASNKKPEKKDMVGMQEQVFVWKIIELHDKYVAYVTECFQGHTLFHKALKEAFEVFCNKGVSGSSSAELLATFCDNILKKGCSEKLSDEAIEDALEKVVRLLAYISDKDLFAEFYRKKLARRLLFDKSANDEHERSILTKLKQQCGGQFTSKMEGMVTDLTVARDHQTKFEEFVAAHQELNPGIDLAVTVLTTGFWPSYKTFDINLPAEMVKCVEVFKEFYQTRTKHRKLTWIYSLGTCNINAKFEAKTIELIVTTYQAALLLLFNGSDRLTYSEIVTQLNLSDDDVVRLLHSLSCAKYKILNKEPANRSISPNDVFEFNSKFTDRMRRIKIPLPPVDEKKKVVEDVDKDRRYAIDASIVRIMKSRKVMGHQQLVAECVEQLSRMFKPDFKAIKKRIEDLITRDYLEREKDNANVYRYLA

SEQ ID NO: 17715 - DNA, 2196 bp, Oryza sativa (japonica cultivar-group)
  CDS (1)..(2196)
atgagttccaggaagaagccgtcgaggatcgagccgttcaggcacaaggtggagacggacccgaggttcttcgagaaggcgtggaggaagctcgacgacgccatccgcgagatctacaaccacaacgccagcggcctctccttcgaggagctctacaggactgcttataatctggtacttcacaaacatgggccaaagctctatgacaaactgacagaaaacatggaagatcacctgcaagaaatgcgcgtatcgattgaggctgctcaaggtggtttgttcttggtagaactacagaggaaatgggatgaccataacaaggctttgcaaatgatcagagatatcctgatgtacatggacagggtttttattcccaccaataaaaagacacctgtatttgatcttggattggatctttggagagatactattgttcggtcacccaagatccatggaaggttgcttgacactcttcttgatctcatacatagagagagaacaggtgaggtgataaacagatccttgatgaggagtacaactaaaatgttgatggatctaggttcttctgtttatcaggatgattttgaaaggccattccttgaggtgtctgctagtttttatagtggtgagtcacaaaaattcatagagtgttgttcctgtggtgaatatcttaagaaggctcagcagcggcttgatgaagaagcggaacgtgtttcacagtacatggatgccaaaacagacgagaaaataactgctgttgtggtgaaggaaatgcttgcgaatcacatgcagaggttgattcttatggagaactcaggtcttgttaatatgcttgtggaggacaagtatgaagacctgaccatgatgtacagcttgtttcaacgtgttcccgatggtcactcgacaattaaatctgtgatgaattcacatgttaaagaaaccgggaaggatatggtaatggatcctgagaggctgaaggaccctgttgattttgtccagaggcttctaaatgagaaggataagtatgacagtattgttaccacttcctttagcaatgacaagagtttccaaaatgctctgaattcctcctttgagcacttcattaacttaaacaatagatgccctgagttcatctcgctgtatgttgacgacaaactgcgtaaaggaatgaaagaggccaatgaggaggatgttgagactgtcctggacaaagtgatgatgctgtttaggtacttgcaagaaaaagatttgtttgagaaatactacaagcaacacttggcgaagcgccttctttctgggaaggctgcttctgatgattctgagagaagtatgcttgtgaagctcaagacagaatgtggatatcagttcacttcaaaattggagggcatgttcaatgatttgaagacctctcatgataccacacagcgattttacgctggtactcctgatttgggggatgcccctactatatctgtccagatactcaccactgggtcttggcccacacaaccatgtaacacctgcaaccttcctcctgagattcttggcgtgtccgagatgtttcggggtttctaccttggtacccacaatggcaggagactgacatggcaaacaaacatgggtactgcagacatcaaagcagtgtttggaaatggcagcaagcacgagctaaacgtgtcgacctaccagatgtgtgttctcatgttgttcaactcggcggactgtttgtcttaccgtgatatcgagcagactacagcgataccatccgcggacctgaagcgctgccttcagtctctcgcgcttgtgaagggcaagaacgttctgcgcaaggaacctatgagcagggacatctccgacgatgacaacttctacgtcaacgataagttcaccagcaagctgttcaaggtgaagatcggcacggtggcgacacagaaggagtctgagccagagaagatggagacccggcagagagtcgaggaggacaggaagcctcagatcgaggcggccatcgtgaggatcatgaagtcgaggagagtgctggatcacaacagcatagtgacagaggtgacgaagcagctgcagcctcgtttcatgccgaaccctgtggtgatcaagaagagagtcgagtctctgattgagcgcgagttcttggagagggacaagacagacaggaaactgtaccggtatcttgcataa

SEQ ID NO: 17716 - protein, 731 aa, Oryza sativa (japonica cultivar-group)
MSSRKKPSRIEPFRHKVETDPRFFEKAWRKLDDAIREIYNHNASGLSFEELYRTAYNLVLHKHGPKLYDKLTENMEDHLQEMRVSIEAAQGGLFLVELQRKWDDHNKALQMIRDILMYMDRVFIPTNKKTPVFDLGLDLWRDTIVRSPKIHGRLLDTLLDLIHRERTGEVINRSLMRSTTKMLMDLGSSVYQDDFERPFLEVSASFYSGESQKFIECCSCGEYLKKAQQRLDEEAERVSQYMDAKTDEKITAVVVKEMLANHMQRLILMENSGLVNMLVEDKYEDLTMMYSLFQRVPDGHSTIKSVMNSHVKETGKDMVMDPERLKDPVDFVQRLLNEKDKYDSIVTTSFSNDKSFQNALNSSFEHFINLNNRCPEFISLYVDDKLRKGMKEANEEDVETVLDKVMMLFRYLQEKDLFEKYYKQHLAKRLLSGKAASDDSERSMLVKLKTECGYQFTSKLEGMFNDLKTSHDTTQRFYAGTPDLGDAPTISVQILTTGSWPTQPCNTCNLPPEILGVSEMFRGFYLGTHNGRRLTWQTNMGTADIKAVFGNGSKHELNVSTYQMCVLMLFNSADCLSYRDIEQTTAIPSADLKRCLQSLALVKGKNVLRKEPMSRDISDDDNFYVNDKFTSKLFKVKIGTVATQKESEPEKMETRQRVEEDRKPQIEAAIVRIMKSRRVLDHNSIVTEVTKQLQPRFMPNPVVIKKRVESLIEREFLERDKTDRKLYRYLA

SEQ ID NO: 17717 - DNA, 2229 bp, Arabidopsis thaliana
  CDS (1)..(2229)
atggcgaagaaggattctgtgttggaggcaggatggtctgtcatggaggctggtgttgcaaagctacaaaagattctggaagaagtgcctgatgagccaccatttgacccggttcaacgtatgcagctgtacacgactgtccacaatctgtgtacccagaaacctcctaatgattactcacagcagatctatgatcggtatggtggagtatatgttgattacaataaacaaactgtgttgccggctatacgtgagaagcatggtgaatatatgttgagagagcttgttaagagatgggccaaccagaaaattcttgttagatggttatcccacttcttcgaatatcttgaccgtttttatactcgtcgggggtctcatccaacactgagtgctgttggcttcatatccttccgcgacctggtttatcaagagttacagtccaaggccaaagacgctgtactagcacttattcataaagaacgcgagggcgaacagattgatagagcactattgaaaaacgtaatagatgtctattgtgggaatgggatgggagagctggttaaatacgaagaggattttgaaagcttcttgcttgaagattctgcatcttactactctcgcaacgcctcaaggtggaaccaggagaattcttgtcctgattacatgataaaggctgaggagtctctaagactggagaaggagagagtcaccaactaccttcattcaaccactgagccgaaactagttgcgaaagtacaaaatgaattgttggtagtggttgcaaaacaacttatagaaaatgagcactcaggatgccgtgcattgttaagagacgacaagatggatgatctcgccaggatgtacaggctttatcatccaataccgcaagggctggatcctgttgcagacttattcaagcaacatattactgtagagggaagtgcccttatcaaacaagctaccgaggcagctactgataaggctgcaagtactagtggactgaaggtgcaggaccaggtgcttatcagacaattaattgacctacacgataaattcatggtctacgtcgatgagtgttttcagaaacacagcctcttccataaggcattgaaggaggcatttgaagtcttctgtaacaagacagtggctggagtgtccagtgcagaaattcttgcaacgtattgcgataatatcctcaagacgggagggggaattgagaagcttgaaaatgaagatcttgaacttacgcttgagaaagtggttaagttgcttgtttatataagtgacaaggatcttttcgccgagtttttcaggaagaaacaagcccgtcggctcttgtttgatcgcaacggtaatgactaccacgaaagaagtttacttacaaagtttaaagaactactcggtgcgcagtttacttctaagatggagggcatgctgacggatatgacattggcaaaagaacaccaaaccaacttcgtggaatttttatcagttaacaagaccaaaaagctggggatggatttcactgtcactgtacttactactggtttttggccaagttacaaaacaaccgacctcaatctacccattgaaatggtcaactgtgttgaagcttttaaggcctattatggaacaaaaaccaattccaggagactttcatggatttattctttaggaacttgtcagttagctggaaaattcgataaaaaaacaattgagatagtagttaccacctaccaggctgctgtgcttttactcttcaacaacacagagagattaagctacactgagatcttggagcagctaaacctcggccatgaagatcttgccaggctgcttcattcactatcatgcttaaagtacaagattcttataaaggaaccaatgtcgagaaacatctccaacaccgatacctttgaattcaactccaagttcaccgataagatgaggagaattagggtgcctctgcctccgatggatgagaggaagaaaattgttgaagatgttgataaagatagacgctatgcaattgatgcagctcttgttcggatcatgaagagtagaaaagtgttggggcatcaacagttggtctctgaatgtgttgagcatctcagcaaaatgttcaagcctgatataaagatgataaagaaacggattgaggacttgatcagcagagattacttggagagggataccgacaatcccaacactttcaagtatttggcttag

SEQ ID NO: 17718 - protein, 742 aa, Arabidopsis thaliana
MAKKDSVLEAGWSVMEAGVAKLQKILEEVPDEPPFDPVQRMQLYTTVHNLCTQKPPNDYSQQIYDRYGGVYVDYNKQTVLPAIREKHGEYMLRELVKRWANQKILVRWLSHFFEYLDRFYTRRGSHPTLSAVGFISFRDLVYQELQSKAKDAVLALIHKEREGEQIDRALLKNVIDVYCGNGMGELVKYEEDFESFLLEDSASYYSRNASRWNQENSCPDYMIKAEESLRLEKERVTNYLHSTTEPKLVAKVQNELLVVVAKQLIENEHSGCRALLRDDKMDDLARMYRLYHPIPQGLDPVADLFKQHITVEGSALIKQATEAATDKAASTSGLKVQDQVLIRQLIDLHDKFMVYVDECFQKHSLFHKALKEAFEVFCNKTVAGVSSAEILATYCDNILKTGGGIEKLENEDLELTLEKVVKLLVYISDKDLFAEFFRKKQARRLLFDRNGNDYHERSLLTKFKELLGAQFTSKMEGMLTDMTLAKEHQTNFVEFLSVNKTKKLGMDFTVTVLTTGFWPSYKTTDLNLPIEMVNCVEAFKAYYGTKTNSRRLSWIYSLGTCQLAGKFDKKTIEIVVTTYQAAVLLLFNNTERLSYTEILEQLNLGHEDLARLLHSLSCLKYKILIKEPMSRNISNTDTFEFNSKFTDKMRRIRVPLPPMDERKKIVEDVDKDRRYAIDAALVRIMKSRKVLGHQQLVSECVEHLSKMFKPDIKMIKKRIEDLISRDYLERDTDNPNTFKYLA

SEQ ID NO: 17719 - DNA, 2379 bp, Arabidopsis thaliana
  CDS (1)..(2379)
atgtctcttcctaccaaacgctctactttctccgccgcttctgcctccgacgactcttcttactcttctcctccgatgaaaaaggccaaaaacgacctccaccattcccctcaacaccctaataccgccgacaaggttgttggctttcatatggaggaagatccaactcccgccgccgctaatctctctcggaagaaagctacacttccgcaacctactaagaagtttgtaatcaagctcaataaagccaaaccaactctaccaacaaactttgaggagaatacatgggagaagttgcagtcagctatcagagctatattcctcaaaaaaaaaatttcgtttgacctcgagagcctttaccaggctgttgataacctttgcttgcataagttggatggaaagctttatgaccagattgagaaggagtgtgaagaacacatctctgcagctttgcaatctttagttgggcagaacactgatctgactgttttcttgtcacgtgttgagaaatgctggcaagacttttgtgaccagatgctcatgattcgtagtatagccttgactctggataggaagtatgtgatacagaatccaaatgtacgttcattatgggagatgggtttgcagcttttccggaagcatctttctctggcccctgaagttgagcagaggacggttaaaggtctcttaagtatgattgaaaaagaaaggttagcagaagctgttaataggactctactaagccatcttttgaagatgtttactgcactgggaatttatatggaaagctttgagaaacctttccttgaagggacctctgaattttatgccgctgaaggaatgaaatacatgcagcagtctgacgttccggagtacctgaagcatgttgagggaaggttgcatgaagagaatgagagatgcatactctacatagatgcagtaaccaggaaaccattgatcacaactgttgaaaggcaacttctcgaacgtcatatacttgttgttcttgaaaagggttttacaacattaatggatggacgtcgtacggaggaccttcagaggatgcaaaccttgttttctagggtcaatgcacttgagtctctgaggcaggcgctaagttcatatgttcggaaaactgggcagaagattgttatggatgaagagaaagacaaagatatggtacaatcactgttggacttcaaggcttctcttgacataatatgggaagagagcttttacaagaacgaatcatttggtaacacaatcaaagattcgtttgagcatctgattaatcttcgacagaaccggccagctgagcttattgccaagtttttggacgagaaactccgtgctgggaataagggtacttctgaagaagaattggagagtgttcttgaaaaagtcttggttttgttcagatttatccagggtaaagatgtgttcgaagcattttacaaaaaggatcttgcgaagagactcctgttgggaaagagtgcttcaatcgatgctgagaaatccatgatctctaagcttaagactgagtgtggtagccagtttacaaacaagctcgaagggatgttcaaggatattgaattgtcaaaggaaatcaacgagtcattcaaacaatcttcccaggccagaacaaaactgccatcgggaattgagatgagtgtccacgttttaacaacagggtactggccaacatatccgcctatggatgttaagcttcctcatgaactaaatgtctatcaggatatcttcaaagagttctatttaagcaagtacagtggtaggaggttaatgtggcaaaattcattaggccactgtgttttaaaggcagatttctccaaaggtaaaaaggagctggctgtttccctgtttcaggctgttgtgttaatgttatttaacgatgcaatgaaacttagctttgaagacattaaagattccaccagcatagaggacaaggagctgaggaggactttgcagtcgcttgcttgtgggaaagtccgtgtcctgcagaagaatcctaagggaagagatgtagaagacggtgatgaatttgaatttaatgatgagtttgcagctccgctgtatcgcattaaggtaaatgcgatccagatgaaagagacagtagaggagaacacaagtacaacggaaagagtattccaggaccgacaataccagatcgatgcagccattgttcgtattatgaagacaagaaaagtcttgagccatactcttctaatcactgagctcttccaacagctcaaattcccgataaagcctgctgatctgaagaagaggattgagagcttgatcgatcgagaatatttggagagggaaaaaagcaaccctcagatatacaattatcttgcttag

SEQ ID NO: 17720 - protein, 792 aa, Arabidopsis thaliana
MSLPTKRSTFSAASASDDSSYSSPPMKKAKNDLHHSPQHPNTADKVVGFHMEEDPTPAAANLSRKKATLPQPTKKFVIKLNKAKPTLPTNFEENTWEKLQSAIRAIFLKKKISFDLESLYQAVDNLCLHKLDGKLYDQIEKECEEHISAALQSLVGQNTDLTVFLSRVEKCWQDFCDQMLMIRSIALTLDRKYVIQNPNVRSLWEMGLQLFRKHLSLAPEVEQRTVKGLLSMIEKERLAEAVNRTLLSHLLKMFTALGIYMESFEKPFLEGTSEFYAAEGMKYMQQSDVPEYLKHVEGRLHEENERCILYIDAVTRKPLITTVERQLLERHILVVLEKGFTTLMDGRRTEDLQRMQTLFSRVNALESLRQALSSYVRKTGQKIVMDEEKDKDMVQSLLDFKASLDIIWEESFYKNESFGNTIKDSFEHLINLRQNRPAELIAKFLDEKLRAGNKGTSEEELESVLEKVLVLFRFIQGKDVFEAFYKKDLAKRLLLGKSASIDAEKSMISKLKTECGSQFTNKLEGMFKDIELSKEINESFKQSSQARTKLPSGIEMSVHVLTTGYWPTYPPMDVKLPHELNVYQDIFKEFYLSKYSGRRLMWQNSLGHCVLKADFSKGKKELAVSLFQAVVLMLFNDAMKLSFEDIKDSTSIEDKELRRTLQSLACGKVRVLQKNPKGRDVEDGDEFEFNDEFAAPLYRIKVNAIQMKETVEENTSTTERVFQDRQYQIDAAIVRIMKTRKVLSHTLLITELFQQLKFPIKPADLKKRIESLIDREYLEREKSNPQIYNYLA

SEQ ID NO: 17721 - DNA, 2466 bp, Drosophila melanogaster
  CDS (1)..(2466)
atgagtgcggccaagaagtacaagcccatggacacaactgagctgcacgagaacacagagaatattgccgcctgcctgaagaaggccgagaacgtcgcccccaccgctgctgccgcctcgagcgtgggccgcagtgccttcgctgcccaaaacatgaattctgcgtccaccaacggcgagcgcctgccaaacttctccaagctaggcggcagccatggcgagatccgcacggcttcaactacctcaaatctcctcaatcgcatgggggctattcacaacagcaagcctggcgatgtcaagaagatagtgattaagaactttaaggataagcctacactgcccgataactattccaaggacacgtacgtgaagcttgaagaagccgttatcgccatccaactctccaagcccattaaatattcgctggaggagctctaccaggcggtggtgaacatgtgtagccacaagatggatgcacaattatacgcgaaactcaaggagctaacagagcaacacgtaaagcgcaatattaagctcaaggagctcaccggcggtagcatggacaaactgattttgctggaaaagatcaaccactggtggctctcgttctgccaacaaatgatcatgattcgcagcatattcttgtatatggatcgaacttatgtgctgcaaaattcgaccgttcactcgatttgggacatggggctggacctttttcgcatccattttgctcaaaacagcgttgtccaaaagcgaaccgtcgacggtttactaacgcttattgaaaaagaacgacaaggctccaccgtggaccgtggtttgctgaagagcttggttcgcatgttatgcgacctgcagatctacaccagctcctttgaggagaagttcctcgacgcaaccaatcaattgtataaggctgagagtcaacgcaagatgcaagaactggaagttcccgagtacttacaacacgtcaacaagcgtttggccgaggagaacgagcgtttgcgtcactatctggactcgagcaccaaacatccactgatttacaatgtggaaaaagagttacttgccgaacacctaacgtcaatattgcagaagggcttggattcattgttggaagacaacagactgagtgaccttacactgttgtacgggctgcttagtcgagtcaaaaatggaacatccgagctgtgcggcaatttcaacggtttcattaagaaaaagggacgcaccattgtcatcgatcccgagaaggataagagcatggtccaagatttgctcgatttcaaggacaaaatggatgtgatagttcgcacctgctttgagcacaatgagaaattcacaaactcgttgcgcgaggcctttgagttctttatcaaccaacgtgccaacaagccggccgagcttattgctaaatacgtagatatgaaactgcgatctggcaacaagggaaccacagatgaggagttggaaaagactctagataaaatcatggttctgtttcgttttatacatggcaaagatgtatttgaagcgttttacaaaaaggacttggccaaacgattacttgtgggcaaatcggcatcagtggattccgaaaagagtatgctctccaagcttaagcaggagtgcggtggagggtttacgtccaagctggagggcatgtttaaggacatggaactgagccgagatatcaacattgcgttccgcggacacgcgttaagcaacaaccgcgatgtccacaacttggacttgtgcgtcagcattcttaccatgggctactggcctacatatgcacctacagaggtcacaatgccgccacagttcatcaatcctcagcagattttcaacaaattttatctggaaaagcatagtgggcggaagttgcagtggcagcctacattaggaaattgtatgctgcgtgctcaattcgatgcgggaccgaaagaattgttggtctcgctgtttcaagcgcttgtgcttctattgtttaacgataagccagttctgagctacgaggagatattggccgccaccctcatcgaggatggagagttgcgtcgaacacttcagtccctggcttgtgggcgcgcccgcgtcataacaaaaacaccgaaaggccgcgaaatcttggatggcgatcagtttgattttaacaatgagttcacaaacaaattgtttagaatcaagatcaaccaaatacagatgaaggagacaaatgaggagcaaaaggcgacggaggagcgtgtgtttcaggatcgtcagtatcaaattgatgcggctattgtgcgcattatgaaaatgcgaaaaacgctgagccataatcttctcatcaccgagctgttcaaccagcttaccttccctgtcaagcccgctgacctaaagaagcgaatcgagtcgctcatcgaccgcgactacatggagcgagacaaggataatcaaaaccaatacaactatgtggcataa

SEQ ID NO: 17722 - protein, 821 aa, Drosophila melanogaster
MSAAKKYKPMDTTELHENTENIAACLKKAENVAPTAAAASSVGRSAFAAQNMNSASTNGERLPNFSKLGGSHGEIRTASTTSNLLNRMGAIHNSKPGDVKKIVIKNFKDKPTLPDNYSKDTYVKLEEAVIAIQLSKPIKYSLEELYQAVVNMCSHKMDAQLYAKLKELTEQHVKRNIKLKELTGGSMDKLILLEKINHWWLSFCQQMIMIRSIFLYMDRTYVLQNSTVHSIWDMGLDLFRIHFAQNSVVQKRTVDGLLTLIEKERQGSTVDRGLLKSLVRMLCDLQIYTSSFEEKFLDATNQLYKAESQRKMQELEVPEYLQHVNKRLAEENERLRHYLDSSTKHPLIYNVEKELLAEHLTSILQKGLDSLLEDNRLSDLTLLYGLLSRVKNGTSELCGNFNGFIKKKGRTIVIDPEKDKSMVQDLLDFKDKMDVIVRTCFEHNEKFTNSLREAFEFFINQRANKPAELIAKYVDMKLRSGNKGTTDEELEKTLDKIMVLFRFIHGKDVFEAFYKKDLAKRLLVGKSASVDSEKSMLSKLKQECGGGFTSKLEGMFKDMELSRDINIAFRGHALSNNRDVHNLDLCVSILTMGYWPTYAPTEVTMPPQFINPQQIFNKFYLEKHSGRKLQWQPTLGNCMLRAQFDAGPKELLVSLFQALVLLLFNDKPVLSYEEILAATLIEDGELRRTLQSLACGRARVITKTPKGREILDGDQFDFNNEFTNKLFRIKINQIQMKETNEEQKATEERVFQDRQYQIDAAIVRIMKMRKTLSHNLLITELFNQLTFPVKPADLKKRIESLIDRDYMERDKDNQNQYNYVA

SEQ ID NO: 17723 - DNA, 2322 bp, Drosophila melanogaster
  CDS (1)..(2322)
atgaatctgcggggaaatcctcccaagaaggagggcaaaatgcgcattcgggcctttccggcctccatggacgagaagtacgtggagaccatttgggccagcttaaagaatgctatccaggagatacagaaaaagaacaactccggactatcgtttgaacaactctaccggaatgcgtacaacatggtgctgcataagcacggcaatagactgtattacggtctgagggaggtcgtctcagaacacctggagcacaaggtgcgggcggatgtgctggaggctctgcacagcaatttcctacccaagttaaaccaggcctggacagaccaccagacatctatggtgatgatccgcgacatactcatgtacatggatagagtttatgtgcagcagcgcgaggtagacaatgtgtacaatttgggattaattttgttcagggatcaggtggttcgctattctgagattcaaaaggccctgcgagagaagttgctgggcatggtgatggaggaacgtcatggcgaagccattaaccatctggctatcaagaatgcttgcagtatgctgatcaccctggggattaactcgcgcactgtctacgaagaggactttgaaaagcccttccttgcgcaatcggcggcgttttacaaattcgagtcgcagaactttcttgccgagaacaacgctggcgtttacatcaagaaagtggaagcgcgcatcacggaggaatcttcccgggcagcgctgtatctcgataaggatacggagccccgcattgtgcgcgtggtcgaagaagagctgatcaaaaagcacatgcgacccattgttgaaatggagaactcgggcgtggtgtacatgatcaagaactcaaagaccgaggatctggcctgcacatataagcttttctcgcgcctgaaggaggagggtctcaaggtgatagcggacacaatgtcggcatatctgcgagagcaaggacgcatgctggttaaggaagaagaaaacggcaacacgaatcccataacattcgtgcagaacttgctggatctcaaggaccgcttcgaccagtttctggtgcactcgttcgccaacgatcgcatattcaaaaacgtcatctcatccgattttgaacatttcttgaacctaaataacaaatccccggagtatctatcgctattcatcgatgacaaactgaaaaagggtggcaagggaatgagcgaacaggaaattgagtccatcttggataagacaatggttctcttccgtttcctattggagaaagatgtctttgagcgctattacaagacgcatttagccaagagattgctgctgaacaaatcagtctctgatgatttcgagaagaatatgatatcaaaactaaagactgaatgcggctgtcaattcacctcgaagctagagggcatgtttaaagatatgtcagtctccaatacgatcatggatgagtttaagaactttgtaaataataacaatttatcccttggcggtgtggagctaacggtacgcatactaaccactggtttttggcccacacagacagcaactccgaactgcaatatacccgccgctccgcgtgaagcctttgacattttcaagaacttctatctaaataagcactcaggacgtcaattgacgttacagccacaaatgggaaccgcctatatcaacgctgtgttttatggccgcaaggcagttgaaagtgaaaaggataaagatgcacccagctccagttcaagcggctgtggggtgcccaccaccacacgcaagcacatattgcaagtgtccacgtaccagatgtgtgtgctactgctgtttaataaccgcgacgtgctcacctacgatgacatacaccaggagaccgatataccggaacgggagctcgtccgagcactacaatcgttgtccatgggcaaacccgctcagcgtttgttagtacgcaattctaaaacgaaaactaaggacattgagcccacggatgagttttacgtaaacgacgccttcaactccaagttccacagggtgaagatacaaacggtagccgccaagggagaatcagagccagagcgtaaggaaacgcgcggaaaggtcgacgaggatcgtaagcacgagatcgaagcggctattgtgcgcataatgaaggcccgcaagcgtctggctcacaacttgctagtatcagatgtgacgtcgcagctaaagtcgcgtttcttgccctcgcccgtgtttatcaaaaagcgcattgagggcctaatcgagcgcgagtatctgcaacgatcgccggaagatcgcaaagtgtacaactacttggcctaa

SEQ ID NO: 17724 - protein, 773 aa, Drosophila melanogaster
MNLRGNPPKKEGKMRIRAFPASMDEKYVETIWASLKNAIQEIQKKNNSGLSFEQLYRNAYNMVLHKHGNRLYYGLREVVSEHLEHKVRADVLEALHSNFLPKLNQAWTDHQTSMVMIRDILMYMDRVYVQQREVDNVYNLGLILFRDQVVRYSEIQKALREKLLGMVMEERHGEAINHLAIKNACSMLITLGINSRTVYEEDFEKPFLAQSAAFYKFESQNFLAENNAGVYIKKVEARITEESSRAALYLDKDTEPRIVRVVEEELIKKHMRPIVEMENSGVVYMIKNSKTEDLACTYKLFSRLKEEGLKVIADTMSAYLREQGRMLVKEEENGNTNPITFVQNLLDLKDRFDQFLVHSFANDRIFKNVISSDFEHFLNLNNKSPEYLSLFIDDKLKKGGKGMSEQEIESILDKTMVLFRFLLEKDVFERYYKTHLAKRLLLNKSVSDDFEKNMISKLKTECGCQFTSKLEGMFKDMSVSNTIMDEFKNFVNNNNLSLGGVELTVRILTTGFWPTQTATPNCNIPAAPREAFDIFKNFYLNKHSGRQLTLQPQMGTAYINAVFYGRKAVESEKDKDAPSSSSSGCGVPTTTRKHILQVSTYQMCVLLLFNNRDVLTYDDIHQETDIPERELVRALQSLSMGKPAQRLLVRNSKTKTKDIEPTDEFYVNDAFNSKFHRVKIQTVAAKGESEPERKETRGKVDEDRKHEIEAAIVRIMKARKRLAHNLLVSDVTSQLKSRFLPSPVFIKKRIEGLIEREYLQRSPEDRKVYNYLA

SEQ ID NO: 17725 - DNA, 2364 bp, Strongylocentrotus purpuratus
  CDS (1)..(2364)
atggcgactgtcggaagtaaaccgagcggcgttggaggtggaagttcaatgctcaaacaggataaaacccaacctcagtttgaggatcgctgggagggcatgaggcccacggtactcaaactcttgagacaggagaacgtgagcagaaatgaatggcatgaccttttctgggaggtgtactctgtatgtgtatgggatgataagggagtggacaaggtcaatgaagcactcaaacatgacatcgtcgagttcgtccagcaagccaaacagcgtgtccttcatgaccaggatgagtcggcactcctgaaggcctacatcagggagtggggcaagtacttcacccagtgcgactaccttcctaagccattcaagcccctagagacggccacggggaaggggtccggtgcccagcagaagaaagccaatcagcagaacgaggattctacagtcagaaagttgatgctagagagttggagtcactacatattctctaagatcaaacagaagctccaggagagtgccatgggactggtactagctgagaggaatggagaagcctttgagaaacagcttgttattggtgtcagagaatcatacgttaatttatgtttgaacagtgaagatagactgcagatatacaaggagaactttgagaaagcttacctggatgcgacagaagccttctacaaagctcaagctccaaactacctagcagaaaatggtgtgcagaactacatgagatatgcggacagcaaactaaaagaggaagaaatgagagcaagcagataccttgacacgagcaaaggaagtaactcaatgagtttattaacagagtgctgtgtagaatgtctagtttcggtcttcaaggaggagatactgagggagtgtgcaccaatgatcaagaacaatgaaacagacaaactgaacctgatgctaaagctgatggacagagttccagaaggcattaatccaatgctaagagatcttgagcagcacatcatcgaagcaggtcttgctgatatggtggcagcggctgagatcatcaccacagattcagagaagtatgtagagaggttgttagagttattccataggttcagcaatctcgtcaaagaggccttcaacgatgacccaagattcttgacatcaagagataaggcttacaggcatgtagtcaatgataccaaagtcttccggttggagcttccaacaaaaaacaagagtaaagggcaacccgagtcgagatgtccggagctactagcaaactactgtgacatgcttctgagaaaaacacccctcagcaagagactcacatcggaagagatagaaagcaaacttaggaatgtccttctagtactgaagtatgtgcagaacaaagatgtgttcatgaggtaccataaagctcatctaacaagacgattaatactggacacatcagctgacagtgagaaggaggaaaacatggtggaatggctcagggaggtagggatgccagcagactatgtcaataaacttgccaggatgttccaagacatcaaagtctcagaagacctaaaccaatccttcaaggaacttcacagaaacaactatgataacatgaatataaaaatcctcaatgctggtgcatggtctaggagtagtgagagggtgccgtgctcgttaccagtcgagctagaagatttcatccctgaagtagaagaattctatcgcaacaagcacaacggcaggaaactacagtggcatcaccatgttcatactgcaaccatcacgatgaagaatgaagtcggtatgttcgatcttgaagtcaccacatttcaaatggcagtactatacgcatggaaccaaagacccctagacaagatctcactggaaaacctgaggcttgcaacagaattaccagatcatgaactcaggagaacgctttggtcgttggtagcctttgccaagttaaagagacaaatggttctaatgcaaccagaggcaaagtcacccaaggaattcgtagatggaacagtgttctgggtcaaccaagattttgctgtcattaagaatgggaagccacagaagcgaggtaagatcaacctgattggaagacttcagctatctacggagaggagtactgaagaggataaggaaggaatcgtgcaactcaggattcttagaactcaggaggcaatagtgaagatcatgaagatgaggaagaaactaaacaatgcccagctccagactgaactggtagagatcctcaagaacatgttccttccgcagaagaagatgatcaaagaacagatagagtggctcatagaacacaagtacatgaagagagacgagggtgacatcaataccttcatatacctagcttaa

SEQ ID NO: 17726 - protein, 787 aa, Strongylocentrotus purpuratus
MATVGSKPSGVGGGSSMLKQDKTQPQFEDRWEGMRPTVLKLLRQENVSRNEWHDLFWEVYSVCVWDDKGVDKVNEALKHDIVEFVQQAKQRVLHDQDESALLKAYIREWGKYFTQCDYLPKPFKPLETATGKGSGAQQKKANQQNEDSTVRKLMLESWSHYIFSKIKQKLQESAMGLVLAERNGEAFEKQLVIGVRESYVNLCLNSEDRLQIYKENFEKAYLDATEAFYKAQAPNYLAENGVQNYMRYADSKLKEEEMRASRYLDTSKGSNSMSLLTECCVECLVSVFKEEILRECAPMIKNNETDKLNLMLKLMDRVPEGINPMLRDLEQHIIEAGLADMVAAAEIITTDSEKYVERLLELFHRFSNLVKEAFNDDPRFLTSRDKAYRHVVNDTKVFRLELPTKNKSKGQPESRCPELLANYCDMLLRKTPLSKRLTSEEIESKLRNVLLVLKYVQNKDVFMRYHKAHLTRRLILDTSADSEKEENMVEWLREVGMPADYVNKLARMFQDIKVSEDLNQSFKELHRNNYDNMNIKILNAGAWSRSSERVPCSLPVELEDFIPEVEEFYRNKHNGRKLQWHHHVHTATITMKNEVGMFDLEVTTFQMAVLYAWNQRPLDKISLENLRLATELPDHELRRTLWSLVAFAKLKRQMVLMQPEAKSPKEFVDGTVFWVNQDFAVIKNGKPQKRGKINLIGRLQLSTERSTEEDKEGIVQLRILRTQEAIVKIMKMRKKLNNAQLQTELVEILKNMFLPQKKMIKEQIEWLIEHKYMKRDEGDINTFIYLA

SEQ ID NO: 17727 - DNA, 2259 bp, Nasonia vitripennis
  CDS (1)..(2259)
atgtctctgaaacccaaagtagtagactttcgtcaaacatgggatgttttacaagagactgtcaaaggtgtgataacactagccgatgttccacgagctacatggaatgatagatttagtgatgtttattcattgtgtgtggcatatcctgaaccattagccgaccgtttgtacaatgaaactgaaaaatttttagatgatcatgttagtcaattattagttaaggttcagtctcaaggagaaaatagtctattacaggcataccatcgtgcctggactgaatattctcaaggaatcaattacctccaccaattgtatttatatttgaatcagcaacatataaaaaagcaaaaacttaccgaagctgaaatcatttatggaacatcgtctgcttcctctccggactatcaggaacaaaaagaaattggtgaattaggtttatacatatggaaaaataaaatgattgaatcattaaaaaactccctggttgcattactccttgaagggatacatgcagatagattgggagaagcacaaccaacgacatcagatgtgatttgtggggttattgagagttttgttagagttgaagaatataaaatgaaaggccagttaaatctttatcaagaaatttttgaaggacctttcttaaaacaaagtggggaattttatttaagagaagcttctgaactattgcaacagtctgatgtaactcgttacatggaaagagtaacttggcgccttagtcaagaagaattaagagcacataaatttcttcacatcacatcagtacctaaggtacgacaatgttgcgaagaaaaaatggttgcagcacatgttgcttggttacataccgaggttgatgccatggtagagaatgaacgaagaaaagatcttgcacttatttatcctttgttgaggcctcttccatcaggtttagcacatctcgtacaaaagctaactgagcacattacaaatgaaggactacaagcaattggttctttacatggtgaaaatgttcatacattatttgtcgaaagcatgctggatgtgcactctaaatattctgatttaataaaagaattatttaagggtgaccaggcgtttattggtgcacttgataaggcatgctcggctgttgttaatcatagaccagcaccaagacaacctgcgcgagcaccagaattgctagctaaatattgtgattcattgttaaaaaaatcagcaaaagtagcctctgaaagtgagattgaagaaaaattagcacgttcaattactgtatttaaatatgtggatgataaagatgtttttcaaaaattttatgctcgcatgctagcaaaacgtctgatccatcaacaatcacaatctatggatgctgaggaagccatgatcgatcgattaaagcaagcttgtggctatgaattcacaaataagttacatagaatgtttacagacatgtccgtatcagcagatttaaatacaaagtttacagcaagtttacgagagcgagaaggtgaaaagcatcagtttggcattggctttgttgtgtatgtattacaagctggggcttggccattaggtctgccaccttcacctggtccatttcatgttcctcaacaacttgaaaagtctgtacaagcttttgaatctttttaccatgcacaatttagtggtcgaaagcttacttggttgcatcacttatgtcaaggagaactcaaattaaattaccttaaaaaaccatatttagtaactgtacaaacgtatcaaatggctttattgctattatttgaacattgtgattcaatttcctgcaaagaagcagctgtgtcgttgcgcttatctcacgatcaactagtaaaacatgcagttagtcttgttgattgtaaaattctcaaaaagtcaacggaagaagatcttgaggaagacacaatccttacactaaactttgaatattacaacaagagaacaaagtttcgtataacaggagcacttcaacgagatgctccacacgatacagaagcaacccatcgtagtgtagatgatgatcgcaaattatatttacaggctgcaatcgttcgaataatgaaaagtcgtaaagtcttaagacacaatcaacttgtgcaagaggttcttggacagtccaaagttacatttgctccttctattggtatgattaaaaagtgtattgaaaatcttatagataaacaatacattgagcgaacatcaaatagtgctgatgaatattcatatgttgcgtaa

SEQ ID NO: 17728 - protein, 752 aa, Nasonia vitripennis
MSLKPKVVDFRQTWDVLQETVKGVITLADVPRATWNDRFSDVYSLCVAYPEPLADRLYNETEKFLDDHVSQLLVKVQSQGENSLLQAYHRAWTEYSQGINYLHQLYLYLNQQHIKKQKLTEAEIIYGTSSASSPDYQEQKEIGELGLYIWKNKMIESLKNSLVALLLEGIHADRLGEAQPTTSDVICGVIESFVRVEEYKMKGQLNLYQEIFEGPFLKQSGEFYLREASELLQQSDVTRYMERVTWRLSQEELRAHKFLHITSVPKVRQCCEEKMVAAHVAWLHTEVDAMVENERRKDLALIYPLLRPLPSGLAHLVQKLTEHITNEGLQAIGSLHGENVHTLFVESMLDVHSKYSDLIKELFKGDQAFIGALDKACSAVVNHRPAPRQPARAPELLAKYCDSLLKKSAKVASESEIEEKLARSITVFKYVDDKDVFQKFYARMLAKRLIHQQSQSMDAEEAMIDRLKQACGYEFTNKLHRMFTDMSVSADLNTKFTASLREREGEKHQFGIGFVVYVLQAGAWPLGLPPSPGPFHVPQQLEKSVQAFESFYHAQFSGRKLTWLHHLCQGELKLNYLKKPYLVTVQTYQMALLLLFEHCDSISCKEAAVSLRLSHDQLVKHAVSLVDCKILKKSTEEDLEEDTILTLNFEYYNKRTKFRITGALQRDAPHDTEATHRSVDDDRKLYLQAAIVRIMKSRKVLRHNQLVQEVLGQSKVTFAPSIGMIKKCIENLIDKQYIERTSNSADEYSYVA

SEQ ID NO: 17729 - DNA, 2448 bp, Nasonia vitripennis
  CDS (1)..(2448)
atgtccaggttgggtagaaactcccaggttctggctactgactacagccaccatcatcagcaacagcagcagtcctcctgtgttaaaattgccaagcgaccaaggatccacaactccggcgagccagaggctctggacaataccatggctgaggcagctgctgctactacttcggccaatgcgcaaaacaagagaccaaacttttcactggctgtggctaatcctaatggcgtgaacaagatcacgcaaagcctggccactggaaaacctggcactgccaagaaacttatcatcaaaaattttaaagataaaccaaaacttcctgaaaactaccaagaggaaacatgggagaagctcagagaggcagtagttgctatacaaaccagtaaaagcatacgttattccctggaagaactttacaaagctgtggagaacatgtgtagtcataaaatggcatctactctctacagcaatttgacagtcctggtggaaactcatgtcaaggccaacatagagcaatttatagctgaatctatggaccgacacatttttctgaaaaaaatgaacgaatgctggcagtcccactgcaggcagatgatcatgattagaagtatatttctttacctagatagaacctatgttctacagaatcctagcatctcctctatatgggatatgggtctctatctattcagattgcacatagtgttaaataacctggtgcagacgcgcacagttgaggggctactaatgctgatcgagaaggagcgtcagggcgacaccgtcgatcgcactctgctcaagtcgttattgcgcatgctgtccgatttgcagatatatcaggacgcgtttgagtccaagttccttgtagccaccgagaggctctatgccgccgagggtcagagactcatgcaagaacacgacgtacccgagtacctcgctcacgtcgacaagcgtttgcaagaagagaacgagagactgcttcattatcttgatacctccacaaagtggtccttaatacacacagtggagaagcaattgttatctgagcacattaccagcattttgcaaaagggtctcagtggattactagatgagaacagaatcagcgatttgtccttgctttataacttgtacagtcgtataaaaaatggtttggtggagctttgcttgaatttcaacagttacataaagaaacgaggcaaaactatagtcatagatccagaaaaggacaagaccatggttcaggagcttctagattttaaggacaaaatggataatattgtcaacacgtgctttcacaggaacgaaaagtttggcaacagcttgaaggaggcttttgaggcttttattaaccagagagctaacaaaccagctgaacttatagccaaattcgtggattgcaagcttcgtgctggtaacaaagaggcgacagaggaggagctagaacgactgctcgacaaaatcatggtcttattccgcttcattcatggcaaggatgtgtttgaagccttctacaagaaagatttggcgaaacgactgctcgttggtaaatcggcttcggtcgacgctgagaagtccatgttgtccaaattgaaacaagaatgtggtggtggtttcactagcaagctggagggtatgttcaaagatatggaactgagcaaggacatcaacatcgcgttcaagcagtactcgggtaatctgcaaaatgagctaattgctagcaatcttgatctcactgtatcgatactgacgatgggttactggccaacttatccggtgatggaggtaacgctgccacccgaaatggttcagtatcaggatattttcaacaagttttatctaggcaagcacagtggcaggaagctacaatggcaaccgacccttggacactgtgttctgaaggcatggttcaatcagggtaacaaagagttgcaagtttcgttgttccaagctctggtactgattctttttaacgaggcagataatatgtcatttgaggaagtcaaggcagcgacaaatatcgaggatggtgagctaaggcgaaccctacaatcactggcctgcggtaaagctcgcgtacttcagaaaaatccaaaaggtcgcgatgttgctgataacgacagattcgtctttaatgccgagtttaccaacaaactttttagaataaagatcaaccagatacagatgaaggaaacgaatgaggaacagaaagctacggaagaaagagtgtaccaagacagacagtaccagattgatgcagcaatagttagaattatgaaaatgaggaaaactctgacgcataatcttcttataagtgaattgtacaatcaactcaaatttcctgtaaagcctgctgatctgaagaaacgaatagaatctctgattgatagagactacatggaaagagactgggacaatgccaatcagtacaactacgtcgcgtaa

SEQ ID NO: 17730 - protein, 815 aa, Nasonia vitripennis
MSRLGRNSQVLATDYSHHHQQQQQSSCVKIAKRPRIHNSGEPEALDNTMAEAAAATTSANAQNKRPNFSLAVANPNGVNKITQSLATGKPGTAKKLIIKNFKDKPKLPENYQEETWEKLREAVVAIQTSKSIRYSLEELYKAVENMCSHKMASTLYSNLTVLVETHVKANIEQFIAESMDRHIFLKKMNECWQSHCRQMIMIRSIFLYLDRTYVLQNPSISSIWDMGLYLFRLHIVLNNLVQTRTVEGLLMLIEKERQGDTVDRTLLKSLLRMLSDLQIYQDAFESKFLVATERLYAAEGQRLMQEHDVPEYLAHVDKRLQEENERLLHYLDTSTKWSLIHTVEKQLLSEHITSILQKGLSGLLDENRISDLSLLYNLYSRIKNGLVELCLNFNSYIKKRGKTIVIDPEKDKTMVQELLDFKDKMDNIVNTCFHRNEKFGNSLKEAFEAFINQRANKPAELIAKFVDCKLRAGNKEATEEELERLLDKIMVLFRFIHGKDVFEAFYKKDLAKRLLVGKSASVDAEKSMLSKLKQECGGGFTSKLEGMFKDMELSKDINIAFKQYSGNLQNELIASNLDLTVSILTMGYWPTYPVMEVTLPPEMVQYQDIFNKFYLGKHSGRKLQWQPTLGHCVLKAWFNQGNKELQVSLFQALVLILFNEADNMSFEEVKAATNIEDGELRRTLQSLACGKARVLQKNPKGRDVADNDRFVFNAEFTNKLFRIKINQIQMKETNEEQKATEERVYQDRQYQIDAAIVRIMKMRKTLTHNLLISELYNQLKFPVKPADLKKRIESLIDRDYMERDWDNANQYNYVA

SEQ ID NO: 17731 - DNA, 2325 bp, Nasonia vitripennis
  CDS (1)..(2325)
atgaagagtgctttgcctaaaaaggagagcaagatgcgcatcagggcatttcctacatccatggatgagagatacgtagaaaacatatgggcccttttgaaaaatgccatccaagaaattcaaaagaaaaataactccagccttagttttgaagaactctaccggaatgcatacacaatggttctccacaagtatggggagaggctgtacacaggattgaaggaagtcattacacagcatttagtgatgaaagtacgcaatgatgtccttgagtctctctacaacaattttttacaaaccttaaatcaagcatggaatgatcatcaaacttctatggtgatgattagagatatcctcatgtacatggatagagtttatgttcagcaaaataatgtggacaatgtatttgatttgggactaataatatttcgtgatcaggttgttagatatggatgtataagagatcatttacgtgacactctactatcaatgatagctcgcgaaagaaacggtgatattgttgaccgcattgcgataaaaaatgcatgtcaaatgttaatgctactaggtataaaaaatcgacaagtgtacgaagaagacttcgaacggccttttttacaacaaagcgtagagttttacaagatggaatctcagaaattcttagaagaaaatagtgcatctgtatacataaaacaagttgaagccagaatcactgaagaatcagaaagggcaaagcactatttggatgaatctacagaacctcggatagttgaagttgttgaagaggagttgattaagaaaaatatgaaaacaatagtcgaaatggaaaacagtggagttgtgcacatgcttcaaaacttgaagactcaggatcttgggtgcatgtacaaattattctctcgagtttctgatggtctagatactgtttgtggctgtgtatcgcagtatttaagagaacgaggacgcgcattagttcaagaagaacaagaatctagtactaatgcagttcaatttgtgcaaaatttgttggacttgaaagaccgttttgaacacttcctccatatttcgttcaacaatgacaaacaatttaagcaaatgattgcgtcagactttgaatactttttgaatttaaacacaaaaagtcctgaatacctttctttgttcattgatgacaagttaaagaaaggtcttaaaggcatgacagagcaagaaattgaaggcattttggacaaaacaatggtcttgtttagattccttcaggagaaagatgtgttcgaacgttattataaacaacacttagccaagcgacttttgctgaataaatctgtgtctgatgatagtgagaagaacatgatatcaaaattgaagactgagtgtggctgccagtttacatcgaaattagaaggcatgttcaaagacatcactgtcagtaatacgataatggaagagtttaaggaacatacgctagctaatggaatgacgttgagtggtgtggatttgagtgtacgtgttttaacaactgggttttggcccactcaagctgcaactcccaagtgcagtatgccttcggcacctcgtaatgcctttgatgcctttcgtcgtttttatctgggtaaacacagtggtcgtcagttgacattacaaccacaattaggttcggctgatttgaatgccactttttacgggcctcgaagagaggaaaatatgccagaatgttcatcaacttctccagggttcggaaacaacggtaacggtcagcgcagcagtggaaccatcaccacccgaaaacacatcattcaagtttcgacgtatcagatgtgtgttcttatgctcttcaataatagggaaaaattaacatacgaagagatacagaatgaaacggatatccctgaaagagatttaataagagcactgcagtccttggccatgggtaaagcaacacaacgagtgttgttaaaatacccccgaacaaaagaaatcgaaccgtctcattctttctgtgtaaatgataatttcagcagcaaactccatagagtaaaaattcagactgtggcagcaaaaggcgaatgtgaacctgagcggaaggaaaccagaagcaaagttgacgaagacagaaagcatgaaattgaggctgcaatagttcgtataatgaaggctcgtaaacgaatggcacacaacatactcgtaactgaagtaacagatcagttaagagcgagatttttaccttcaccagttattatcaaaaagcgcttagaaaatttaattgaacgagaatatttagcccgtacgccagaagacagaaaagtctatacgtacgtcgcttaa

SEQ ID NO: 17732 - protein, 774 aa, Nasonia vitripennis
MKSALPKKESKMRIRAFPTSMDERYVENIWALLKNAIQEIQKKNNSSLSFEELYRNAYTMVLHKYGERLYTGLKEVITQHLVMKVRNDVLESLYNNFLQTLNQAWNDHQTSMVMIRDILMYMDRVYVQQNNVDNVFDLGLIIFRDQVVRYGCIRDHLRDTLLSMIARERNGDIVDRIAIKNACQMLMLLGIKNRQVYEEDFERPFLQQSVEFYKMESQKFLEENSASVYIKQVEARITEESERAKHYLDESTEPRIVEVVEEELIKKNMKTIVEMENSGVVHMLQNLKTQDLGCMYKLFSRVSDGLDTVCGCVSQYLRERGRALVQEEQESSTNAVQFVQNLLDLKDRFEHFLHISFNNDKQFKQMIASDFEYFLNLNTKSPEYLSLFIDDKLKKGLKGMTEQEIEGILDKTMVLFRFLQEKDVFERYYKQHLAKRLLLNKSVSDDSEKNMISKLKTECGCQFTSKLEGMFKDITVSNTIMEEFKEHTLANGMTLSGVDLSVRVLTTGFWPTQAATPKCSMPSAPRNAFDAFRRFYLGKHSGRQLTLQPQLGSADLNATFYGPRREENMPECSSTSPGFGNNGNGQRSSGTITTRKHIIQVSTYQMCVLMLFNNREKLTYEEIQNETDIPERDLIRALQSLAMGKATQRVLLKYPRTKEIEPSHSFCVNDNFSSKLHRVKIQTVAAKGECEPERKETRSKVDEDRKHEIEAAIVRIMKARKRMAHNILVTEVTDQLRARFLPSPVIIKKRLENLIEREYLARTPEDRKVYTYVA

SEQ ID NO: 17733 - DNA, 2433 bp, Nasonia vitripennis
  CDS (1)..(2433)
atgagcgcggcttcgttggtaggcgtgcgacttaacctgtcaagttttggatatacttttagagaagagtcgagtataatacaaactgatatagagcaatatctcaagatgtcagggtatcgaagtagtcacagcagcaaccagggtccacctggtctcaaacaaatcgatcttgatcaaatttggggagatcttaaagaaggcattgagcaagtttacaataggcagtgcatgtccaagcctagatatattgaattatacacgcatgtttataactattgcacgagtgtgcaccaacaaataaactcaagcaggcaaagctcaaaaagtaaaaagggtcaaataactggaggtgcccaactagttgggctagagctttacaagcgactgcgtgaatttcttcgaaattatcttatttctttactcaagcaaggaattgatcttatggatgaagatgtactacagttttatacaagacaatgggaggaatatcagtttagtagtaaagtattaaacggtgtatgcgcatacctgaatcgtcactgggtacgccgagaatgcgaagaaggtcgcaaaggaatctatgaaatttatcaattagcattggtgacatggagggataatttgtttaaacacctcaatagacaggttaccaatgctgtcttgaaactgatcgagagagaaagaaatggagaaacaataaacacacgattagttagtggagttatcaattgttatgtagaactaggcctaaatgaagaagatccaggtgccaagggacaaacccttaccgtgtacaaaaattcatttgaaaatctattcttggaagatacggaaaggttttacactcgcgaaagttcggaattcctccgtcataatcctgttacggaatacatgaaaaaggtggatcataggttacaagaagagcagaaacgtgtccaagtttacctgcacataactacgcacgaaagattagcaaaaacgtgcgaaagagtactcatagaaaaacacctggacattttccatgcagagttccaaaatttgttggattctgataaaaactctgatttgggtacaatgtacaaattagttgcaagaataccaaatggtcttggtgaattgagaaatcttttggaaagtcacatagccaaccaaggtcttgcagctattgacaagtgtggtgactctgcagttaatgatcctaagatttacgttaacacgattttggaagttcacaagaaatataataaattagtactcgtttcatttagcaatgatagcggttttgtagcagccttagataaggcttgtggcagatttatcaacactaattctgtaactaaggcagcaaacagtagtagtaagtctccagaattgttagctaaatactgtgatgtactgcttaagaagagcagtaagaatcctgaagaagcagaactcgaagatacgcttaaccaagttatggttgtgtttaaatacatagaagacaaagacgtgtaccaaaaattctacagcaaaatgcttgcaaagagattggtgcaacacatgtctgctagtgatgatgctgaagcttccatgatatcgaaactaaagcaggcttgtggtttcgagtatacttctaaacttcagcgaatgttccaggatattggagtatcaaaagacttgaatgaacattttcgaagacatcttacgaattcggcggaacctttggatatagatttcagtatacaagttttatcgtcaggttcatggccattccaacaatcctttacattttcattaccaacggagctggaaagatcagttcacagattcacatccttctacagttctcaacacagtgggagaaagttaaactggttgtacaacatgtctaagggtgaactacatactaactgttttaaaaatcgctatacattgcaagcatcaaccttccaaatggcagtcctactgcaatataatacctcaacatcatggacaatacagcagttacacgagtctacacaaattaaaatggacttcctcttacaagtaattcaaattctactcaaagcaaagttacttgtaaccagtgatgatgagtctgagcttggacctacttcaacagtagatctttttactggttataaaaataaaaaattaagagtaaatatcaacataccaatgaagacggagcttaaaatagaacaggagacgacacacaaacacatagaggaagatcgaaagctccttattcaagcagctattgtcagaatcatgaaaatgcgtaaagttttaaagcatcaacaacttgttgcagaagttctgaaccaactgagtatcaggttcaaaccccgagtgcatgtcataaagaaatgtatagatattttaattgaaaaagagtatctggagcgaacggaaggccagaaggatacctacagctatctagcgtga

SEQ ID NO: 17734 - protein, 810 aa, Nasonia vitripennis
MSAASLVGVRLNLSSFGYTFREESSIIQTDIEQYLKMSGYRSSHSSNQGPPGLKQIDLDQIWGDLKEGIEQVYNRQCMSKPRYIELYTHVYNYCTSVHQQINSSRQSSKSKKGQITGGAQLVGLELYKRLREFLRNYLISLLKQGIDLMDEDVLQFYTRQWEEYQFSSKVLNGVCAYLNRHWVRRECEEGRKGIYEIYQLALVTWRDNLFKHLNRQVTNAVLKLIERERNGETINTRLVSGVINCYVELGLNEEDPGAKGQTLTVYKNSFENLFLEDTERFYTRESSEFLRHNPVTEYMKKVDHRLQEEQKRVQVYLHITTHERLAKTCERVLIEKHLDIFHAEFQNLLDSDKNSDLGTMYKLVARIPNGLGELRNLLESHIANQGLAAIDKCGDSAVNDPKIYVNTILEVHKKYNKLVLVSFSNDSGFVAALDKACGRFINTNSVTKAANSSSKSPELLAKYCDVLLKKSSKNPEEAELEDTLNQVMVVFKYIEDKDVYQKFYSKMLAKRLVQHMSASDDAEASMISKLKQACGFEYTSKLQRMFQDIGVSKDLNEHFRRHLTNSAEPLDIDFSIQVLSSGSWPFQQSFTFSLPTELERSVHRFTSFYSSQHSGRKLNWLYNMSKGELHTNCFKNRYTLQASTFQMAVLLQYNTSTSWTIQQLHESTQIKMDFLLQVIQILLKAKLLVTSDDESELGPTSTVDLFTGYKNKKLRVNINIPMKTELKIEQETTHKHIEEDRKLLIQAAIVRIMKMRKVLKHQQLVAEVLNQLSIRFKPRVHVIKKCIDILIEKEYLERTEGQKDTYSYLA

SEQ ID NO: 17735 - DNA, 2268 bp, Anopheles gambiae str. PEST
  CDS (1)..(2268)
atgtcgctcaagccgcgcagaatagcgttcgacgaggtctggaaggagctgcgcgaaacggtacagcaggtgatcaccctgcaagacatcaagcgcgacgtttggaacaatcgatttgtcgatgtgtacgagatatgtgtggcccatccggaaccgttggctgatcggttgtatttggagacgaaaacgttcctagagaatcacgtgcaaactcaaaatgcttccaacgagcaatcggccggcactgggtcgtcgtctgcctcgccatatctgctgctggaacggtactacgacgtgtggatggagtacagcagtggttcgcagtacttaaatcatctctatctgtatctcaatcaacagcacattaaaaagcaaaagctgaacgaagcggaagccgtgtacggttgcagcaaccatggtgataatcaggaaaagatggagatcggtgagctgacgctcgagatctggaaccagtacatgatacagcggctgggcaacgagctggtcgaccagatactgagcggtatcaacgcggaacgggtgaacaattccagcggacagcacaacaagagcacggaggttattcggggcgtgatacagagcttcgtggcggtgcaggaggaccgacgcaagggatcgctcaagctgtaccaggagctgttcgaaacacgcatgctggaggaaagtggccagaacttccgcatcgtcgctagtgaactgttgcaggtgtgcagcgtaagtcaatatatggaaagaataatcaaaaagtttgaggaagaagagaagctggctaaaatttatctacatgaaagttccctgccgaagttgcgcaaggtgtgcgaggaggaaatggtgaccaagcacatgaacttcctgtactccgagtgcaaggagatggtagcgactgagaagagcgctgatctgcgcaatctgtacatcctgctcaaacccgttacggacggtttgaagcgactgatcgaggtgttcctggagcacatcaaggagcagggcaagaagacgatttcgtgcatgaaaggtgactcggtacacatacaatttgtggaaaacatgctggacgtgcatcgaaagtacgaagagctgatccacacgacgttcaagtcggacccgctgtttctcggtgcgctcgataaggcttgtgcgcgtatcatcaacgagaagcacagcaataatcaggtatgccgtagcgccgagctggtcgccaaatactgtgatagcttgctgaagaaatcgaaaacgactgaaggcgaaatcgatcaaaagctgacgcgcagcatcatcatcttcaagtacatcgaggataaagacgtgtatcagaaattctacagccgcatgctggcaaagcgattaattcacgagcagtcgcaaagcatggatgcggaagaattgatgattaacaagctgaagcaggcgtgtggttacgagttcaccaacaagctgcaccgcatgttcaccgacatttcggtgtcgacggatttgaacgcaaaatttagcaaatatttgaacgataacaaacacgagactggtataaacttttccgtcaaggtgctgcaggctggtgcatggccactgggaccaacgcaggtggtcgcctccttcgccataccgcaggagtttgaaaagtccatccgcctgttcgaggagttttaccatatcaactttagcgggcgcaagctaacctggctgcaccatctgtgccacggcgagatgaagctgtcgttcgaaaagcgcaactacatcgtcacgatgcagacgtaccagatggcgatactgctgatgttcgaaaacacggacaagtacacgtgcaaggagctgcagacgtcgctgcagctgcagcaggaaatattccaacggcacctgcagagcctggtggaggcgaaaattttgctgctcaacgaagagaaaatgaatgacgatacggaggttagcattaacgtaaattatagcaacaagcgtactaaattcaaaatcaccaccaatctgcagaaggaaacgccgcaggaggtggagcacacgatgaatgccgtcgatgaggaccgaaagatgtatctacaggcagcgatcgtacgcatcatgaaatctcgaaaggtgctgcggcacaacaccctgattcaggagattctttcccaatcgaaagtgagtttcgcaccaaacgtgtccatgatcaagaagtgcatcgagtcgctcatcgacaagcagtacatcgaacgaacgcccaactccggcgatgaatacagctacgtggcgtaa

SEQ ID NO: 17736 - protein, 755 aa, Anopheles gambiae str. PEST
MSLKPRRIAFDEVWKELRETVQQVITLQDIKRDVWNNRFVDVYEICVAHPEPLADRLYLETKTFLENHVQTQNASNEQSAGTGSSSASPYLLLERYYDVWMEYSSGSQYLNHLYLYLNQQHIKKQKLNEAEAVYGCSNHGDNQEKMEIGELTLEIWNQYMIQRLGNELVDQILSGINAERVNNSSGQHNKSTEVIRGVIQSFVAVQEDRRKGSLKLYQELFETRMLEESGQNFRIVASELLQVCSVSQYMERIIKKFEEEEKLAKIYLHESSLPKLRKVCEEEMVTKHMNFLYSECKEMVATEKSADLRNLYILLKPVTDGLKRLIEVFLEHIKEQGKKTISCMKGDSVHIQFVENMLDVHRKYEELIHTTFKSDPLFLGALDKACARIINEKHSNNQVCRSAELVAKYCDSLLKKSKTTEGEIDQKLTRSIIIFKYIEDKDVYQKFYSRMLAKRLIHEQSQSMDAEELMINKLKQACGYEFTNKLHRMFTDISVSTDLNAKFSKYLNDNKHETGINFSVKVLQAGAWPLGPTQVVASFAIPQEFEKSIRLFEEFYHINFSGRKLTWLHHLCHGEMKLSFEKRNYIVTMQTYQMAILLMFENTDKYTCKELQTSLQLQQEIFQRHLQSLVEAKILLLNEEKMNDDTEVSINVNYSNKRTKFKITTNLQKETPQEVEHTMNAVDEDRKMYLQAAIVRIMKSRKVLRHNTLIQEILSQSKVSFAPNVSMIKKCIESLIDKQYIERTPNSGDEYSYVA

SEQ ID NO: 17737 - DNA, 2340 bp, Anopheles gambiae str. PEST
  CDS (1)..(2340)
atgagtcgagtgtccactcagaagaaggaaggcaaaatgaggatccgtgcctttccgatgactatggatgagaagtacgtggagtcgatatggtcgctgctcaagaacgctatccaggagatacagaaaaagaacaactcgggcctttcgtttgaggagctgtacagaaatgcgtacacgatggtgctgcacaagcacggcgagcggctgtacagcgggctgaaggaggtggtgacgcaccatctcgagtcgaaggtgcgcgaggaggtgctgcgcagcttcaactgcaactttctgcagacgctgaaccagtgctggaacgaccaccagacctcgatggtgatgatccgcgacatcctgatgtacatggatcgcgtgtatgtgcagcagaacgacgtggacaacgtgtacaaccttgggctgaacatcttccgtgatcaggtggtacgctatccgcgcattcgggatcacatgcgcgagacgctgctgaacatggtgatgtgcgagcggaagggcgaagcgatcgaccatatcgcgatcaagaacgcgtgccagatgctgatggtgctcggcatcaaccagcgctgggtgtacgaggaagacttcgagcggccgttcctgacgcagtcggccgcgttctacaagctcgagtcgcaaaagttcctcgccgagaacagtgcgagcgtgtacatccggcgggtggaggcccgcatcacggaggaggccgagcgggccaagctgtacctggacgagagcaccgagagccgcatcgtggaggtggtcgaggacgagctgatcaagaagcacatgcgcacgatcgtcgagatggagaactcgggcgtcgtgtacatgctgcagaacaccaagacggaggatctggcctgcatgcacaagctgttttcgcgcgtgagcggcggcctcaagacgatcgccgactgtgtgtcgcagaacctgcgctcgctcggccgcgacctggtgaaggaggaggagaacggcagcacgaacccgatcacgttcgtgcagaacctgctggatttgaaggaccggtcggaccacttcctgtaccactcgttcaacaacgacaagacgttcaagaacatgatatcgtccgactttgagcacttcctgaatctgaacagcaaatcgcccgaatatctgtcgctgttcatcgacgacaagctgaagaagggctgcaagggaatgtccgagcaagagattgaaaccatacttgacaaaacgatggtattatttagatatttgcaagagaaggacgtgttcgagcggtactacaaggcgcatctggcgaagcggctgctgctgaacaaatccgtcagcgacgattccgagaagaatatgatatcaaaattaaagactgaatgcggttgtcaatttacctcaaaattggaaggaatgtttaaggatatgtccgtctcgaacacggtgatggaggagtttaaaaatcacatcaacaacgataactcggcactggagggcgttgagctgacggttcgaattctcaccaccggattttggccaactcagtccgtgacgcctaactgcaacatcccggcagcaccgcggaaagcctttgaaacgttcaagcgtttctacctggcaaaacattcggggcgtcagctgacactgcagccacagctaggaacggtctacatgaatgccgaattctacggcgtaaaggcggagaaggagaaaacggaaggcaactgtagcagtacggccccgtctgcgggaagcagtagtgcgcctactggtggtgcggcctccctggacgcccccaaacgacatgtgcttcaattatcgacttatcagatgtgtgtactgatgctgtttaacaatcgcgaacgaatgacgtacgaagacatccagcaggagacggacatccctagcaaagatctgatccgcgcgctgcagtcactgtcgatgggcaaacagcagcagcgactcctggttcgaacaccgaaaacgtccaaagaaatcgtttccacggacgagttctacgttaacgatgcgtttgtgtcgaaatttcacaaagttaaaattcaaactgtcgcagccaagggcgaatcggaaccggaacggaaggaaacccgaagcaaagtcgacgaagatcgtaaacatgagattgaagctgctatcgtgcgtatcatgaaagcgcgaaagagaatgcctcacaacctgctcgtatcggatgtgacgtcgcagctaaagagccgtttcctaccgtcgccggtgattataaagaaaagaatagagggcctgatcgagcgggaatatcttgcccgcacgcccgaggatagaaaaatctatgtatatctagcttaa

SEQ ID NO: 17738 - protein, 779 aa, Anopheles gambiae str. PEST
MSRVSTQKKEGKMRIRAFPMTMDEKYVESIWSLLKNAIQEIQKKNNSGLSFEELYRNAYTMVLHKHGERLYSGLKEVVTHHLESKVREEVLRSFNCNFLQTLNQCWNDHQTSMVMIRDILMYMDRVYVQQNDVDNVYNLGLNIFRDQVVRYPRIRDHMRETLLNMVMCERKGEAIDHIAIKNACQMLMVLGINQRWVYEEDFERPFLTQSAAFYKLESQKFLAENSASVYIRRVEARITEEAERAKLYLDESTESRIVEVVEDELIKKHMRTIVEMENSGVVYMLQNTKTEDLACMHKLFSRVSGGLKTIADCVSQNLRSLGRDLVKEEENGSTNPITFVQNLLDLKDRSDHFLYHSFNNDKTFKNMISSDFEHFLNLNSKSPEYLSLFIDDKLKKGCKGMSEQEIETILDKTMVLFRYLQEKDVFERYYKAHLAKRLLLNKSVSDDSEKNMISKLKTECGCQFTSKLEGMFKDMSVSNTVMEEFKNHINNDNSALEGVELTVRILTTGFWPTQSVTPNCNIPAAPRKAFETFKRFYLAKHSGRQLTLQPQLGTVYMNAEFYGVKAEKEKTEGNCSSTAPSAGSSSAPTGGAASLDAPKRHVLQLSTYQMCVLMLFNNRERMTYEDIQQETDIPSKDLIRALQSLSMGKQQQRLLVRTPKTSKEIVSTDEFYVNDAFVSKFHKVKIQTVAAKGESEPERKETRSKVDEDRKHEIEAAIVRIMKARKRMPHNLLVSDVTSQLKSRFLPSPVIIKKRIEGLIEREYLARTPEDRKIYVYLA

SEQ ID NO: 17739 - DNA, 2310 bp, Anopheles gambiae str. PEST
  CDS (1)..(2310)
atgtctaaactaaactcccatggggctacagggcttaagaatattaatcttgaagagatatggaccgatctggaagcagggataaagcaggtgtacaaacgggagctcagtttgggcatcgcacgctacatggaactctacacacatgtctacaattactgtacgagtgtccaccagcagcccaactcgcgcacgggctccgcaccgccgggcggggcccagctggtcggccaggagctgtacaaacggttgaaggagtttctcgagaactacctcgtgcggttgcaccagaatgggatcgatctgatggacgaggaagtgctgagcttctacaccaagcgctgggaggagtatcagttctcgagcaaggtgctgaacggtgtctgcgcctacctgaaccggcattgggtgaagcgcgagtgtgaggagggccgcaaggatgtgtacgagatctaccagctggcgctggtgacctggcgcggcaacctgttcaagcatctgaacaagcaggtaacgaacgccgtgctgaagctgatcgagcgcgagcgcaatggggaaacgatcaactcccggctggtgtccggtgtcatcaactgctacgtcgagctcggcctcaacgaggacgatccgcacgccaagggtcagaatctgtcggtgtacaaggaaagcttcgagaacatattcctggaggatacggaacgattctacacgcgcgagagtgccgaatttttgcgcgaaaatcccgtcaccgagtacatgaagcgggtggagctgcgcctgaacgaggaacagaaacgtgtacaggtgtacctgcacgaaagcacactggaccggctggcggagaagtgtgagcgtgtgctgattcacattcatctcgatcagttccggaccgagttccagaacttgctgaactcggacaagaaccaggatctgggccgcatgtactcgctggtcgcccgcatcaaggccggtctgtacgagctcaaagaaatcctagaaactcacatccacaatcagggcctggcggcaatagagaaatgtggagactctgctgtaaatgacccgaaaatttacgtccaaaccattctggaagtacacaagaaatacaacgcattagtacttactgcttttaacaacgacagcggtttcgtggcagcgctcgataaggcgtgcggcaagttcatcaacacaaacgccgtcaccgagctgagcagaagcgccagcaagagccccgagctgttggctaagtattgtgatttgctgctgaagaagtctagtaaaaatccggaggaagcggaactggaggacacgctcaatcaagtgatggttgtgttcaagtacatcgaagataaggatgtgttccagaagttctacagcaagatgctggcgaaacggctttgccaacacatgtcggccagcgacgatgcggaagcgtccatgatatcgaagctgaagcaggcctgtggcttcgagtacaccagcaaactgcagcggatgttccaggacatcggtgtgtcgaaggatctgaacgatcagtaccggaagcatcacgagaagctgcgggacacgcgcagcacgacacagaacgagatagatttcagcattctggtgctatcgagcggatcgtggccattcggccagggctttacattctctctgccctttgagctggaacagtcggtccatcgatttaacaatttctacgccaagcaacattccggccgtaaactgaactggttgtacaatatgtgccgcggcgagctcattacgaactgtttccgaatgcgatacacactgcaggctagtaccttccaaatggccgtgctgttgcaattcaacgaagaaacggcctggagtatcaagcagttgggagaaaacactggtatcaacaatgaaaatcttatacaagtgcttccaattttgctgaagacgaagctacttaactgctacgaaggcgaaggcaagctacacccagactccaccatcgagctgaacaaggactttaaaaaccgtaaactccgcatcaacatcaacttcccgctgaagtcggaactgaaggtggaacaggaagcgacacataaaaacatcgaggaagatcgtaagatactcatccaggcggcgatcgtgcgtatcatgaagatgcgaaagatgctcaaccacacgcagctcgtgaacgaagtgttgaatcagctgtccacacgatttaagccgaagattcaagtgataaagaaatgtatcgatattctgatagagaaagaatatctggaacgtcaggaaggacaaaaggatacctacagctatctggcttga

SEQ ID NO: 17740 - protein, 769 aa, Anopheles gambiae str. PEST
MSKLNSHGATGLKNINLEEIWTDLEAGIKQVYKRELSLGIARYMELYTHVYNYCTSVHQQPNSRTGSAPPGGAQLVGQELYKRLKEFLENYLVRLHQNGIDLMDEEVLSFYTKRWEEYQFSSKVLNGVCAYLNRHWVKRECEEGRKDVYEIYQLALVTWRGNLFKHLNKQVTNAVLKLIERERNGETINSRLVSGVINCYVELGLNEDDPHAKGQNLSVYKESFENIFLEDTERFYTRESAEFLRENPVTEYMKRVELRLNEEQKRVQVYLHESTLDRLAEKCERVLIHIHLDQFRTEFQNLLNSDKNQDLGRMYSLVARIKAGLYELKEILETHIHNQGLAAIEKCGDSAVNDPKIYVQTILEVHKKYNALVLTAFNNDSGFVAALDKACGKFINTNAVTELSRSASKSPELLAKYCDLLLKKSSKNPEEAELEDTLNQVMVVFKYIEDKDVFQKFYSKMLAKRLCQHMSASDDAEASMISKLKQACGFEYTSKLQRMFQDIGVSKDLNDQYRKHHEKLRDTRSTTQNEIDFSILVLSSGSWPFGQGFTFSLPFELEQSVHRFNNFYAKQHSGRKLNWLYNMCRGELITNCFRMRYTLQASTFQMAVLLQFNEETAWSIKQLGENTGINNENLIQVLPILLKTKLLNCYEGEGKLHPDSTIELNKDFKNRKLRININFPLKSELKVEQEATHKNIEEDRKILIQAAIVRIMKMRKMLNHTQLVNEVLNQLSTRFKPKIQVIKKCIDILIEKEYLERQEGQKDTYSYLA

SEQ ID NO: 17741 - DNA, 2301 bp, Magnaporthe grisea 70-15
  CDS (1)..(2301)
atggcgccagcctcacgggcaccgctgggcgtcgggtccggtcgggatgatatcgaagtcacgtggaactatctacagaatggaatcaccaggatcatgaacaacttacaagatggcatgactatggagacgtacatgggtatctatacctccgtacacaatttctgcacctcacagaaagctcttggcttttcaaattcgcccggccctccagcagctgcgcacagaggagcgcatcttcttggtgaggatctctacaagaagcttatgaaatacctgagcgatcatctcgaggacctgctcgtccagtctaaagcccataccggcgaggctttgcttagcttctacataagagagtgggatagatacacgaccgcagccaagtacatccaccacctcttccgatacctcaaccgccactgggtcaagcgcgagattgacgagggaaagaagcacatttttgatgtttacacactgcacctggtccagtggaagaatgtcttgttcgacaaggttcacgagaaggtgatggatgccgtccttgctttggtcgagaggcaacgaaacggagagaccatagagtatggtcagatcaagcaaattttagactccatggtctcgttgggcctggatgagaacgacgcgtccaaaaccacgctggactgctaccgtttccacttcgagaagccttttatcgccgctacggaagcatactaccaaaaggagagccgcgcgttcgtcgcggagaacactgtggttgagtacatgaagaaggcggaggcgcgtttagaagaggaggaggagcgagtccgaatgtacttgcatcccgacattgccgtggcactcaagcgctgctgcaacaccgctttgatcgcagaccactcggcgattctcagggacgaatttcaagtactgctggataatgaccgcgaggatgatatggcgaggatgtacaaccttttagctcgaatcagtgacggcctcgacccactgcgtcagaagttcgaagcccacgtgcgacaagctggcctgacggccgtggccaaggtcgcatctggccagggcgagaagctggagcccaaagtgtatgtggatgcgctgctcgaagtccacacgcaataccagggattggtcaagcgggcattcaacgacgagccagagtttacacgatctcttgacaacgcctgccgagaatttgtcaaccggaacgacgtttgcaagtccggatccaacaaatcccctgagctgcttgccaaatacacggatgttctccttcgcaagagcggcagtgccgtcgaggaggaggagctggagaacactttgagccagataatgactgtcttcaagtacatcgaagacaaggatgtcttccaaaagttctactcccggatgctggcccggcgtctcgtgcataccaactcatcctcggatgacgcagaaactagcatgatcagcaaactgaaggaggcatgtggcttcgagtacaccaacaaactgcaacgcatgttccaggacatgcagatttcgaaagacctcaacacgggtttccgtgagcatgctgaaaagtccgagatgaaggttttggactcgcaatacgcgatcctcggaactggcttttggccactacaagtccccaatactgccttcaaccccccggcggtcatatccgaggattgcgaacggttcacgcgcttctacaagaacaagcacgatggcagaaagctcacttggctttggcagctgtgcaaaggtgaggttcgagcgacctactgcaagcagagcaaagtgccatacaccttccaggtgtccatgtaccagatggcgattcttttgatgttcaacgacggcgatcgtcacacgcatgaggagatagcatctactacctctatgaacagcgagaccatggaccccgtactaggcctcttgctgaaagccaaggtccttctggcagacagtgacaagccaggcccagggaccacatacagcctgaattacgacttcaagaacaagaaagttcgtgtcaacctgaacattggtttgaagacagagcagaagcaggaagaggtggagacaaacaagacaattgaggaagaccgaaagcttcttctccagtcggccattgtgcgtattatgaaggctcgtaagcgtatgaagcacaaccagctggttagcgagaccatcggtcagatcaagggacggtttgtgcccaagattccggacatcaagaagtgcattgagattcttttggacaaagaatacctagagcgtctggaggatgatgatctcggctacctggcctga

SEQ ID NO: 17742 - protein, 766 aa, Magnaporthe grisea 70-15
MAPASRAPLGVGSGRDDIEVTWNYLQNGITRIMNNLQDGMTMETYMGIYTSVHNFCTSQKALGFSNSPGPPAAAHRGAHLLGEDLYKKLMKYLSDHLEDLLVQSKAHTGEALLSFYIREWDRYTTAAKYIHHLFRYLNRHWVKREIDEGKKHIFDVYTLHLVQWKNVLFDKVHEKVMDAVLALVERQRNGETIEYGQIKQILDSMVSLGLDENDASKTTLDCYRFHFEKPFIAATEAYYQKESRAFVAENTVVEYMKKAEARLEEEEERVRMYLHPDIAVALKRCCNTALIADHSAILRDEFQVLLDNDREDDMARMYNLLARISDGLDPLRQKFEAHVRQAGLTAVAKVASGQGEKLEPKVYVDALLEVHTQYQGLVKRAFNDEPEFTRSLDNACREFVNRNDVCKSGSNKSPELLAKYTDVLLRKSGSAVEEEELENTLSQIMTVFKYIEDKDVFQKFYSRMLARRLVHTNSSSDDAETSMISKLKEACGFEYTNKLQRMFQDMQISKDLNTGFREHAEKSEMKVLDSQYAILGTGFWPLQVPNTAFNPPAVISEDCERFTRFYKNKHDGRKLTWLWQLCKGEVRATYCKQSKVPYTFQVSMYQMAILLMFNDGDRHTHEEIASTTSMNSETMDPVLGLLLKAKVLLADSDKPGPGTTYSLNYDFKNKKVRVNLNIGLKTEQKQEEVETNKTIEEDRKLLLQSAIVRIMKARKRMKHNQLVSETIGQIKGRFVPKIPDIKKCIEILLDKEYLERLEDDDLGYLA

SEQ ID NO: 17743 - DNA, 2493 bp, Magnaporthe grisea 70-15
  CDS (1)..(2493)
atgcagcgtcagaacaagatacggccgccgaagcggtcactccgacatgaaacagacgaattcgaccagcagtgggacgtcctcagagaggcgctcacggacattcacaacagaaattccagccgcctcttattcgagcatttataccgagccagctacaagatcgtgcttaagaagcaaggcgagcgtctctacacgctcgtgcaagagtttgaggggaaatggtttgccgaacaggttatcccacagctccaagccatgatcgcccccaacctgatcaatgttgcggtggaggctggtaccagtgcccatgagcgccgcgagatgggtgacacgttcatgaagggcctcaaagaagcatgggagaaccatcggatgtcgatgaacatggttgctgacatcttaatgtacctggataagggtttccttaaggagagccggggaacctcgatatttgtcacgacgataggcttgtttcgtgaccaccttgtcaaccctaataccgtcgtcggccacgacaggacgttcagcctcttcgatatccttagcactgtcatactcgaccacatagacatggagcgcgagggagacgtcatcaaccgttctctcatccacagctgtgtcaagatgctggaagatctctacgaaaccgacgaggagatggatgccgatcgattgtatctcgttcgcttcgagccacacctactcgaggcaagtcggacgttctacagaagtgaggctctgaagttattgcggaacggtgacgccagcatttggatacgccagacacataggaggttattggaggaggaggacaggtgcaagacgaccctgtccaccttgtcgatcgaaaagatgacgcgagcggtagaggcggagctgatctctgcacatctcaacgatttccttgcactagagaacaatggcttgaggcaaatgctggacgacgatcgcgttgaggatttggccatcctctatcagctcgtcgccagggtagacccgtcaaaggatttgttgaagaagggtgttctcaaccgcatcctggctctaggtgctgagattgagaagaatctcagcacgatagatttttctgtcgctcaaggcgacgcagcagagaatccagcagcagaaaagcccaagtctcaggctttgtcacagcaagctcagcagactgccgcagccattaaatgggtccatgatgttttggacttaagggcaaaatttgatgttatttgggagaaatcattcgctcaagacccgggcctacaaactaccatgaccaaaggcttttcagatttcatccaccagtttgggagaagctctgagtttgtttcgctctacattgacgagaatctgaagcgaggcattcgcggcaagtcagacttggaagtcacagccatcttggataggtcgatcgtcatgatcaggtacctaaaggataaggatctatttgagagatattaccagaagcatcttggacggaggctcctacacagcagagcctccagcgaggaagcagagaagcagctcattaccatgatgcagctggagttgggcaaacacttcacttccaagttcgaaggcatgttcaaggacatcactatatcagaagagctgtcgaccaagtatggcgagcacattcgctcgctgggtgacgtggatgtccaccacaaaccgatcgacttggctatcagcgtcttgaccagcaacagctggccaccagatgttatgggccgccctgcccaagtaggacgtggtgatgggccgcctgcagtggactgcaactacccacccgagatcaagcgtttgcaagacagctttttcaagttctacctgaaggatcgcagtggcagggtcttgacctggataggttcagcgggcagcgcagatattaaatgcgtatttccgccagtcaagggcatgtcaggcccgcttagtcgggagcgacgatatgaactaaacgtatcgacttatggaatggtcgttttgatgctgttcaacagcctcgaagacggcgagactctaagtttcgaagacattcaggcagaaaccagtatccctcccaaagatttgtctagggctcttgcatctttgtcgatcaaccccaaagctcgagttttactcaaggaccctgcgaccaagactatccgacctggcgacaagttctcattcaatgcaggctttgtcagcaaggcaatcaagatcaaggcgccggtcataaactcgcagtccaaggtcgaaggtgacgaagagcgtcaacggactgaggacaagaatgatgagacacgacgacatatgatcgatgcagccatagtgcgcataatgaagtctcgcaaggagctcgcacacaacgcccttctcgccgaggtcattgggcagcttgtttcaagattccagccagacgtagccatgatcaagacccgaatcgaggatttgattgctcgagagtatctagagcgtctagacgattctggttacaagtacatggcatga

SEQ ID NO: 17744 - protein, 830 aa, Magnaporthe grisea 70-15
MQRQNKIRPPKRSLRHETDEFDQQWDVLREALTDIHNRNSSRLLFEHLYRASYKIVLKKQGERLYTLVQEFEGKWFAEQVIPQLQAMIAPNLINVAVEAGTSAHERREMGDTFMKGLKEAWENHRMSMNMVADILMYLDKGFLKESRGTSIFVTTIGLFRDHLVNPNTVVGHDRTFSLFDILSTVILDHIDMEREGDVINRSLIHSCVKMLEDLYETDEEMDADRLYLVRFEPHLLEASRTFYRSEALKLLRNGDASIWIRQTHRRLLEEEDRCKTTLSTLSIEKMTRAVEAELISAHLNDFLALENNGLRQMLDDDRVEDLAILYQLVARVDPSKDLLKKGVLNRILALGAEIEKNLSTIDFSVAQGDAAENPAAEKPKSQALSQQAQQTAAAIKWVHDVLDLRAKFDVIWEKSFAQDPGLQTTMTKGFSDFIHQFGRSSEFVSLYIDENLKRGIRGKSDLEVTAILDRSIVMIRYLKDKDLFERYYQKHLGRRLLHSRASSEEAEKQLITMMQLELGKHFTSKFEGMFKDITISEELSTKYGEHIRSLGDVDVHHKPIDLAISVLTSNSWPPDVMGRPAQVGRGDGPPAVDCNYPPEIKRLQDSFFKFYLKDRSGRVLTWIGSAGSADIKCVFPPVKGMSGPLSRERRYELNVSTYGMVVLMLFNSLEDGETLSFEDIQAETSIPPKDLSRALASLSINPKARVLLKDPATKTIRPGDKFSFNAGFVSKAIKIKAPVINSQSKVEGDEERQRTEDKNDETRRHMIDAAIVRIMKSRKELAHNALLAEVIGQLVSRFQPDVAMIKTRIEDLIAREYLERLDDSGYKYMA

SEQ ID NO: 17745 - DNA, 2493 bp, Gibberella zeae PH-1
  CDS (1)..(2493)
atgatttcagggcgtggaggagctggcactcgggggaggatcagaccccctcgtcgtattgtgcgtgccaccgagtctggagagggttccgattttgaggtatgctggaaaatgctcagggaagcactcgacgacatccacaggaaaaactgcagcaagttatctttcgaagaactgtaccgagcggcctacaaaatcgtccttaagaaaaaaggcgagcttctctacgaaaaggtgaaaggctttgaggaacagtggttcaacgaccatgttatccctgaaatcaaagagctattcagcaagagtctgcttgacagcggaagcagatcgattcacgagaagcgacagactggggagagattcctcaaaggtctacgcgacaaatgggaagatcacaacatgtctatgaacatgacggctgatattctgatgtacctcgatcgtggctatacccagcttgaagcacagcgaatccccatcttcgccaccaccatcgcgttgttccgagagcatatccttcgatcatccctaaataccaaccacaaggtcatcgatgtcctgatatcggttatcctggagcagatcaacatggagcgcgaaggagatatcatagacagaaatcttattcgaagctgcacccgaatgctcagcagtctctacgaaaccgaagacgagaaagacagcgacaagctatactccacagtcttcgagccccgttttcttgaaaatagtaaagcctactatgccgccgaatgcgagaagctactacgcgaatcggacgccggggcctggttgcgacacacccaaacgcggctgaatgaggagatcgatcggtgcggaaccacaatagagctggagacactgccaaaggtcacgtcgaccattgatcaagagcttataatcaagcatctgggcgagtttttagcactcgaagggagtggtttgaagtggatgattgacaacgacaaggtagaagagctctctatcctctatagactcgtctctagagtcgattctacaaagacatcgttgcgggaaattctacagcgccgtgtggttgagcttggattggacattgaaaaggtcctgaagaacactgacttctcgactggtcaaggtgatggagaagaaggcgaaggcgacaaggcaaagaccttgaaccccgctgcgcagcagactgctgctgcaataaaatgggttgatgatgttcttcgtctaaaggacaagtttgacaatctctggacccgctgcttccaggacgacctcatcatccaaagcgccctgaccaagagcttttccgacttcattaacatgttcaatcggagctctgaatatgtctccctgtttatcgacgacaacctcaaaagaggtatcaagggaaagacagaagcggaggtggatgttgttcttgaaaaggccattgttctgatcagataccttcaagacagggatctgttccaaacatactaccagagacatctggccagacgactacttcatggcaagtccgaaagccatgatgttgagaagcaaatcatctctcggatgaagcaggagcttggacaacagttcaccagcaaattcgaaggcatgttcagagatctggtcacgtccacggagcttactaccggctaccgtgatcacatccgcagcgttggagacggtactaagaccatcgatcttaacattaacgttctcaccacaaactactggccacccgaggtcatgggacgcaccgcgcagattggcgacggttctcgcgttacttgcacgtacccacctgagctggaccgattgcagacaagcttcgagcagttctacctaactaatcgtaatgggcgcaagcttacctggattggcacaactggaagctctgatatcaagtgcactttcccggccattgctgggaagtctggccctctatcacgagagcgcagatatgaaatcaacgtgccgacctttgccatggtcgtcatgcttctttttaacgatctggaagatgatcagtcgttgacatttgaggagattcaggccaagacaaacatctcaaaccaggacctcatgcggacgctgacggccattgcggtagcgcccaagtctcgtgtcctgctaaaggatccagccaacaaatcagttaagccgggcgacaagtttacgttcaacgcatcgttccaaagcaagactatccgaatcaaagcacccatcatcaatgcggtgtcaaaggttgaagacacgacagagaggaagactactgaggaaaagaacaaccagacgagagcccacattgttgacgcagcaattgtgagaatcatgaaatctcgaaaggagctctctcattctcagctgaccagcgaagttctcagccagttgtcgggtcgctttaagcctgaggtctccctcatcaaaaagcgtatcgaagatcttatcgccagagaatacctcgaacgtcctgatgaagacggcgcaccatctttgtaccgttatgttgcataa

SEQ ID NO: 17746 - protein, 830 aa, Gibberella zeae PH-1
MISGRGGAGTRGRIRPPRRIVRATESGEGSDFEVCWKMLREALDDIHRKNCSKLSFEELYRAAYKIVLKKKGELLYEKVKGFEEQWFNDHVIPEIKELFSKSLLDSGSRSIHEKRQTGERFLKGLRDKWEDHNMSMNMTADILMYLDRGYTQLEAQRIPIFATTIALFREHILRSSLNTNHKVIDVLISVILEQINMEREGDIIDRNLIRSCTRMLSSLYETEDEKDSDKLYSTVFEPRFLENSKAYYAAECEKLLRESDAGAWLRHTQTRLNEEIDRCGTTIELETLPKVTSTIDQELIIKHLGEFLALEGSGLKWMIDNDKVEELSILYRLVSRVDSTKTSLREILQRRVVELGLDIEKVLKNTDFSTGQGDGEEGEGDKAKTLNPAAQQTAAAIKWVDDVLRLKDKFDNLWTRCFQDDLIIQSALTKSFSDFINMFNRSSEYVSLFIDDNLKRGIKGKTEAEVDVVLEKAIVLIRYLQDRDLFQTYYQRHLARRLLHGKSESHDVEKQIISRMKQELGQQFTSKFEGMFRDLVTSTELTTGYRDHIRSVGDGTKTIDLNINVLTTNYWPPEVMGRTAQIGDGSRVTCTYPPELDRLQTSFEQFYLTNRNGRKLTWIGTTGSSDIKCTFPAIAGKSGPLSRERRYEINVPTFAMVVMLLFNDLEDDQSLTFEEIQAKTNISNQDLMRTLTAIAVAPKSRVLLKDPANKSVKPGDKFTFNASFQSKTIRIKAPIINAVSKVEDTTERKTTEEKNNQTRAHIVDAAIVRIMKSRKELSHSQLTSEVLSQLSGRFKPEVSLIKKRIEDLIAREYLERPDEDGAPSLYRYVA

SEQ ID NO: 17747 - DNA, 2394 bp, Gibberella zeae PH-1
  CDS (1)..(2394)
atggctaccgccaaagcgcggggcaagctgcccgagaccgagactatcgacttgacgcagcagccctctgccttcaagccttatgctggtgccaagaaattggtgatcaaaaacctgcgagctccgacaaatcgagacagccaggtagcagagtactacaaacgaacagagaaggagcttgacagtgctttggagtcaatctttgcagggaggacgcccgatgttcctctcgaaaggctttacagaggtgttgaggatgtttgtcggaagggggatccggccaaggtttaccaaatgcttaatgaaagagtcgacgcacatctgcagcgtattatcctgccaaagatccagaagaacggacgggcttcgaacctcgacacgttgaagattactctggaagaatggaagacctggaataagcaaacgatattgattcgatccacgtttagctttcttgaccggacatatctgctgcgagaaaactacccatcaataaatgatatggcaattggtaaattccgaaaaatggcattttcatctcaggcgcattcatacaagagccctgtgggtgcaaagcttgttgcgggtatatgcgaattgatcgaaaatgatcgaaggggtggcgaccaaactgagccgacattactcaaagactctatcatgatgttatacgttttaggtgtctatgttaaacacttcgagcctttcttcttggagcaatcccaaaggtacttcaaggaatttggcgaggcctggagtacctccagcctcaaggactatatcctggtttgcgagaagcttttaaagaaagaagactatcggtgcattcagttcaacctcgacagcaccacggagaagcaacttatggattctgcccattcgctacttattggcaattattctgagaagctcttgaatggtggtagtctaggaaagctgttggccgatagagaagtcgagtcaatgaaggctttgtacgacttgcttcgactatcgggtattcagaagaaaatgaaagctccgtggggtgagtatatcagaacagcaggagcagccatcgtcggcgataaggaaaagggcgatgaaatggttctgcgcttgttggagttgcgacgctcgctcgacctcatgatccgagacgctttcaacaaagatgaggactttctctgggccatgagagaatcatttggcaagttcatgaacgatagaaaggttgcatcatgttgggaaacaggaacatcaaagatcggcgagatgattgccaagtacatcgatatgctcttgagaggtggtctgaaatcactacccaaggagctcttgtccgatttaaaggatcgtgaaactgcacagaaagaaggtcaggctagcactggcgatgaggatgccgagcttgacagacaacttgaccaagcactcgaacttttcagatttatcgaaggcaaggatgcgtttgaagccttttacaagaaagatctagcccggagattgcttatgggtcgaagcgcaagccaggacgctgaacggaacatgcttaccaagcttagaggagagtgtggtgccaactttacgcaaaacttggagcaaatgtttaaggatcaagagttgggtaaggatgaaatggagtcttataagcaatggtgtcaaggtagtgctgatcgaaaggctcctctggacttgtcagtcatgatcctttcggctgctgcctggccaacatatcccgacgttcgtctcaatctgcctgatgaggttgctacacagattgagaggtttgataagtattacaagaataagcacacaggccgtgtgttgacatggaagcattcattggctcattgttctgtcaatgcccgttttgccaaggctcccaaggaactcctcgtgtcggcttaccaggctgttgttcttatgatgttcaacagcatacccgatggcggcttcctagcctatgagcagatcgctacaggaaccggtcttcaaggcggtgatcttaaccgcactcttcagtcacttgcatgtggtaaggcgagagtgctgaccaaacaccccaagggccgtgatgtcaagcccacggacacttttacattcaacaagactttcacagatcccaagtaccgagtcaagatcaaccagatccaactcaaggagactaaggaggagaacaaggcaacgcatgaaaggatcgtacaggaccgacgattcgaaactcaggctgccattgtgcgaataatgaagagtcgaaagagcatgggccattcagagctggtggcagaagtgatcaacttgaccaaaaagagaggcagcattgacacgtcagcaatcaagaaggagatcgaaagtcttatcgagaaggattacatcgagcgagagggcaatgcatatgtgtacctagcttaa

SEQ ID NO: 17748 - protein, 797 aa, Gibberella zeae PH-1
MATAKARGKLPETETIDLTQQPSAFKPYAGAKKLVIKNLRAPTNRDSQVAEYYKRTEKELDSALESIFAGRTPDVPLERLYRGVEDVCRKGDPAKVYQMLNERVDAHLQRIILPKIQKNGRASNLDTLKITLEEWKTWNKQTILIRSTFSFLDRTYLLRENYPSINDMAIGKFRKMAFSSQAHSYKSPVGAKLVAGICELIENDRRGGDQTEPTLLKDSIMMLYVLGVYVKHFEPFFLEQSQRYFKEFGEAWSTSSLKDYILVCEKLLKKEDYRCIQFNLDSTTEKQLMDSAHSLLIGNYSEKLLNGGSLGKLLADREVESMKALYDLLRLSGIQKKMKAPWGEYIRTAGAAIVGDKEKGDEMVLRLLELRRSLDLMIRDAFNKDEDFLWAMRESFGKFMNDRKVASCWETGTSKIGEMIAKYIDMLLRGGLKSLPKELLSDLKDRETAQKEGQASTGDEDAELDRQLDQALELFRFIEGKDAFEAFYKKDLARRLLMGRSASQDAERNMLTKLRGECGANFTQNLEQMFKDQELGKDEMESYKQWCQGSADRKAPLDLSVMILSAAAWPTYPDVRLNLPDEVATQIERFDKYYKNKHTGRVLTWKHSLAHCSVNARFAKAPKELLVSAYQAVVLMMFNSIPDGGFLAYEQIATGTGLQGGDLNRTLQSLACGKARVLTKHPKGRDVKPTDTFTFNKTFTDPKYRVKINQIQLKETKEENKATHERIVQDRRFETQAAIVRIMKSRKSMGHSELVAEVINLTKKRGSIDTSAIKKEIESLIEKDYIEREGNAYVYLA

SEQ ID NO: 17749 - DNA, 2445 bp, Apis mellifera
  CDS (1)..(2445)
atgtctaggctcgggggaactcaggttctagccacagcacaggtgaagaggacggctgctgatcacgcagcggtgttaaactttggtgctgcaaaacgcagcaagctgtccgccgttgcggtcacggagatcaacgagattgaaaacatgacggatacggctgcagccacgactgatacccaaaagagagccaatttctcagctttaactgttgggaatccaaacggcgttaacaagatttcaccaagtttggcaagcgcaaaacctggtacagctagaaaactcgtcatcaaaaattttaaaaataaaccaaaattaccagaaaattatcaagaacagacatgggaaaaattacaagaagctgtaatagcaatacaaactagcaagagtattcgttattcattagaagagctttatcaagcagttgaaaatatgtgtaatcataaaatggcatccacattatatacaaagctaacaaggttaacagaagcacatgtgcaagcaaatatagaacaatttttagcagaatcaatggataggcatatattcttaaaaaaaatgaatgaatgttggcaatcacattgcagacaaatgattatgattagaagtatttttctatatttggatagaacatatgtattacaaaatccaagtattttatctatttgggatatgggtttacatttgtttagagtgtatattgttttgaataacttagttcaaacacgtacagtagaaggattacttatgctcatagaaaaagaacgtcaaggtgatacagtggatagaacacttcttaaatcattattaagaatgttatcagatctacaaatctaccaagatgcctttgaaactaaatttttggttgctactgaaagactatatgctgctgaaggtcaacgactgatgaatgaacatgatgttcctgagtacttagcacatgtggacaaacgacttcaagaagaaaatgaacgtttgttacattatttggatgcatctacaaaatggtccttaatacatacggtagaaaaacaattattgtctgaacatattaccagcattttacaaaaaggattaagtggtttactggatgaaaatagaattaatgatttatctttactttataatttatatagtcgagtaaaaaatggccttgtagaactttgtctaaactttaattcttatattaagaaaaaaggtaaaactatagttatagatcctgaaaaagataaaactatggttcaagaactcttagatttcaaagataaaatggacaatatagttaacacatgttttcataaaaatgagaaatttgcaaacagtttaaaagaagcttttgaagcttttattaatcaacgtgcgaataaacctgctgaattaatagcgaaatttgttgactgcaaacttagagcgggtaataaagaagcgacagaagaagaattagaaagattattagataaaatcatggtactgtttagatttatacatggaaaagatgtatttgaagcattttataaaaaagatttagctaaacgtttattagttggtaaatcagcttctgttgatgctgaaaaatccatgttatccaaattaaaacaagaatgtggaggaggttttactagtaaattggaaggaatgtttaaagatatggaacttagtaaagatattaatattgcttttaaacagtatgcaggaaatttgcaaagtgaattgtctgctagtaatttggatttgactgtttcgatacttacaatgggttattggccaacatatcctgtaatggaagtaacattaccaccagaaatggttcaatatcaagatgtatttaataaattttatttaggaaaacatagtggtagaaaattgcaatggcaacctactttaggacattgtgtattaaaagcttggtttaatcagggcaacaaagaacttcaagtttcattatttcaagcattggtgttaattttgtttaatgatgctgacaatttgtccttggaagatataaaagcagcaacaaatatagaagatggtgaacttagaagaactttacaatctttagcttgtggaaaagccagagtgttacaaaaaaatccaagaggaagggatgttgcagataacgatagatttgtttttaatgcagactttacaaataaattattcagaattaagataaatcaaattcaaatgaaagaaacgaatgaggaacaaaaagctacagaagaaagagtatatcaggatagacaatatcagatagatgcagctattgttagaattatgaaaatgagaaaaacactttcgcacaatttgttgattagtgaattatacaatcaacttaagtttcctgtaaagcctgcagatttgaaaaagagaattgaatctctcatagatagggattacatggaacgagataaagataatgcaaatgagtacaattatgttgcataa

SEQ ID NO: 17750 - protein, 814 aa, Apis mellifera
MSRLGGTQVLATAQVKRTAADHAAVLNFGAAKRSKLSAVAVTEINEIENMTDTAAATTDTQKRANFSALTVGNPNGVNKISPSLASAKPGTARKLVIKNFKNKPKLPENYQEQTWEKLQEAVIAIQTSKSIRYSLEELYQAVENMCNHKMASTLYTKLTRLTEAHVQANIEQFLAESMDRHIFLKKMNECWQSHCRQMIMIRSIFLYLDRTYVLQNPSILSIWDMGLHLFRVYIVLNNLVQTRTVEGLLMLIEKERQGDTVDRTLLKSLLRMLSDLQIYQDAFETKFLVATERLYAAEGQRLMNEHDVPEYLAHVDKRLQEENERLLHYLDASTKWSLIHTVEKQLLSEHITSILQKGLSGLLDENRINDLSLLYNLYSRVKNGLVELCLNFNSYIKKKGKTIVIDPEKDKTMVQELLDFKDKMDNIVNTCFHKNEKFANSLKEAFEAFINQRANKPAELIAKFVDCKLRAGNKEATEEELERLLDKIMVLFRFIHGKDVFEAFYKKDLAKRLLVGKSASVDAEKSMLSKLKQECGGGFTSKLEGMFKDMELSKDINIAFKQYAGNLQSELSASNLDLTVSILTMGYWPTYPVMEVTLPPEMVQYQDVFNKFYLGKHSGRKLQWQPTLGHCVLKAWFNQGNKELQVSLFQALVLILFNDADNLSLEDIKAATNIEDGELRRTLQSLACGKARVLQKNPRGRDVADNDRFVFNADFTNKLFRIKINQIQMKETNEEQKATEERVYQDRQYQIDAAIVRIMKMRKTLSHNLLISELYNQLKFPVKPADLKKRIESLIDRDYMERDKDNANEYNYVA

SEQ ID NO: 17751 - DNA, 2334 bp, Apis mellifera
  CDS (1)..(2334)
atgtcagggcatagaggcggaggaggagctgggagccatcaaggaggcccagcaggtcttaaacaaatagatttagatcaaatttggggagatcttcgtgagggtattgaacaagtttacaacaggcaatgtatgtctaaaccaagatatatagaattgtacacacatgtatataattattgcacaagtgttcatcaacaattaactagaacatcgaccaaaagtaagaaaggacaaatttctcaaggaggtgcacagttagttggtttggagttatataaacgtttacgtgactttcttagaaattaccttataagtttattaaagcatggaattgacttgatggatgaagatgtattacagttctatacaagacaatgggaagaatatcaatttagtagtaaagtattgaatggtgtatgttcatatctaaatcgacattgggtacgtagagaatgtgaagaaggtcgtaaaggaatctacgaagtatatcaatcagctttggttacatggcgtgataacttattcaagcatttaaatagacaagttactaatgcagtacttaaattaattgagagagaacgcaatggtgaaacaataaatacacgtttagtcagtggcgtaatcaattgttatgtagaattaggtatgaatgaagaagatcctggtgctaaaggacagaatcttactgtttacagtaattcttttgaaaatgtcttccttgaagatacagaaaggttttacactcgtgaaagttctgagttcctccgacaaaatccagttacagaatacatgaaaaaggcagaacaaagattattagaagaacaaaaacgagttcaagtatatttgcatcaaacaacccatgataaattagcaaaaacatgtgagagagtgttaattgagaaacatttagatatttttcattctgaatttcaaaatctcttggatgctgataagaacatagacttaggtcgaatgtatcaattagtagcaaggattccaaatggacttggcgaattaaggaatcttttagaaggtcatatagctaatcaaggacttggagctattgataaatgtggtgattctgcagccaatgatccaaaggtttatgtaaacacaattctggaggttcataagaaatataatgctttagtacttgttgcatttaataatgatagtggttttgtggcagctcttgataaggcttgtggaagatttattaacagtaattcagtaactagagcagcaaatagcagcagtaaatcaccagaattattagcaaaatactgtgacctgttattaaaaaaaagtagtaaaaatcctgaagaagctgaacttgaagatacattgaatcaagttatggtggtatttaaatatatagaagacaaagatgtgtttcaaaagttttatagtaaaatgctggcaaaaagattagtacaacatatgtctgccagtgatgatgcagaagcttctatgatttctaaattgaaacaagcttgtggttttgaatacacctcaaaattgcaacgaatgtttcaggatattggtgtatctaaggacttaaatgaacaatttagaaggcatttgacaaattctgctgaaccattggatatagatttcaatatacaagtcctgtcttctggctcctggccatttcaacagtcttttacgttttcattgccaacagagctagaaagatctgtacataggttcactaccttctatagttcacaacatagtggaagaaagttgaattggttgtacaatatgtctaaaggagaattacatacaaattgttttaaaaatagatacacattacaagcatccacatttcaaatggctgttttattacaatataatggatccacagtgtggacgattcaacaattacatgatgctacacaaataaaaatggattttttgcttcaggttattcaaatactcttgaaagctaagctattaacggcagctactgatgacgaagctgaattgacgccactgtcaacagtggaactatttacaggatataaaaacaagaaactgagagtaaatattaatataccaatgaaaacggaattaaagattgaacaagaaacaacacaaaaaaatatagaagaagatagaaagctcttaattcaggcagctattgttaggattatgaaaatgagaaaagtattgaaacatcagcaattggtagctgaagtattgaatcaattaagctctaggttcaaaccaagagtacatgtcattaagaaatgtatagatattttaattgaaaaagaatatctggagcgcacagagggccaaaaggacacttatagctacctggcatga

SEQ ID NO: 17752 - protein, 777 aa, Apis mellifera
MSGHRGGGGAGSHQGGPAGLKQIDLDQIWGDLREGIEQVYNRQCMSKPRYIELYTHVYNYCTSVHQQLTRTSTKSKKGQISQGGAQLVGLELYKRLRDFLRNYLISLLKHGIDLMDEDVLQFYTRQWEEYQFSSKVLNGVCSYLNRHWVRRECEEGRKGIYEVYQSALVTWRDNLFKHLNRQVTNAVLKLIERERNGETINTRLVSGVINCYVELGMNEEDPGAKGQNLTVYSNSFENVFLEDTERFYTRESSEFLRQNPVTEYMKKAEQRLLEEQKRVQVYLHQTTHDKLAKTCERVLIEKHLDIFHSEFQNLLDADKNIDLGRMYQLVARIPNGLGELRNLLEGHIANQGLGAIDKCGDSAANDPKVYVNTILEVHKKYNALVLVAFNNDSGFVAALDKACGRFINSNSVTRAANSSSKSPELLAKYCDLLLKKSSKNPEEAELEDTLNQVMVVFKYIEDKDVFQKFYSKMLAKRLVQHMSASDDAEASMISKLKQACGFEYTSKLQRMFQDIGVSKDLNEQFRRHLTNSAEPLDIDFNIQVLSSGSWPFQQSFTFSLPTELERSVHRFTTFYSSQHSGRKLNWLYNMSKGELHTNCFKNRYTLQASTFQMAVLLQYNGSTVWTIQQLHDATQIKMDFLLQVIQILLKAKLLTAATDDEAELTPLSTVELFTGYKNKKLRVNINIPMKTELKIEQETTQKNIEEDRKLLIQAAIVRIMKMRKVLKHQQLVAEVLNQLSSRFKPRVHVIKKCIDILIEKEYLERTEGQKDTYSYLA

SEQ ID NO: 17753 - DNA, 2274 bp, Candida glabrata CBS 138
  CDS (1)..(2274)
atgatcaatagaagagtaggtattaggatcccaactaaactgagtattccaaagcaggacttcagccagtcatgggaaatattagaaagtgcactaaaccacatatatgctgaggatacggaaaaactgtcatttggagatttgtataggacaatttatacacaagtactaaatcgtaatggggaaaaactgtattcggccttcgaagcctatatggccaagaaacttgatgagataagggaattgacgttcactgagcatgtattaagcgataatgattcatttctgcttgaaatgggagagctgtggaagaaacaatctgatattctgaaaacgatcagtgatcttacgatatatatggataaagtttattcaaaaccaaacagagtgccagaaatacacgagttaggtctacaaatattcaaaaagcatatattaatgaaaatcaaggatcaattactaaatagtatacttgccgatatcaactctgttcgtgattgccaagaattagatcttcagaaggctcacttatggaaattgcttgtttctatgatggaaactattacagatactaaggatacattttacctaaactattttgaaccaaaattccttaacgatactggactatattataagaaatcattcacacctacagataaatctgccacagagtgcctggaaaagattagagttcttcaatcatttgaaattgaaatgtgcgaggactatctaaacaaagataccatattaaaattaaatcatgtgttagaagaggttctttataaccagaaacttaatattcatgtcccagaactaatcaaaatctcgtttgaacaagacaattatgaattattggaccaaatatacactgtttcattatctgatgattataggctccagattgtgaatgcaattaaatcatacatgctaaaacactgtaacaactctgaaccgaaagaaattccaaagaagaggtacttatatgctatacaatggaccgcaagagttctcgcaacatataaaaagtgtcatgagttcctctccaatgtcaattttggatctgtagttgtcagaaaaagtgaagctgataatgaaacagaaacaaaagcttacaattcagctgtaatcagcaatgaagtattttctgagtacttgaatcaagatggtaaaagatcatcggaatttgtgacgatttacctagattcatgtttgaaactgtcaatagagaaacaaaaatataaacaagtgaaacaggatttagatgccgctgtaaagctgttcaagcttctgcaggaaaaggacattttttcgcaatactaccaacagcagctgtccaagagattattacaacaaaagtcatctctagacttagagagatggttaataactcagatcaaaagtgaaatgggctcattatttacatcaaaacttgaaggtatgctaagagatgtaaattcttccatcgagctatataagactttccaaaatactacaaaggaagcggttgctggatttatgttcaagcctcagattttaactcccacatcttggccatttcaagctccagatcgcgtagacccaaacttcaagctgcctgaaaccttacagggtatccaggatagtttcgaaacattttacactaacaaatataaccaaagaattttgaagtggtctcatcatttaagctcaattgaagtgggatatcagtttgcgaagacctatcatgagattcacttgccaatatatgccgcatcaatattctttttgtttgaaaatcatgacagcttaaccaaagatgagatacaggatatgacaggtttacccgacgttgagctagataaactgttgctatccatgactaccgctcccagatcaaagatacttgttaaatcaccaccttctaagataatcaactccactgacacatttgcaataaacgaagattttactgcaccaacaaccaaagtaaaattacaaatgataataggagttgtacaaccaaataacggtacaggcgaaccaaacaaagcatcaataatggacaatgttgaaagagagaggcaagaagtgacaaatgctgccatcgttaggctaatgaaaagcgaaagacatttacagttctcagaattacaggaaaagactgctgtgcagcttgcccaaagatttacactgtcactggcaacatttaaggcttgtatagaaacattgatagagaaggaatacattcagagggatgtggatgaccatgaatttctccactacattacctaa

SEQ ID NO: 17754 - protein, 757 aa, Candida glabrata CBS 138
MINRRVGIRIPTKLSIPKQDFSQSWEILESALNHIYAEDTEKLSFGDLYRTIYTQVLNRNGEKLYSAFEAYMAKKLDEIRELTFTEHVLSDNDSFLLEMGELWKKQSDILKTISDLTIYMDKVYSKPNRVPEIHELGLQIFKKHILMKIKDQLLNSILADINSVRDCQELDLQKAHLWKLLVSMMETITDTKDTFYLNYFEPKFLNDTGLYYKKSFTPTDKSATECLEKIRVLQSFEIEMCEDYLNKDTILKLNHVLEEVLYNQKLNIHVPELIKISFEQDNYELLDQIYTVSLSDDYRLQIVNAIKSYMLKHCNNSEPKEIPKKRYLYAIQWTARVLATYKKCHEFLSNVNFGSVVVRKSEADNETETKAYNSAVISNEVFSEYLNQDGKRSSEFVTIYLDSCLKLSIEKQKYKQVKQDLDAAVKLFKLLQEKDIFSQYYQQQLSKRLLQQKSSLDLERWLITQIKSEMGSLFTSKLEGMLRDVNSSIELYKTFQNTTKEAVAGFMFKPQILTPTSWPFQAPDRVDPNFKLPETLQGIQDSFETFYTNKYNQRILKWSHHLSSIEVGYQFAKTYHEIHLPIYAASIFFLFENHDSLTKDEIQDMTGLPDVELDKLLLSMTTAPRSKILVKSPPSKIINSTDTFAINEDFTAPTTKVKLQMIIGVVQPNNGTGEPNKASIMDNVERERQEVTNAAIVRLMKSERHLQFSELQEKTAVQLAQRFTLSLATFKACIETLIEKEYIQRDVDDHEFLHYIT

SEQ ID NO: 17755 - DNA, 2439 bp, Kluyveromyces lactis NRRL Y-1140
  CDS (1)..(2439)
atggcagacacattacctagatcagatgatttggaagcaacatggaactttgtgaagcctgggatcgaccagatcttggatcgtgatggtacatcggatataaagacaaacagagttcagaaagttctttccccaaggatgtacatggaggtatacacggcgatttataattactgtgtcaacaagtcacgttctacaggtcatttccaatctgatattatagggaagcaaatgaatcaatcttcgattcttgttggaggagaaatctatgagaacttaaagaattatttgaaagattacatatcgaatttaaagaaagatgataatgtaacgtttttgaatttctacgtgagacgctgggaaagatttacaatcggagctattttcttaaatcgggtcttcgactatatgaaccgttactgggtgcaaaaggaaagaagcgatggtaaaagacacattttcgatgcacatactttgtgcttgatgacgtggaaagaagttatgtttgaaacacataagacggaactcgttactgaaatattcgatcaattggatttgcagcggaggggtgaattagtgaataaatctgctattacaatagcaataaaatcctttgtgatattaggtatcgatccatcagacttaaagaagttgaatttgaatgtgtatattcaaaacttcgaacagccattcctacagaagacaaaagaatactacacgaagatgtccaacgaattcttagactctcacagtgtctctgaatacatcgaaaaggcaaatgaatgcataatcttcgaagaaaaggacatgattttatatttggattcccatacatcggcaccattgtctacagctttgaaccaagttttgattgctgatcatgccgataagttaaaaaaagagtttattttacttttggataagcaagatcaaagattgattaagctcatatacgaattgatgaaacgcgattaccgaatgttaccagatttggtggatacttttgatatgtacatcaagagagtcggaaatgaagaaatcgataaattaattgatgcacataataagagtgcagcacaagattcaaacgctaaaaggcaaccgggattatcacctagagattacttgaaatgtttaataggagtttacaaactcttttacaatatcaccatagaatgttttgaaaatcatcctgcttttgctaaggctttagactatggatgccgttgcttcattaacaataactcattcgctattcctcctggttcacctaaatttgcgacttctagagctcctgagatgttggcgaaatacagtgaccagttgctcaaaaagtcgaccaagaataatgaacaggtagatttgaccgtggatgatatcatgactgtctttaagttcttggccgacaaggatgcatttgagatgcattaccgaaaaaatttagcaaaaagattaattcatggatcatcaaaatcagaagctgatgaagaaatcattatccaaagactacagtccgagaacagtcttgaatacaccagcaagattaccaagatgctacaagatgtcaaattatctaaaaacttgcatgatgaattttccacgttcatttcacaagatgggaataatactactagcgccgcaactttcagaagcaaagttcctgaattagaacctctaattcttgcagacaatgtatggcccttcagctatcaaccaacagaattcgcattaccaccagttcttgaacatagtaagaacaaattggaaaccatgtatactgacaagcattctggtagaatattgaaatggctatggccaatgtctcgtggtgaaatcaaggcacatattggtaaaccaggcaaaccaccattccaattcactgtgactattttccaaatggcgattcttaccttgtttaatgatatatctacgttgacctttgaacaaatacaagagagaaccaatttgaaggctacacagattgcgtctaatatgtatccgtttgtgaagatgaaactattaatacaatctccagaaggggtggaaagtatgatcaagttagatacaaagtacaccttaaacaaaccctatcgattatcgaaaactagtgttaattttgcagccgctgtgaaaaatgatctaacctttactgcaaccgttaatggatctgcattagatgaaacagaggcatctgagcaaaagaaagcagaaaaggaactaaatcaacaaagattgatgttcttaagagcatgcatagtgagaattatgaaggcaaagagaaaactaccacacagttcattgatgaacgagtgtattgccgaatctcaacagagattcaacgccaaggtgtccatgatcaaaaaagctgtcgacaatctaatagaacaagagtatttgaaaaggacagacgacggtgaatgctatgaatatctagcgtaa

SEQ ID NO: 17756 - protein, 812 aa, Kluyveromyces lactis NRRL Y-1140
MADTLPRSDDLEATWNFVKPGIDQILDRDGTSDIKTNRVQKVLSPRMYMEVYTAIYNYCVNKSRSTGHFQSDIIGKQMNQSSILVGGEIYENLKNYLKDYISNLKKDDNVTFLNFYVRRWERFTIGAIFLNRVFDYMNRYWVQKERSDGKRHIFDAHTLCLMTWKEVMFETHKTELVTEIFDQLDLQRRGELVNKSAITIAIKSFVILGIDPSDLKKLNLNVYIQNFEQPFLQKTKEYYTKMSNEFLDSHSVSEYIEKANECIIFEEKDMILYLDSHTSAPLSTALNQVLIADHADKLKKEFILLLDKQDQRLIKLIYELMKRDYRMLPDLVDTFDMYIKRVGNEEIDKLIDAHNKSAAQDSNAKRQPGLSPRDYLKCLIGVYKLFYNITIECFENHPAFAKALDYGCRCFINNNSFAIPPGSPKFATSRAPEMLAKYSDQLLKKSTKNNEQVDLTVDDIMTVFKFLADKDAFEMHYRKNLAKRLIHGSSKSEADEEIIIQRLQSENSLEYTSKITKMLQDVKLSKNLHDEFSTFISQDGNNTTSAATFRSKVPELEPLILADNVWPFSYQPTEFALPPVLEHSKNKLETMYTDKHSGRILKWLWPMSRGEIKAHIGKPGKPPFQFTVTIFQMAILTLFNDISTLTFEQIQERTNLKATQIASNMYPFVKMKLLIQSPEGVESMIKLDTKYTLNKPYRLSKTSVNFAAAVKNDLTFTATVNGSALDETEASEQKKAEKELNQQRLMFLRACIVRIMKAKRKLPHSSLMNECIAESQQRFNAKVSMIKKAVDNLIEQEYLKRTDDGECYEYLA

SEQ ID NO: 17757 - DNA, 2691 bp, Debaryomyces hansenii CBS767
  CDS (1)..(2691)
atgttacctcctggaagcaggcggtctaaaatcagaccaccgaggaagtctttagttagcacttctattgggaattctagtggagattcagttatcgactatgacttatcgtggtcggtactttcaaatgccatcacacagatccagaataaaaatgtttctaaattgtcgtacgagcaattgtataggaaggcgtacattttggtgttgaggaaatatggagcgaagctctatgatgacgtttcgctgttgattagacagcatttgctacagaagagacagaatttgcttgcgatattgaatctgtcgtcgtcgttgaataactcaatcaatgaggatttcatgaaggccgtattggtggaatgggacgagcatttgcagtcgatgaaattcatcagcgatgtgttgatgtatctcaatcgggtgtatgttaaggaacacaagaagctacttatctacgacttggggatccaattatttaaggataatattgtcaagtacgaggataacgagttggggtcgaaattgattgagatagttgtggaggagattaccaagaacagaaagggcgaagtgataacaacgaagatgtacataaccaagattatcaatatgctcgagttgttacttgaaaccagcaattcgggcaatgacttgcagtatggagaaaattactaccagagatacttcgagcctacctttcttgctggttcagagacttttttttataatttgtcccaggagttcattaataatgtgcttggtacgaagtatttgcatgatgcccaccgttttataaaagaagaagaaaacagaatcaacttttatttgccttcttcgacgtatccaagaataatagatttaatgaataacatcttgattaaagataaaatcgatagaatattgtgcctcccattcgaacagcaaggtttatcgtattggttacagcctgtcctttcgaatattcttgatcaaaatttgtcgtctaacagagaaaaacatcacttcgcagaattgaaaatactatatgagttgttgggtagaattgaccccgactacgagcttttcagaacgcgtttaaaggacttggttgtatcccagggtagtacattgccttcacttgttaaggagtcaatatcgttaaaggatgacagtacatcaaagaagtcgaacgctaattccactgcttttgcgtctacgtggattaattctattttagaatatcaaaaccaattttcaatgattatcaaagaatcgttttccggggatgtagcattggagcaatgtatcaccatgggtatgagggaattcataaatggagctcaaaatgcacccggtggtagtaaaaaatcaaacacatcatcaggaaacagtgctcctgaattgttatcgatttatatggattttaggatcaagcaactaacgaagaatcctggatcaagctccaaaaatattccaaccgaaaatgataatgacatgaatggatcgtcgatagatcaaactgatgatttaattaacaaatctgttgcatttttgagattcataaaagataaagatgcgtttgaagcacattatgccaaccattttgccaaaagatttttaaactttaaaaattcacaagcgggcaattcagcgagcaatggaaaactaggagttgacctcgaagaattaataatatcgaaattaggagaagaaatgggtacaacgtcattagataaggtcattaaaatggataaagacataaagctgtctcgtgacttgaccaaagattggagaagctatgtgaaccaaaatcataagaaatcactaatagaattagatttgaaagtttgtaatgtttcagattggcctaaatcaatgacaaaggattataagaagttttctcgggacgacactaataatgaaattggatttatttggtcgcgtcaattacgatccaccattaaagaatttgaagaattttggttcacgaataagagaaacgacaataaatcgctcttctggtgtcccaaatttggctctatggacttgagaataacatatcctacaaaaacatacgatataagcatgtcaacatacgcgggtataatcatgcttttgtttgccccacaatccactgatgcagatggcaatgaagtcctggcatttgatgaaatgagagaactagcgtatgacgagatcagagagctcactggcattccggaggctgatttgaagagacaattacaatcaatagcggtcgcaccaagactgaggctcttggtcaaaataccaatgaccaaggaagtaaacaatagcgatgtttttaaattaaatgagaagttcaagtcaccttccaccaaggtcaaggttttgactgtttcagcctcctctagtgcttcgagtggtacgaaagtttcttctactaatgataccacacttgcaaaaacagttcaagaagaagaatttgaagaattgcaatcaagtattctagaaggtcgtaagatagaagttaatgctgcaattgtgcgtataatgaaatcccgtcgtacaatcaaccataacgatttgataagtgagttggtcaaacagttgcataatagattccaaacactgactattcttataaaacaaagaattgaagatttgattgagaaagagtatttaaaaagagatgataacgataaaagtatataccattatgtcgcttag

SEQ ID NO: 17758 - protein, 896 aa, Debaryomyces hansenii CBS767
MLPPGSRRSKIRPPRKSLVSTSIGNSSGDSVIDYDLSWSVLSNAITQIQNKNVSKLSYEQLYRKAYILVLRKYGAKLYDDVSLLIRQHLLQKRQNLLAILNLSSSLNNSINEDFMKAVLVEWDEHLQSMKFISDVLMYLNRVYVKEHKKLLIYDLGIQLFKDNIVKYEDNELGSKLIEIVVEEITKNRKGEVITTKMYITKIINMLELLLETSNSGNDLQYGENYYQRYFEPTFLAGSETFFYNLSQEFINNVLGTKYLHDAHRFIKEEENRINFYLPSSTYPRIIDLMNNILIKDKIDRILCLPFEQQGLSYWLQPVLSNILDQNLSSNREKHHFAELKILYELLGRIDPDYELFRTRLKDLVVSQGSTLPSLVKESISLKDDSTSKKSNANSTAFASTWINSILEYQNQFSMIIKESFSGDVALEQCITMGMREFINGAQNAPGGSKKSNTSSGNSAPELLSIYMDFRIKQLTKNPGSSSKNIPTENDNDMNGSSIDQTDDLINKSVAFLRFIKDKDAFEAHYANHFAKRFLNFKNSQAGNSASNGKLGVDLEELIISKLGEEMGTTSLDKVIKMDKDIKLSRDLTKDWRSYVNQNHKKSLIELDLKVCNVSDWPKSMTKDYKKFSRDDTNNEIGFIWSRQLRSTIKEFEEFWFTNKRNDNKSLFWCPKFGSMDLRITYPTKTYDISMSTYAGIIMLLFAPQSTDADGNEVLAFDEMRELAYDEIRELTGIPEADLKRQLQSIAVAPRLRLLVKIPMTKEVNNSDVFKLNEKFKSPSTKVKVLTVSASSSASSGTKVSSTNDTTLAKTVQEEEFEELQSSILEGRKIEVNAAIVRIMKSRRTINHNDLISELVKQLHNRFQTLTILIKQRIEDLIEKEYLKRDDNDKSIYHYVA

SEQ ID NO: 17759 - DNA, 2337 bp, Yarrowia lipolytica CLIB122
  CDS (1)..(2337)
atgaaaatgacgactcagaggggcaagatcaaggccccgcgggccaaaacgtcgtcgtcggtgtcgtttgacaagtcctgggagattctggcctccgccatgaccaaaatccaggaccatgaatcttcgccactgtcgtttgagctgctttatcgaacgtcctatcagttggtgatcagcaagatgagcgcgcagttatacgacgcggtcaaatgccacatttccgcccacttggacaaggtgcaggccggcttcgatccgtatgtcgtggtggctcgagacgatctgtctctggctcccaagtttctggagggcctcaacaagcagtggagcgaccaccagacgtgcaccaagatgattggtgatgtgatgatgtatctggaccgggtctactgtctggacaacacctcttcgccgcctaagttggctgatttggggctgcatttgttccgagaccatgtggtgggcactgggccgtttgctgagtacctgtacaaggtgctgatcaacgagattcagcgagaacgagagggcgagatggtggacaggattgtcatcaaaaatgttctgtcgatgctagacctgttgccccagagcaagagcaacaaggagagtgtgctggtgcactgcttctcggaccagctggtggctgccactacgaatttctactcgcaggcagcccgggatctgctggatggcaacaaggaccctgttgtgtacgttacaaaggtgtctggctggctggaggacgaggagaaacggtccaagtactacgctctggagagtcaggcgtattctcctcttgtgagtgatctgaccgtcaagctggtctctacaaagctacctgaggtcatggcgcttccaggctctgagattcgaaaatggtaccaggcgaaaaagttcgacgagctcaaaacgctctaccggctcatttccaagggtttcccccagcggtcgcttctgcaccatctgctgaaggagcagatcgtttccgagggccagaatctcaactccgcttctaactctgctgttgaggcagctcgaaaggagaagaagcccagtgcccagcagaccgctctggcacacaagtgggtgacggacgtacttaccatgcgagacgagtttgccgagatcaccgccaagtgctttgacaacgatgtggaggtggtcaagagcatcgacgaggcattcgtcgagtttgtcaacaagcatgcccgagtggcagagtacctgtcgctctacattgataatctgatgaagaaggcgctaaagggcaaatctgacgaggaggtggccgccatcctggactccacggtcgcctgtttcaacttcattacggacaaggaccgattcgaaaactactacaaggctcatttggggaaacgtctgctcaactccaagtcgctttctgacgatgcggagcgacaactcatttcgcgattcaagatggctgctggaggcgcctttacttccaagtttgagggtatgttcaaggacattgccacctctgctgacgagatggagttcttccggaagagtcgggcgtccattaccgccgattctgagccctcctcagcaaagaaggtcgagctcactgtggctcttctctctggtacttactggcccacttccattgctcagggagcaaattacactctgattcactgtgctgatgccgagaacgccaaggagcagtttgagcagtactacagcaaggctcacagtggccgaaagctggagtgggtgcccaatcttggaaacgccgacattcgaatcaagtttaagaagaagttccacgacgtcaacgtacccaatccagtcatgcccattttgatgctgttccaggacgtgggcgaccaaagcatttcgttccatcgaatccaaatggagaccggcattcctattcctgatctcaagcgacatcttcagtccgtgtctgtggcacccaagacccgccttcttaaaaaggtgcccatgtccaaggatgtcaatgagacggacgagttcttcttcaacgaaaactttgaggcgcccatgaccaagattcgagtgctggccatcaatgctactcgcgccgagaccgatgtcgaacgagacgccactatggtgcagattgacaagtcgcgccaaaacgagattgacgctgccattgtgcgagtcatgaagtcgcgaaagaccctcaaccacaacaacctggtcggagaggtgaccaagcagttggcctcgcggttcaagcctcctattcccaccatcaagcattgtattgagtctctgttggaacgagagtatcttcgacgagacgacaatgacaccactctgttccactatgaggcatag

SEQ ID NO: 17760 - protein, 778 aa, Yarrowia lipolytica CLIB122
MKMTTQRGKIKAPRAKTSSSVSFDKSWEILASAMTKIQDHESSPLSFELLYRTSYQLVISKMSAQLYDAVKCHISAHLDKVQAGFDPYVVVARDDLSLAPKFLEGLNKQWSDHQTCTKMIGDVMMYLDRVYCLDNTSSPPKLADLGLHLFRDHVVGTGPFAEYLYKVLINEIQREREGEMVDRIVIKNVLSMLDLLPQSKSNKESVLVHCFSDQLVAATTNFYSQAARDLLDGNKDPVVYVTKVSGWLEDEEKRSKYYALESQAYSPLVSDLTVKLVSTKLPEVMALPGSEIRKWYQAKKFDELKTLYRLISKGFPQRSLLHHLLKEQIVSEGQNLNSASNSAVEAARKEKKPSAQQTALAHKWVTDVLTMRDEFAEITAKCFDNDVEVVKSIDEAFVEFVNKHARVAEYLSLYIDNLMKKALKGKSDEEVAAILDSTVACFNFITDKDRFENYYKAHLGKRLLNSKSLSDDAERQLISRFKMAAGGAFTSKFEGMFKDIATSADEMEFFRKSRASITADSEPSSAKKVELTVALLSGTYWPTSIAQGANYTLIHCADAENAKEQFEQYYSKAHSGRKLEWVPNLGNADIRIKFKKKFHDVNVPNPVMPILMLFQDVGDQSISFHRIQMETGIPIPDLKRHLQSVSVAPKTRLLKKVPMSKDVNETDEFFFNENFEAPMTKIRVLAINATRAETDVERDATMVQIDKSRQNEIDAAIVRVMKSRKTLNHNNLVGEVTKQLASRFKPPIPTIKHCIESLLEREYLRRDDNDTTLFHYEA

SEQ ID NO: 17761 - DNA, 2304 bp, Apis mellifera
  CDS (1)..(2304)
atgaagagcagtgctatgcttaagaaagaaagcaaaatgcgcatacgtgcttttccgacaactatggatgaaaagtatgtagaaagtatttgggcactattaaaaaatgctattcaagaaattcagaagaaaaataattcagggcttagttttgaagagctttatcgaaatgcttatactatggttcttcacaagtatggtgaacgtttatatacaggtttaaaagaagttgtaacacatcatttagaaaataaagtcagagaagatgtattaagatctcttcacaacaattttcttcaaacattaaatcaagcttggaatgatcatcagacatctatggtaatgataagagatattttaatgtatatggatagagtttatgtgcaacaacatgatgtggacaatgtgtataatttaggacttatcatatttagagatcaggtggtcagatatggatgtgttagagatcatttaagagaaactttactaggtatggtagcaagagaaagaagaggagaagttgtagatcgcattgcaataaaaaatgcctgccaaatgttaatgttacttggcattaacagtcgtcaagtttatgaggaagattttgaaaggccttttttacaacaaagtgctgaattttatagaatggaatctcaaaaatttttggctgaaaatagtgcatcagtatatataaaaaaagttgaagctagaatttgtgaagaatcagaaagagcaaaacattatttagatgaatctactgaaccacgaatagtagaagttgtagaagaagaactaattaaaattcatatgaaaactattgtcgagatggaaaatagtggtgtagtacatatgctcaaaaaccaaaaaactgaagatcttggctgcatgtataaattattttcgagagtttcggatggtttacgtactgtatgcgattgtgtttctcaatttcttaaagaacaaggccgtgccatggttcaagaggaacatgaatcaacgacaaatgcagttctttttattcagaatttgctagatttaaaagatcgtttcgatcattttcttcattattcgtttaataatgataagaattataaacaaatgattgcatctgactttgaatactttctcaatttaaatacaaaaagtccagaatatctttcgctcttcattgatgataagctgaaaaaaggtgttaaagggatgacagaacaggaaatcgaaggtatcttggataaaactatggttttatttagatttcttcaagaaaaagatgtatttgaacgatattataaacagcacttagctaaacgtcttcttttgaataaatctgtatctgatgatagcgaaaaaaacatgatatccaaacttaagactgaatgtggatgtcaattcacatcaaaattggagggaatgttcaaagatataacagttagtaatactattatggatgaatttaaagatcatgtccttacatccaatacaaacttacatggagtggatataagtgtaagagttttgacaaccggtttttggccgacacaatctgcaactccaaaatgtagcatgccagctgctccacgagatgcttttgatgctttccgacgtttttatcttgctaaacatagtggtcgacaattaacgttacaaccacaattaggttctgcggatttaaatgctgtatttcatggaccacgaagagaagaaagtagttgcggtggcttagatacaccatcgtcttcaagttccagttgtggaaataccagaaaacacattattcaagtatcaacttatcaaatgtgtgtattaatgctttttaacaaaagagaaaaattgacgtacgaggaaattcaaggtgaaaccgatattccagagagagacttggttagagcattacaatctcttgcaatgggaaaagctacacaaagagtgttattaaagcatcctcgtacaaaggaaatagaaccttcacattatttttgtgttaacgacagttttaccagtaaattacatagagtaaagattcaaacagtagctgcaaaaggcgaatcagaacctgaaagaagagaaactcgcaacaaagtagatgaagacagaaaacatgaaatagaagcagctattgttcgtattatgaaagatagaaagcgtatgccacacaatatacttgtaactgaagtaacagaacaattaagaggtcgatttttgccgtcgcctgtaataattaaaaaacgtattgaaggtttaattgaacgtgaatatttggctcgtacgccggaagataggaaagtatatacgtatgttgcttaa

SEQ ID NO: 17762 - protein, 767 aa, Apis mellifera
MKSSAMLKKESKMRIRAFPTTMDEKYVESIWALLKNAIQEIQKKNNSGLSFEELYRNAYTMVLHKYGERLYTGLKEVVTHHLENKVREDVLRSLHNNFLQTLNQAWNDHQTSMVMIRDILMYMDRVYVQQHDVDNVYNLGLIIFRDQVVRYGCVRDHLRETLLGMVARERRGEVVDRIAIKNACQMLMLLGINSRQVYEEDFERPFLQQSAEFYRMESQKFLAENSASVYIKKVEARICEESERAKHYLDESTEPRIVEVVEEELIKIHMKTIVEMENSGVVHMLKNQKTEDLGCMYKLFSRVSDGLRTVCDCVSQFLKEQGRAMVQEEHESTTNAVLFIQNLLDLKDRFDHFLHYSFNNDKNYKQMIASDFEYFLNLNTKSPEYLSLFIDDKLKKGVKGMTEQEIEGILDKTMVLFRFLQEKDVFERYYKQHLAKRLLLNKSVSDDSEKNMISKLKTECGCQFTSKLEGMFKDITVSNTIMDEFKDHVLTSNTNLHGVDISVRVLTTGFWPTQSATPKCSMPAAPRDAFDAFRRFYLAKHSGRQLTLQPQLGSADLNAVFHGPRREESSCGGLDTPSSSSSSCGNTRKHIIQVSTYQMCVLMLFNKREKLTYEEIQGETDIPERDLVRALQSLAMGKATQRVLLKHPRTKEIEPSHYFCVNDSFTSKLHRVKIQTVAAKGESEPERRETRNKVDEDRKHEIEAAIVRIMKDRKRMPHNILVTEVTEQLRGRFLPSPVIIKKRIEGLIEREYLARTPEDRKVYTYVA

SEQ ID NO: 17763 - DNA, 2256 bp, Aspergillus nidulans FGSC A4
  CDS (1)..(2256)
atggcgcctctaatgccccaggccccccacaaggatgacttggaagaaacatgggtattcctagagaacggcatcaacaatgtcatggtcaaactggaggacggggtggacatgaagaactacatggccctatacacagcggtccacaacttctgcacctctcacaaagctgtcagcggtcaagccatacaagcacagcgtggtgcacacttgctcggagaggagctttatcggaaacttggagaatacttgtcgcgccatcttgagtgggtccacggagaatcgatgggtcatacggatgaagctctactttcattttatattcgggaatggcaaagatacctgaaccgccactgggtcaagcgagaaatcgatgaagggaaaaagaacgtatatgatgtgtatactcaacacttggtaaagtggaaggaggatttcttcctcaaggtgcatgaaaaggtcatgggcgcggttcttaagcttgtcgaaaagcaacggaatggggagaccattgagcaatcgcggattaagagcattgttgattcatttgtctctctcggacttgatgaaactgaccccacgaagtccacccttgaaatttaccgctattacttccaacggcctttcctcgaagctaccaggatctattatgaggatgagtcgcgtcagtttgtggcggacaacagcgttgtggagtacatgaagaaagcagaaatccgtctcgaagaggagaaagcacgtgttggactctatttgaacaacgatatttcaaaagatctaaccagcacctgtttggatgtacttgtcactgcgcactcggagctcctccgtgacgaattccaaccgctgctcgacaacgaacgtcaagatgatctcgcccggatgtaccggcttttgtcacgaatcaaagatgggctggaccctcttcgcacaaaattcgaagcacacgtaaggagggctggtttgtctgcagttgagaaggttgctgctgaaggtgactccttcgagcccaagatgtacgtcgatgcattgctgtcggtgcacaccagataccacagtctcgtcaaggaagctttcaatggcgagtccgaatttgtccgctcgcttgacaacgcttgtcgcgagtttgtaaatcgcaacaagatctgcaagtccgggtctacgaagacaccagaattactagccaagtacacggattctctgctgaagaggggatcaaaagctgcggaggagtcagagctggaggagatgttggtacagatcatgaccgtcttcaagtacattgaagacaaggatgtcttccaaaaattctactccaagatgcttgctaagcgactagtccatgtgagctcagtatctgatgacgccgagactagcatgatcagcaaactcaaggaggcgtgtggttttgagtacacgaacaagttgcagcggatgttccaggatatccagatttcaaaggatctgaactcaagctacaaggactggcttgagaaatctttcttggatgatgatgaccgaaagaagcttgtggactcgcacttccaaattctcgggaccggtttctggccactcacggccccttcaacttctttccttgctccgcctgaaattgtcaaaacttctgagcgttttcagaagttctattgcgataagcataacggtcgaaagctaacctggctctggcagctgtgtaagggcgagctcaaggccaattacatcaagaacaccaaggtcccatacactttccttgtgtctacgtaccaaatgggcatcctccttctcttcaacgagagcgacacgttgacatactctgatatacaaaaggccactactctcacacctgaaatccttgatccaaacctgagcattttcttaaaggccaaggtccttaacattagtcctgaaggatctaaacccgggccagactcgaccttctccctgaactacaacttcaaaaataagaagatcaaggtcaatctcaacatccaaattaggtccgagcagaaggtcgagacggatgacacacataagacaatcgaggaagaccgcaagctcttgctccagtccgcaatcgtcagaatcatgaaatccaggaagaagatgaagcacgtacagcttgtgcaggaagtaattcaccaggtcaaatcacgcttccccccccaagtacccgacatcaagaagaacatcgaagcattgatggagaaggattacatcgagcgtctggacggcgatgaaatcgcttacattgcatga

SEQ ID NO: 17764 - protein, 751 aa, Aspergillus nidulans FGSC A4
MAPLMPQAPHKDDLEETWVFLENGINNVMVKLEDGVDMKNYMALYTAVHNFCTSHKAVSGQAIQAQRGAHLLGEELYRKLGEYLSRHLEWVHGESMGHTDEALLSFYIREWQRYLNRHWVKREIDEGKKNVYDVYTQHLVKWKEDFFLKVHEKVMGAVLKLVEKQRNGETIEQSRIKSIVDSFVSLGLDETDPTKSTLEIYRYYFQRPFLEATRIYYEDESRQFVADNSVVEYMKKAEIRLEEEKARVGLYLNNDISKDLTSTCLDVLVTAHSELLRDEFQPLLDNERQDDLARMYRLLSRIKDGLDPLRTKFEAHVRRAGLSAVEKVAAEGDSFEPKMYVDALLSVHTRYHSLVKEAFNGESEFVRSLDNACREFVNRNKICKSGSTKTPELLAKYTDSLLKRGSKAAEESELEEMLVQIMTVFKYIEDKDVFQKFYSKMLAKRLVHVSSVSDDAETSMISKLKEACGFEYTNKLQRMFQDIQISKDLNSSYKDWLEKSFLDDDDRKKLVDSHFQILGTGFWPLTAPSTSFLAPPEIVKTSERFQKFYCDKHNGRKLTWLWQLCKGELKANYIKNTKVPYTFLVSTYQMGILLLFNESDTLTYSDIQKATTLTPEILDPNLSIFLKAKVLNISPEGSKPGPDSTFSLNYNFKNKKIKVNLNIQIRSEQKVETDDTHKTIEEDRKLLLQSAIVRIMKSRKKMKHVQLVQEVIHQVKSRFPPQVPDIKKNIEALMEKDYIERLDGDEIAYIA

SEQ ID NO: 17765 - DNA, 2487 bp, Aspergillus nidulans FGSC A4
  CDS (1)..(2487)
atgttgagcagcttaaccgcagcaatgacagcggagtttgcgccggacttaagttcttccagctgctttcctccgcggccttctaacctacttgactcgccttcagactcgacaacatctgcctctggagcgaggaggaattcccagttgtcgttcgagcaactatatcggaacgcctatagcatcgtaaaaattcagcgtgccgaagacttgtacgagcggacaaaggaacttgagaaagaatggctatgtggtgaagttcaaaagcgagtcgttgccgcaatcacgcctaggctgttgctcgccaaagaggccgtggatatgcaagaccaatttacggaggctacggagaggcgggagaccggggagagattcctttcggccctaagtgaggtgtgggaggaccatcagatctgtatgaagatgattacggacgttttaatgtacatggatcgagtcgttgcgcttaggaaagtttccatatacgccgccgccatggcattatttcgcgatcacgttttgcggtcacctgtgtcgtcgagtaataatgccgtcgtcgctgatgtgctcaagtctacggtgttattcatgatccagttggaaagatcagggcacatgatagaccgagctttaatccacagctgcattaagatgctggagggcctgtacgaaacggaggcggaagaggagtcttctaagctttatttgacgtcttttgaaccggactacttagaggcaagcgcagcgttctatcgcgccgagggcaagcgactgctagaaacggtcgacgctgctacgttctgcgctgttgtctctgctcgcatagcggaagaaaaggaacgctgtcagtatacgatctctctccttagcgaatcaaaaatcaaggagatagtggataacgagttgatccgcaataatttggccgaagttgtcaattttgaggggaccggggttcgagtcatgctggaccacgacaggatagacaatctaagcaagatttatgctctcagcgcacgggtggatcctaaaaagacccatctgactgccgctgtacagaagcgtatagtcgaaatgggtaacgaaatcaacaatgcttcatttgctttagcacaggcacctgcacagcctaagtcaactgggacagacgcaggtcagaaaaaagagaaggaaaaagagaagcccgtgaatcaagtcacatcatctgccatcaaatgggtggatgacattcttgccctcaagaagaagtttgatggtatctggaaagatgcctttgggtctgaccaggtgctacaaagcgcgattacggcaagtttttcgagcttcctcaattccaccccccgcagctcagagtttctttcgctcttttttgacgagaacctcaagaagggcgttaagggtaaaacggacaacgaggttgatgctcttctagagaacggaatcaccctgctgcgttatatcaaagacaaagaccgctttgaggcctactacaaaaaacacctttctcgacgactactcatgaagcgttcgatgagcatggacgcagagagacagatgatctccaaaatgaagatggaagtcggcaatcaattcacccagcgattagaggccatgtttagagacatgaccatatcggaggatctgactgcaagctataaacagtttgtacgggaacagggtgaccccgataaaaagcgattcgagctggacatcaatgtccttaccagcactatgtggccaatggaaataatgtcgagctcaagggatggtcaggttgagcttccgtgcatcatccctaaggaggttgagactgtcaagcagagctttgagaagttctatctggacaaacatagcggccgcaaactttcgtggcagccaagtatgggtacagctgacattaaagcaacttttcatcggtcaaatggcaaagtgcagcgtcacgaactcaacgtgtccacttacgctatgtttattcttttacttttcaatgacattcccataggcgagtccctcacattcgaggagatccaggcgcgcacacggattccagataacgatctcattcgaaacttacagtcacttgccgttgcacccaagactcgagtcctcaagaaggtcccgatgagtagggacgtcaaaccgacggataagttctatttcaacaatgatttccaaagtccattcatgaaagtacgaatcggtgtggtcagcggcggagccaacaaggtcgagagccaggaccagagaaaggagacagaggagaagatgaacaacgagcgcggcggcagtattgaggccgctattgtgcgcatcatgaaacaacgcaaaacattaatccattcaaaccttattagcgaagtgcttagccagttatctgcccgtttcgtacccgacgttaacatggtcaagcggcgaatcgaaagtctaattgatcgcgagtacctcgagcgtgtttccgaggaccccccgacatacggttatgttgcgtga

SEQ ID NO: 17766 - protein, 828 aa, Aspergillus nidulans FGSC A4
MLSSLTAAMTAEFAPDLSSSSCFPPRPSNLLDSPSDSTTSASGARRNSQLSFEQLYRNAYSIVKIQRAEDLYERTKELEKEWLCGEVQKRVVAAITPRLLLAKEAVDMQDQFTEATERRETGERFLSALSEVWEDHQICMKMITDVLMYMDRVVALRKVSIYAAAMALFRDHVLRSPVSSSNNAVVADVLKSTVLFMIQLERSGHMIDRALIHSCIKMLEGLYETEAEEESSKLYLTSFEPDYLEASAAFYRAEGKRLLETVDAATFCAVVSARIAEEKERCQYTISLLSESKIKEIVDNELIRNNLAEVVNFEGTGVRVMLDHDRIDNLSKIYALSARVDPKKTHLTAAVQKRIVEMGNEINNASFALAQAPAQPKSTGTDAGQKKEKEKEKPVNQVTSSAIKWVDDILALKKKFDGIWKDAFGSDQVLQSAITASFSSFLNSTPRSSEFLSLFFDENLKKGVKGKTDNEVDALLENGITLLRYIKDKDRFEAYYKKHLSRRLLMKRSMSMDAERQMISKMKMEVGNQFTQRLEAMFRDMTISEDLTASYKQFVREQGDPDKKRFELDINVLTSTMWPMEIMSSSRDGQVELPCIIPKEVETVKQSFEKFYLDKHSGRKLSWQPSMGTADIKATFHRSNGKVQRHELNVSTYAMFILLLFNDIPIGESLTFEEIQARTRIPDNDLIRNLQSLAVAPKTRVLKKVPMSRDVKPTDKFYFNNDFQSPFMKVRIGVVSGGANKVESQDQRKETEEKMNNERGGSIEAAIVRIMKQRKTLIHSNLISEVLSQLSARFVPDVNMVKRRIESLIDREYLERVSEDPPTYGYVA

SEQ ID NO: 17767 - DNA, 2580 bp, Candida albicans SC5314
  CDS (1)..(2580): transl_table=12
atgatgccaccagggggacgaaagtccaaaattagaccaccaagaaaatcactaatcagctcgtcatcgtcatcggaaaactcaaccaccgatccagtaatagatttcgataaaaattggtcagttttatctagtgccatctcccaaatccaaaacaaaaatgtatcaaacttatcatatgagcaattgtatagaaaagcctatgtgttggttttacgaaagttcggaggaaaattgtatgataatgtggcaaacgttattaaaacccatttgctaactagaagagaaaaattattgagcgtgtctgccaatcatgatttgttcatgcaatcgatacttcaagaatggagcgaacatttacaagcaatgaagtttataagtgatgttctcatgtatttaaataaagtttatgttgctgaacacaaaaaattgctaatctatgacttgggcattcaactattcaaagattatgtgataaaatataacaatgatgaagttgggtctaaaattgtcaatatggtgattgatgaaattgccaagagtagaactggggttgttatcacgtcaagcatgtatatcacgaaaattatcaatatgatggaattgttagtggagcctagtggatcctcagatatccttttcggggattcatattaccaaattaaatttgaacccaagtttttgaaaagttctgaagagtcactttacaacttgtcccaagaatttgtgtctcacaatctaggaacaaaatatttgcaattgacaactcaatttattaaagatgaagataatagagttcgattttatctaccgccttcaacatatcccaaattggtggagttaatgaataacataatgattaaagataaaatagataaaatgattttgtcactgaatcaaggtttggaatattggttgaaacctgttgtgagcaatatttttgaagacactaacattgaaacctatcattacgcagatttgaaaatgttgtacaatttgattggcagattcgatgacgaatatcaactattaagattgcggttgaaagaagccattgttgcccaaggaaattcgttaccagattatgtgcgtagttccattgaaaattcaggtaagaaacagtctaacaattcaccagcatttgctacaaaatggattgagactattttaaagtatcgtgaccaattaatgcaagtttggaaaaactcatttgatgaaaacttgatgatcgaacaaacttttacttttgctatgagagatttcataaatggaagcaataaaaggggccccgcatcagttaatgctcctgaattattatcagtgtacatggattattttataaaacaattaacgaaaggcagttcatcaaataaagatatatcattaaagtctggtgaccagacagaggacttgatttccaattcaatacagttcttgagatttatcaaggacaaagatgcatttgaagcaaactatgctaatcattttgccaagaggtttttaaattccaaaactggtaattctccttcctccaacaaagacattgaagaaataattctagccaagttgagtgaagaaatggggacttcatcattggataaagttatcaaaatgaacagagacgtaaggctgtcaaaggataccactaatgactggaaacgttatttgaataaacaaagcaaatcaacagatttggttgagatggaattgaaaatatgtaatgtgactgattggccaaaatccatgactaaggattacaaatggtttagtaggactgaaaatgaagagaccccattcaaatggccacgtcaattacgtaacaccattaaacaatttgacgagttttggagtaacggtaagaaaaacgataacaagtcgttgtattggtctcccaaatttggatctatggatttgcggataacgtatccttctagaacgtacgaaatcaacttgtctacatttgcagctattattatgctccttttcgctcctcaactgacaaatgcagatggttctacagttctggcatttgatgaaatgaaggagttaacatatgaagagattctagagttgactggtattcctgaaccagagttgaaaagacatctacaatcaattgcagttgctccaaagctgagactacttgttaaagttccaatgagtaaagatgtgaacaagaatgatgttttcaaattgaatgcaaagtttaaatcaccatcagtgaaagtcaaagtgttgacagtttctgcttcttcttcttcttcagcatcttcgtcgtcgtcatcttctaaaaacaccaacaaatctgttgcaaagaccgaacaagaagaggaactagaagaagttaacgccaacatcatggagggacgcaaaattgaagttaatgctgccattgtgcgtattttgaaatcaagacaatcaataaaacataacgatttaattgaagaattacttaaacagttgagtaatagattccagccactgattatattgataaaacaacgaattgaagatttgatagataaagaatatttgaaaagagatacagatgataggaatttgtatcattacatagcataa

SEQ ID NO: 17768 - protein, 859 aa, Candida albicans SC5314
MMPPGGRKSKIRPPRKSLISSSSSSENSTTDPVIDFDKNWSVLSSAISQIQNKNVSNLSYEQLYRKAYVLVLRKFGGKLYDNVANVIKTHLLTRREKLLSVSANHDLFMQSILQEWSEHLQAMKFISDVLMYLNKVYVAEHKKLLIYDLGIQLFKDYVIKYNNDEVGSKIVNMVIDEIAKSRTGVVITSSMYITKIINMMELLVEPSGSSDILFGDSYYQIKFEPKFLKSSEESLYNLSQEFVSHNLGTKYLQLTTQFIKDEDNRVRFYLPPSTYPKLVELMNNIMIKDKIDKMILSSNQGLEYWLKPVVSNIFEDTNIETYHYADLKMLYNLIGRFDDEYQLLRLRLKEAIVAQGNSLPDYVRSSIENSGKKQSNNSPAFATKWIETILKYRDQLMQVWKNSFDENLMIEQTFTFAMRDFINGSNKRGPASVNAPELLSVYMDYFIKQLTKGSSSNKDISLKSGDQTEDLISNSIQFLRFIKDKDAFEANYANHFAKRFLNSKTGNSPSSNKDIEEIILAKLSEEMGTSSLDKVIKMNRDVRSSKDTTNDWKRYLNKQSKSTDLVEMELKICNVTDWPKSMTKDYKWFSRTENEETPFKWPRQLRNTIKQFDEFWSNGKKNDNKSLYWSPKFGSMDLRITYPSRTYEINLSTFAAIIMLLFAPQSTNADGSTVSAFDEMKELTYEEILELTGIPEPELKRHLQSIAVAPKSRLLVKVPMSKDVNKNDVFKLNAKFKSPSVKVKVLTVSASSSSSASSSSSSSKNTNKSVAKTEQEEELEEVNANIMEGRKIEVNAAIVRILKSRQSIKHNDLIEELLKQLSNRFQPSIILIKQRIEDLIDKEYLKRDTDDRNLYHYIA

SEQ ID NO: 17769 - DNA, 2469 bp, Ustilago maydis 521
  CDS (1)..(2469)
atgtcgctggcagaagctctcctctcgagggcccagacaaagaggtctgctctcactgacaaagccttgtcaaacactgccgatgccgcgaaaggcggactggccaccttcttggccaaggccggagattcatccaagaatgctgtcgctttcagtgtcgcaagtagcggcgctcgtgctccagcttctattcaaatcacatcgtttcacccagaaaaaacactgccgccggccaactatgcttcgctggctaccgctcagcttatccgatccgtccgcttgattttggtcagcacttggcggcgtcctgacacgagtgctgctcgccaacctctccagcagctgtatagcaccgccaacgtcctggtgatgtactgctctgctgaagagttggaccatctgtacgactctgtcaagattgaaatcgaacgcgcggttggcaactgggtggctacgttgcacagctccgcctccatcacagacttgctacaggacaaggttggctggctggtagagctcagaagcatctggtttgagtggagtgataatctggctttggttcgaaacattttgtactccctggaccgctatgttcttaaccgcaggactgctgatggctattaccgatccaagagctttgtctcgcatgatgaccgcatctccattcgcgaccttggcctcaaggaatttggccatcacatcttgaaggatgccacgctcttccgcacatttctcaagtgcattgtaggcgctatcgatggcaagcgaaagttgctcttgacttatggaaaattgcaccatgatctcctcactatgctcggccaactccaggccgaagatgctctcgacgatgcagtttcaaaggcgacagatgtcttttaccaggcagagtccaccgcttctatcgcaagcttgtcacccacagagtatgtcgaatatgcctggggtcgcatgagcgaagagcgggatcgaagccagtgggctctatccaccggaacaggccaacacaagatgatagctgctgcgcgcaaacaactcgtaacacagcacgccgatacaatccttgctgcactgcccgatcttgtcacttctggaaattgcgatggcctcgacaagatgtatcaactggccaactgcagcgaccgcctcgctgacctgcgcaaggcctttgcagaattcatcaagacacacggcgctgccattgttgaagatcgggagagggatgacaagatgatcgaggggctgctggccttcaagtcgtccatcgaccgcgtcgtccaccacagcttcggcggtgatgacgactttgttcttgcccaaaagcaaggcttcgaattctgtatcaacaagcgcgagaccaaagttgccgaacttatcgccaagtacctcgacgccaaactacgcagcgggaacaaaaccatgtcggatctagagctcgaaaacagcctcgatgaagcgctcatcctcttccgctacacacaagccaaggacatgtttgaagagttttacaagcgccactttgccaaacggctgctgttgaaccgatctgcctcttcggatgcggagcgaagcatgttgctcaaactcaaggcagagtgtgggcctgagttcaccgccaagctcgagacgatgatcaaggacgtcgaggtgtccaaggatctgatggatgaatacgtccgctttgctgctaagcaacgcaaagacgagccatcacccaaagacgactttgatctgagcgttagtgtgctaacgcaagcgcattggcccacgtatcccaacattgacgtggctctgccggtcgagcttgccgccgcagccgaacggtttgcggccttctaccagaatcgcaacagtgggcgtcgcttgcattggcaacactcgctcggtacgttgaccatgacggcgaaattcgaaaaagcgggcgttaaggagctccacgtaagcaccttccaagcgatcatcctcatgctcttcaacacgctcgagccgggtcagaagctgagctacgccgacatccgcacccatactggactcaacgaccaagagctcaagcggaccttgcagagtctcgcgtgtggtctgatccccacccgcgtgcttcgcaaacatcctcaaggcaaggaagtcaacgatgatgaccatttcacgtttaacgacaactttaagaacgaccgtcaccgcattcgcatcaaccagatccagatgaaggagacggccgaagagcaaaagtcgaccgagcaacgggtgtttctcgatcgagagcttatccttcaagcggcgacggtgcgtgttctcaaggccaagaagaccatcaagcattccgagctcatcactgaggtcgtcgaccagatcaagaatcgcttcacggtggatgtcgccgagataaaaaaggagtttgagatcttgatcgagaaggagtacatggagcgcgtcgaaggtcagcgaggcatgtatcgctaccttgcttag

SEQ ID NO: 17770 - protein, 822 aa, Ustilago maydis 521
MSLAEALLSRAQTKRSALTDKALSNTADAAKGGLATFLAKAGDSSKNAVAFSVASSGARAPASIQITSFHPEKTLPPANYASLATAQLIRSVRLILVSTWRRPDTSAARQPLQQLYSTANVLVMYCSAEELDHLYDSVKIEIERAVGNWVATLHSSASITDLLQDKVGWLVELRSIWFEWSDNLALVRNILYSLDRYVLNRRTADGYYRSKSFVSHDDRISIRDLGLKEFGHHILKDATLFRTFLKCIVGAIDGKRKLLLTYGKLHHDLLTMLGQLQAEDALDDAVSKATDVFYQAESTASIASLSPTEYVEYAWGRMSEERDRSQWALSTGTGQHKMIAAARKQLVTQHADTILAALPDLVTSGNCDGLDKMYQLANCSDRLADLRKAFAEFIKTHGAAIVEDRERDDKMIEGLLAFKSSIDRVVHHSFGGDDDFVLAQKQGFEFCINKRETKVAELIAKYLDAKLRSGNKTMSDLELENSLDEALILFRYTQAKDMFEEFYKRHFAKRLLLNRSASSDAERSMLLKLKAECGPEFTAKLETMIKDVEVSKDLMDEYVRFAAKQRKDEPSPKDDFDLSVSVLTQAHWPTYPNIDVALPVELAAAAERFAAFYQNRNSGRRLHWQHSLGTLTMTAKFEKAGVKELHVSTFQAIILMLFNTLEPGQKLSYADIRTHTGLNDQELKRTLQSLACGLIPTRVLRKHPQGKEVNDDDHFTFNDNFKNDRHRIRINQIQMKETAEEQKSTEQRVFLDRELILQAATVRVLKAKKTIKHSELITEVVDQIKNRFTVDVAEIKKEFEILIEKEYMERVEGQRGMYRYLA

SEQ ID NO: 17771 - DNA, 2322 bp, Cryptococcus neoformans var. neoformans B-3501A
  CDS (1)..(2322)
atgtccgcatcggcttccggatcatcttggacagagcccacaaaggctcaggctcctcctaaagatgcggacttgaaacaagcttgggctttcctttctgtcggtgttgaccacattatgaccaggcttagctttggaatgtcttactcttactacatcctcctatataccgccatctacaactactgtactcagccaggcaagactggtctcccttcattttcaccccaacggggcggagctagtcttcaaggcgccgacctccacagaagcttgcacaattggttatctgctcactgcaagtccatgcgagaggaggccgagaaacttcctgaccaagaacttctcaagtattatgctcgtcaatgggacaggtacacccgaggcgccttgtacgtcaacaagcttttcaactatttgaacaagcactgggtcaagcgagagaaggacgagggtcgaaaggacgtttatcaagtgtacactcttgcattggtatcttggaagaataacttcttcgatcatttcactgacaataaggggaccagccgattaactcaagctttgttacggcagatccagcagcaacgtaacggcgaggaagtcgattctggtcttctcaagaaggtcatcgacatctcccttggtcttgacgaggccgatgctcaacgacaaaatctggatacctataggaaacatttccagactcaattcctcgaagccaccgacacctactaccgtgctgaatcttctgcatttgttggttccaactctgttgcggactatatgaagaaggcagaggcgaggttacaggaggaggcggacagggtgaacttgtatttgcatgataatactaggaacgatttgaagacaagatgtgaaaaggtactcattgaagagcaccaagccattatgtgggatgagttccaaactcttcttgatagcgaccgggttgacgacttggcaaggatgtacggacttctttctcgcgtgctcaacgggcttgaccctttacgagaaaagtttggtcaacacgtcaggcgtgctggtagagcagctgtggaaaaggtccttcctgccccaggagctgtcaatgaagctggaaaggctgagtctctcgatcctaaggcgtacgttgaggcccttctcgaagtacacggcaagtatacctccatggttgaagggcccttccgaggcgaaatgggtttcaaccgtgctctcgatcaggcctgtggcgacttctgcaactccaatgctgcttgtactgtctctacaaagtctcccgagttgttggctagctactgtgatttattgttaagaaaaagcaataaggactctgatgctgaatctttggaagcttctttgagcaaagctatgatcattttcaacttcattgatgacaaggatgtcttccacaagttctatcagaagaagctcgctcagcgacttgtcggttctctttccgcgtcagacgatgcagagagcagcatgatcaccaagctcaaggagttatctggtttcgaatacaccaacaagttgtctaaaatgtttaccgatgtcaatcttagtaaagacttgatggaacgattcaacgaaagggagagagagaagggcatagcctccgatatcgatttccaacccttggtccttggctctaacagttggcctttgcaccctcaacaaaccgactttgccattcctcgtgaaatccaggccctctatgatcggttcaacgccttccacggcgaagttcatcaaggccgaactctcaactggttatggcacatatccaagaacgaactccgcaccacctacctcaaccaaaagtacattttgatgacctccgcctaccaaatggctatcctcacacaattcaacgtttccgacaccctttcttacaaggatattgaggccggtaccaagctttcccccactgtgctcaagccccagctcggcttactcgtcaaactgaagattctcttgaacactaatgaagaatattctttgaatacgggcttcaagagcaagaagattagggtcaatttgaaccagactatcaagtctgaggctagggctgagcagaaggaggttatcgctgctgttgatgaggacagaaagtttgtttaccaggcgactattgtaaggttgatgaaggggcgaaagactatgcaacatcaagctcttattcaagaagtcaccgctcagatctcctccaagttcactcctaaaattccagagatcaagaaagcgattgaatacttgatcgacaaggagtacctggagcgagctcccgattccaataacacttacaactacttggcctaa

SEQ ID NO: 17772 - protein, 773 aa, Cryptococcus neoformans var. neoformans B-3501A
MSASASGSSWTEPTKAQAPPKDADLKQAWAFLSVGVDHIMTRLSFGMSYSYYILLYTAIYNYCTQPGKTGLPSFSPQRGGASLQGADLHRSLHNWLSAHCKSMREEAEKLPDQELLKYYARQWDRYTRGALYVNKLFNYLNKHWVKREKDEGRKDVYQVYTLALVSWKNNFFDHFTDNKGTSRLTQALLRQIQQQRNGEEVDSGLLKKVIDISLGLDEADAQRQNLDTYRKHFQTQFLEATDTYYRAESSAFVGSNSVADYMKKAEARLQEEADRVNLYLHDNTRNDLKTRCEKVLIEEHQAIMWDEFQTLLDSDRVDDLARMYGLLSRVLNGLDPLREKFGQHVRRAGRAAVEKVLPAPGAVNEAGKAESLDPKAYVEALLEVHGKYTSMVEGPFRGEMGFNRALDQACGDFCNSNAACTVSTKSPELLASYCDLLLRKSNKDSDAESLEASLSKAMIIFNFIDDKDVFHKFYQKKLAQRLVGSLSASDDAESSMITKLKELSGFEYTNKLSKMFTDVNLSKDLMERFNEREREKGIASDIDFQPLVLGSNSWPLHPQQTDFAIPREIQALYDRFNAFHGEVHQGRTLNWLWHISKNELRTTYLNQKYILMTSAYQMAILTQFNVSDTLSYKDIEAGTKLSPTVLKPQLGLLVKLKILLNTNEEYSLNTGFKSKKIRVNLNQTIKSEARAEQKEVIAAVDEDRKFVYQATIVRLMKGRKTMQHQALIQEVTAQISSKFTPKIPEIKKAIEYLIDKEYLERAPDSNNTYNYLA

SEQ ID NO: 17773 - DNA, 2430 bp, Cryptococcus neoformans var. neoformans B-3501A
  CDS (1)..(2430)
atgcatcccgcccccgctgacgcccacgcccagcgccccccgaagaagatcggccccgacacctccatcaaggacacctgggcaaagctcgccgccgccatccgcgagatacagaaccacaatgcgtccaggctctcctttgaagagcactaccgctatgcgtacaacctcgtcctcttcaagcacggcgaccagctgtacagcggcgtcaagacactcgtcgtcgagcacctcgaccggctcgcccacgacaggatcgtgcccgccttcccccgcagcggcggcacacgcggtgcaggcaagctcggcggcggcgccgaagccatcgagcgcgcgacagagggcgaccgtttcctgaaagccgtcaagggcgtgtgggaagaccacacggggagtatgcgcaaactgaaggatgtgctcaagtacatggcgagtcttgataaagtacatgccccgacggcaggcgtcccccccgtctacgaactcggcctctccctcttcctcacgcacatcatccgccagcccaccatccacacccacctcatctccaccctcctctcccaggtccagctcgagcgcgaagggttcaccatcacccgctccaccgtgcgcgaatgcatcgatatcctgctccgcctcagagtcccagaacgcgagggcggcgggaacgtgtaccagcaagatttcgagcccgagtttctcagaaggagcggcgagtggtacgagtacgaagcaggcgaagaactagttcatggcgacgcttccctctacctgtccaacgtctcccgccgccttgccgaagaacacgaccgcacgatccactacctctccccgtccactctcccgcacctcgaatccctcctcatcagctccctcctcacaccccacctcgtcaccgtcctcaacatgccgggctccggcctcgtgcagatggtggataaagatcggtacggcgatctgaaacgattatacgagctctttggcaaggtgcccggagaccaaggcgtcgccgcattgaaacacgccgtcgcggccgatatcgacctcagggggaaagccgtcaacgcaggcacggcagacgtcgatcccaacacggccaacccgaaaccgacccctccgctgaccctcgccctccaatgggtccactccatcctcctcctctttgacaaatacaccctcatcctcgcctcctccttttcctcctccctcgcccttcaatccaccatcaactcctccttccaaaccgtcatcaacgcccatccccgcgcacccgagttcctttccctctacattgacgaaaccctgaaaaagggcaagggcgcaaagggcgtaggtatagccggcgcaggaaagggcgtgaccgaggaagagatggaagaggccaaggaaaagacgatacgcatctttaggtttttgacggataaagacaagtttgagaggtattacaagaatcatctggcgaggaggttgctcagtgggaagagtgtaggtggggacgcggagcaggagatggtcgggaggttgaagaaggaagttggattccaattcacacataggttggagggcatgtttacagatatgagattatcagacgaagctgcaaacattttcggtaacgatccaagatacaatgacatccccttcaccctccacgtctccgtcctgacctcgtccaactggccgccgtccaccctgctctccctcccactcactttccccgcccccctcctccccgccctcgaacactaccaaaccttttacgactcccgccactctggccgccgcctcacatggcaaggcctcctcggctccgccgacctcaaagtccgaacacgcaaaggtcaatgggaagtcaacctctccaccatcggcatggtcgtcctcctcgccttttcagacctgaaaccgggcgacgtcctgtcgtaccacgagctgaaagcgcagacgtccttgcccgacgcagagctggcgaggacgctgcagtccttggcctgtgggaaacatcgcctcttggtcaagcatccaaaggggagagaggtcgagcagggcgatacattcgagtttaacgaagcgttttcatcccctcttgcccggatcaaaatcctccaaatctcctcctccgcctcctccgccgcctccacctccgcctcctccgcacgcggcgttggagtcgaaaacgcacaagaaagagaagaaacagaacgccagatcgaagaagagaggaaacatcaagtcgaagcgtgtatcgtccggatcatgaaagaccgcaagacgatgcggcataacgatttggtttcagaggtggcgcatcagttggccaaacggttcatggccagtgtgcccatgattaaaaagaggattgaagggttgattgatagagagtatctcgagagaacagaagatatgggatcgtatcgatatttggcgtag

SEQ ID NO: 17774 - protein, 809 aa, Cryptococcus neoformans var. neoformans B-3501A
MHPAPADAHAQRPPKKIGPDTSIKDTWAKLAAAIREIQNHNASRLSFEEHYRYAYNLVLFKHGDQLYSGVKTLVVEHLDRLAHDRIVPAFPRSGGTRGAGKLGGGAEAIERATEGDRFLKAVKGVWEDHTGSMRKLKDVLKYMASLDKVHAPTAGVPPVYELGLSLFLTHIIRQPTIHTHLISTLLSQVQLEREGFTITRSTVRECIDILLRLRVPEREGGGNVYQQDFEPEFLRRSGEWYEYEAGEELVHGDASLYLSNVSRRLAEEHDRTIHYLSPSTLPHLESLLISSLLTPHLVTVLNMPGSGLVQMVDKDRYGDLKRLYELFGKVPGDQGVAALKHAVAADIDLRGKAVNAGTADVDPNTANPKPTPPLTLALQWVHSILLLFDKYTLILASSFSSSLALQSTINSSFQTVINAHPRAPEFLSLYIDETLKKGKGAKGVGIAGAGKGVTEEEMEEAKEKTIRIFRFLTDKDKFERYYKNHLARRLLSGKSVGGDAEQEMVGRLKKEVGFQFTHRLEGMFTDMRLSDEAANIFGNDPRYNDIPFTLHVSVLTSSNWPPSTLLSLPLTFPAPLLPALEHYQTFYDSRHSGRRLTWQGLLGSADLKVRTRKGQWEVNLSTIGMVVLLAFSDLKPGDVLSYHELKAQTSLPDAELARTLQSLACGKHRLLVKHPKGREVEQGDTFEFNEAFSSPLARIKILQISSSASSAASTSASSARGVGVENAQEREETERQIEEERKHQVEACIVRIMKDRKTMRHNDLVSEVAHQLAKRFMASVPMIKKRIEGLIDREYLERTEDMGSYRYLA

SEQ ID NO: 17775 - DNA, 2313 bp, Strongylocentrotus purpuratus
  CDS (1)..(2313)
atgtccaatcgaccgaacaggggtcaaaaccctcatgggttgaaattgactagcttagatcagatatgggacgacttgagagcagggatccaacaggtttactccagccaagcaatgcccaagaaacgctatatggagctctactcctatgtatataactactgtacaaatgtcaatcagcttcagcaggcacggacaacatcggctaagagcaaaaagggcacagtgcaaggtggcgcacagtttgtgggccttgaactctacaaaagactacgggattttcttagggattaccttgtaagcctaagacaagatggctctgacctaatggatgagagtgtgttgacatactacacaaagcaatgggaagactatcaattctccagcaaggtattggatggcatgtgttcctacctcaaccgacactgggttagaagagagtgtgatgaggggcgtaaaggcatctatgaaatctactcccttgccctggtcacatggagagagcacttgttcaagccactcaacaaacaggttaccaatgctgttctgaaattaattgaaagggaaaggcatggagagccaatcaacacacggctggtcagtggtgtgattcaatgttatgttgaacttggtttgaatgaagatgagccaactgctaaaggtccaaccttgagtgtgtacaaggactcgtttgagagtcagttcctatctgagacagaacgcttctacacttcagagagcacagagtttctcagacagaaccctgttacagagtatatgaagaaggctgagacaagattgcttgaagagagaaggcgagtccaggtttacctacatgagagcacacacgatgatctggctaagagatgtgagagggtactcatcaagaaacatcttgacatcttctactcagaattccagaatctccttgatgctgataaaaatgatgatcttgcaagaatgtacagcttagtatcacgcatacccgatggacttggtcagctcatgacactcctggagacacacatctgtaaccaaggattggctgccattgagaagtgtggagaaacagctgttaatgatcctaagctgtatgtacagaccatccttgatgttcacaagaagtataatgccttggttctcactgcttttaacaatgactcaggctttgttgcatcgctagacaaggcctgtggaagattcatcaacagcaatgctgtcaccaagatggccaattcatcaagtaaatctccagagctcctggccaagtactgcgattcactgctcaaaaagagctccaagaatccagaggaagcagaattagaagacacactaaatcaagtgatggtagtgttcaagtacatagatgacaaagatgttttccagaagttctactccaagatgctcgctaagagacttgttcatcataattcagccagtgatgatgcagaagccagtatgatctcaaaactcaagcaagcatgtggctttgagtacacttccaaactgcagaggatgttccaggacattggtctaagcaaagacctgaatgaacagttcaagaaccacctagcaagcagtgaatctctagatattgatttcagcattcaagtcctgtgttcagggtcatggcccttccagcaaggctgtaccttcaaccttcctagcgagttggagcgaagctttcaacgattcaccaccttctatggcagccagcacagtgggaggaaacttatgtggatctttcaaatgtctaagggagagctggtcactagttgcttcaagaatagatacacattgcaggcttcaacatttcagatggctgtactcttacagttcaatgtctctgattcgtacacaatacaacagctccatgacagcacacagatcaaaatggacatactgactcaagtcattcaaattcttctcaagtgcaaactgttagttggggatgatggtgatgatgaactcaagccaacaactgaagtcaagttataccagggctacaaaaacaaaaagctgcgagtgaacattaatgtaccaatgaagacagagcagaaacaagaacaggagacaacacacaagcatattgaagaagataggaagcttcttattcaggctgcaatagttcgtataatgaagatgaggaaggctttgaggcaccaacagctcttgagtgaagtcttgacccaactctctggccgcttcaaacccaaggtgcctgtcatcaagaaatgcatcgacatcttgatagagaaggagtacttggagcgtgtagatggggagaaggacgtgtacagctacctagcatag

SEQ ID NO: 17776 - protein, 770 aa, Strongylocentrotus purpuratus
MSNRPNRGQNPHGLKLTSLDQIWDDLRAGIQQVYSSQAMPKKRYMELYSYVYNYCTNVNQLQQARTTSAKSKKGTVQGGAQFVGLELYKRLRDFLRDYLVSLRQDGSDLMDESVLTYYTKQWEDYQFSSKVLDGMCSYLNRHWVRRECDEGRKGIYEIYSLALVTWREHLFKPLNKQVTNAVLKLIERERHGEPINTRLVSGVIQCYVELGLNEDEPTAKGPTLSVYKDSFESQFLSETERFYTSESTEFLRQNPVTEYMKKAETRLLEERRRVQVYLHESTHDDLAKRCERVLIKKHLDIFYSEFQNLLDADKNDDLARMYSLVSRIPDGLGQLMTLLETHICNQGLAAIEKCGETAVNDPKLYVQTILDVHKKYNALVLTAFNNDSGFVASLDKACGRFINSNAVTKMANSSSKSPELLAKYCDSLLKKSSKNPEEAELEDTLNQVMVVFKYIDDKDVFQKFYSKMLAKRLVHHNSASDDAEASMISKLKQACGFEYTSKLQRMFQDIGLSKDLNEQFKNHLASSESLDIDFSIQVLCSGSWPFQQGCTFNLPSELERSFQRFTTFYGSQHSGRKLMWIFQMSKGELVTSCFKNRYTLQASTFQMAVLLQFNVSDSYTIQQLHDSTQIKMDILTQVIQILLKCKLLVGDDGDDELKPTTEVKLYQGYKNKKLRVNINVPMKTEQKQEQETTHKHIEEDRKLLIQAAIVRIMKMRKALRHQQLLSEVLTQLSGRFKPKVPVIKKCIDILIEKEYLERVDGEKDVYSYLA

SEQ ID NO: 17777 - DNA, 2316 bp, Tribolium castaneum
  CDS (1)..(2316)
atgtcagcgatgaagaattcctctctcagcaaaaaggaaggcaaaatgaggatccgtgcctttccaatgactatggatgagaagtatgtggagagcatatgggcccttttgaaaaacgccattcaagaaattcaaaagaaaaacaattcaggattaagttttgaagagttgtacagaaatgcgtacactatggttctccataaacatggggagaaattatacactgggctcaaggaggttgttactcatcatttagaatcaaaggtccgtgaagacgtccttcgcgccctccacaactgcttcctgatgacactgaatcaagcctggaacgaccaccagacgtcgatggtgatgattcgtgacatcctcatgtacatggatcgcgtctatgtgcaacaaaacgacgtcgacaacgtctacaatttgggattaatcatttttcgcgatcaggttgtgcgatacggttgcatacgcgaccatctccgtgaaaccctcctcgatatggtgatgcgagagcgaagaggtgaaaaagtcgacaggatctcgataaaaaacgcctgtcaaatgctaatggtcctcggtattaactcgcgcgccgtctacgaagaggacttcgaacgaccgttcctccaacaatcggccgaattttacaaagtagaaagtcagaaatttctagccgaaaatagcgcctccgtgtatataaataaagtagaagccagaatcaacgaggagtctgatagagctaaacactacttggacgaatcaaccgaatccagaatcgtcgaagtggtcgaagaggagctcattaagaagcacatgaagacgatagtcgagatggaaaattcgggcgttgtgcacatgcttaagcaccagaaaacagaggatctggcttgcatgtacaagttattcggacgtgttgccgacggtttgaagacaatggctgattgtgttagtcagtatttgagggagcaaggcaaggctttggtgcaagaagaggagcatcaaccatccaccaatgctataacattcgtccagtcgttgctagatctgaaggatcggttcgatcatttcttgaagaattcgttcaataacgataagatcttcaaacagatgatcgcctcagatttcgaacattttctcaatctcaacccgaaatcgcccgaatacctctccttatttatagatgataaattaaaaaaaggcgtcaaagggatgtccgaacaagaaattgaattggttcttgacaagtccatggtactctttaggttccttcaagagaaagacgttttcgaacgctattacaaacaacacttggccaagcgattacttttgaataagtcggttagcgacgattgggagaaaaatatgatttcaaagttaaagactgagtgcggttgtcagttcacgtcaaaacttgaaggcatgttcaaagatatgacagtttcaaacacgatcatggacgagtttaaggatcatatcaccaaaactgagtcaagcttatgcggggtggaccttttcatgcgcgtcttaacgaccgggttctggcctacgcagagcgccactcccaagtgccacattcctgctgttccactagctgccttcgaatgttttagtagattttatttagccaaacatagcggaaggcagttgacgttacaaccccagttgggcaacgccgatctcaatgccatatttttcggtccgaaaaaggaagaccccgacaaagacggggcgtgttcgtcgaccagctccatttcgccgcggacaggccccagaaagcacataatccaagtgtccacctaccaaatggtcgttttaatgctgttcaacaaccatgagaaattaacctatgaggagattttaaacgagtcggatattcccgagagagatttaattagggcgctgcagtcgttggcgatgggcaaagcgacgcagcgcatcttgattaagaatccgcggactaaagaaatcgaatcgaaccacgagttttacgtcaacgattcgttcacgtcgaagttgcatcgcgtgaagatccagacggtggcggcgaagggcgaaagcgagcccgagaggcgcgaaacgaggaacaaagtggacgaggacaggaagcacgagatcgaagcagctatcgttagaataatgaagtcgaggaaacggatgccgcataacattctggtgacggaagtgaccgagcagctgaagagccgatttttaccatcgccagtgattatcaagaaacgaatagaagggctgattgagcgggagtatctggcacggacgcccgaggacaggaaggtctacacctacgttgcttga

SEQ ID NO: 17778 - protein, 771 aa, Tribolium castaneum
MSAMKNSSLSKKEGKMRIRAFPMTMDEKYVESIWALLKNAIQEIQKKNNSGLSFEELYRNAYTMVLHKHGEKLYTGLKEVVTHHLESKVREDVLRALHNCFLMTLNQAWNDHQTSMVMIRDILMYMDRVYVQQNDVDNVYNLGLIIFRDQVVRYGCIRDHLRETLLDMVMRERRGEKVDRISIKNACQMLMVLGINSRAVYEEDFERPFLQQSAEFYKVESQKFLAENSASVYINKVEARINEESDRAKHYLDESTESRIVEVVEEELIKKHMKTIVEMENSGVVHMLKHQKTEDLACMYKLFGRVADGLKTMADCVSQYLREQGKALVQEEEHQPSTNAITFVQSLLDLKDRFDHFLKNSFNNDKIFKQMIASDFEHFLNLNPKSPEYLSLFIDDKLKKGVKGMSEQEIELVLDKSMVLFRFLQEKDVFERYYKQHLAKRLLLNKSVSDDWEKNMISKLKTECGCQFTSKLEGMFKDMTVSNTIMDEFKDHITKTESSLCGVDLFMRVLTTGFWPTQSATPKCHIPAVPLAAFECFSRFYLAKHSGRQLTLQPQLGNADLNAIFFGPKKEDPDKDGACSSTSSISPRTGPRKHIIQVSTYQMVVLMLFNNHEKLTYEEILNESDIPERDLIRALQSLAMGKATQRILIKNPRTKEIESNHEFYVNDSFTSKLHRVKIQTVAAKGESEPERRETRNKVDEDRKHEIEAAIVRIMKSRKRMPHNILVTEVTEQLKSRFLPSPVIIKKRIEGLIEREYLARTPEDRKVYTYVA

SEQ ID NO: 17779 - DNA, 2322 bp, Tribolium castaneum
  CDS (1)..(2322)
atgtcgaataaaaattccgtcaataacacagcggggctcaaacagatcgacctggatcagatttggggggatttgcacgcggggatcgagcatgcatacagccagcagcacatgcccaagtacctctacatccagctgtacacccatgtttatgactactgcacctcggtgcaccagcaggccaatggcaggggctcctccagcatctccaccaagaacaagaagagccaggttgggggcggcgcccagctcgtgggcctcgagctctacaagaggatcagggagttcctgaggaactatctggtgactctgctgagtgacgggatgaatcggatgggtgaaggcgttttgaaattttatacgcgtcaatgggaggagtatcagttcagtagcaaggttctgaatggtatttgctcgtatttgaatcgacattgggtgaagagagaatgcgaagagggaaggaaaggaatctacgaaatttatcagctcgcactggtgacatggcgagatcatctgttcaaacaattaaacaaacaggtaacaactgccgttctgaaactgatcgaacgcgagcgcaacggcgaaacaatcaacactcgtttagtctctggcgtgataaactgttacgtggaattgggcctaaacgaggaggaaccaggggccaaaggaccgaacctatcggtgtacaaagagagtttcgaaaacatgtttctggaagacactgaacgcttctacctaaaagagagtaacaacttcctagcacaaaatccggtcactgaatacatgaaaaaggccgaacaacgtctcctcgaagaacagaaacgcgtccaagtctatctacacgaaacaacaagcggccgtttagccaaaacctgcgaaagagtcctcattaaaaagcacctcgacatgttccattcggagttccagcagttgttggacgccgacaaagacgaggatttgggtcggatgtactcgttggtagcgcggattccggacggtttaggggaattacggacgcttctcgagcaacatatcgcagctcaggggctctcagcgattgaaaaatgcggagaaagcgcccataatgacccgaaaatttacgtcaacacgattctggaggtgcacaagaagtacaacgctcttgttttggtggcgttcaacaacgatagcggttttgtggcggctttggacaaggcatgtggtcgtttcatcaacgccaatgccgttaccaaaaaagccaattcgagcagcaaatcgccggaattgctcgcgaaatactgtgatttgctgctgaagaagtcgagcaagaatccggaggaggcggagctcgaagatacgttaaaccaagtcatggttgtgttcaaatatatcgaagataaggacgtttttcaaaagttctacagtaaaatgctggccaagcgattggtccagcacatgtcggcgagtgacgatgctgaagcttcaatgatctcaaaactgaaacaggcatgcgggtttgagtacacctccaagttgcaaaggatgttccaggacattggcgtgtctaaagatctgaacgagcaattcaaaagtcatctattaaaatcaaacgaaaccctagacatagattttagtattcaagtgttatcttccggatcatggcctttccagcaatctttcaccttcggattgccgaccgagcttgaaagaagtgttcatagatttacaaatttctattccggtcagcattcgggccggaaattaaattggctgtataacatgtcgaaaggagagttacacacgaactgttttaaaaatagatacacactccaagctagtacgtttcaaatggctgtgctgctccagttcaacgtgtctgaaagttggacaatagctcaactcgaggagaatacacaaatcaaaacagatttcctaatacaggtcatacagatattacttaaagcgaagctgatcacttgcgatgatgacgagaacgagctcgcgccacactcggttgtgaaccttttcctaggatataaaaataaaaaacttcgggtcaatatcaatattccgatgaagaccgagctaaagatggagcaagaaacaactcacaagcatattgaagaggacaggaagttgctgattcaagccgcgattgtacgaatcatgaaaatgaggaaaatactgaaacatcaacagttggtggctgaagttttgaaccagttgtcgtcaaggttcaagccgagggttcacatcatcaagaaatgcatagatattctgatcgagaaggagtatctggagaggactgagggtcagaaggacacctacagctacttggcatga

SEQ ID NO: 17780 - protein, 773 aa, Tribolium castaneum
MSNKNSVNNTAGLKQIDLDQIWGDLHAGIEHAYSQQHMPKYLYIQLYTHVYDYCTSVHQQANGRGSSSISTKNKKSQVGGGAQLVGLELYKRIREFLRNYLVTLLSDGMNRMGEGVLKFYTRQWEEYQFSSKVLNGICSYLNRHWVKRECEEGRKGIYEIYQLALVTWRDHLFKQLNKQVTTAVLKLIERERNGETINTRLVSGVINCYVELGLNEEEPGAKGPNLSVYKESFENMFLEDTERFYLKESNNFLAQNPVTEYMKKAEQRLLEEQKRVQVYLHETTSGRLAKTCERVLIKKHLDMFHSEFQQLLDADKDEDLGRMYSLVARIPDGLGELRTLLEQHIAAQGLSAIEKCGESAHNDPKIYVNTILEVHKKYNALVLVAFNNDSGFVAALDKACGRFINANAVTKKANSSSKSPELLAKYCDLLLKKSSKNPEEAELEDTLNQVMVVFKYIEDKDVFQKFYSKMLAKRLVQHMSASDDAEASMISKLKQACGFEYTSKLQRMFQDIGVSKDLNEQFKSHLLKSNETLDIDFSIQVLSSGSWPFQQSFTFGLPTELERSVHRFTNFYSGQHSGRKLNWLYNMSKGELHTNCFKNRYTLQASTFQMAVLLQFNVSESWTIAQLEENTQIKTDFLIQVIQILLKAKLITCDDDENELAPHSVVNLFLGYKNKKLRVNINIPMKTELKMEQETTHKHIEEDRKLLIQAAIVRIMKMRKILKHQQLVAEVLNQLSSRFKPRVHIIKKCIDILIEKEYLERTEGQKDTYSYLA

SEQ ID NO: 17781 - DNA, 2232 bp, Tribolium castaneum
  CDS (1)..(2232)
atgtctctgaaaccgcgccgtgtggacttcaacgcgacctggggctccatccgggacaccatccggggggtgatcaccctggaccacgtcccgcgccccgtgtggaacgaccgcttctcggacgtctactcgctatgtgtggcccatcccgagcccatggcggaccgtttgtacgccgagacgaagcagtacctcatcgaccacgtctccaaactgcttgtgcaagtgcaggacgagggcgaggccaatttggtgaaaagttactaccattattggtcgcagtactcggtagggagtcagtacttgcacagtttgtacttgtacctcaaccagcaacatataaggactcagaaactgtccgatgctgagattatttacgggagttcggattcgtcagggggcgaacaaatggagatcggggagttggcgctggaggtgtggcagtcggggatgatagcccccttggggcaaaggcttgttaaactgctactggaggcgattggggaggatagggcgcaaaatacgtgtgctataccgattgatgcagtcaggggcacaattcttagttttgttgaggtgcagggctacaagaaaaagggccaactgcaactgtaccaggagttatttgaggagccgttcctcaaagaaagcggcgagcattttaaacgcgacgctgccaaacttttgcaagagaaaaacgtctccctgtatatggagcgcgtcaagggacgaattgaggaggaactgttacgtgcacgtcgcttcctccacaccagttccctcccgaaagtctcccaacgatgtgaaacacacatggtggccgaacatttggactttttatacagcgaatgcgtggcaatggtacagggtgagcgcaaaaaggacctctcaaatatgtacgatctgctcaaaagcgtccaaaatgcaatggttgtgcttgttgataccgttctggaccatattaagacgcaaggattgacggctgttggtaatattgataccgaaaatattcacataacgttcgtcgaaaatatgctagcggtttataaaaaatataaattgttgattcaagaggtgttcaagtcggatcagaattttatgggggctttggataaggcctgcagttccgttattaatcacaagtttggcaagcctgtgtgtaaaagccccgaatttttggccaagtattgcgacgcattgttgcgcaagtcgagtaaagggattagcgattcggaggtggacgaaaagctcgccgagagcataacaattttcaaatatatcgacgacaaagacgtatttcaaaaattctattctcgaatgttggccaaacgcctcatccaccaacaaacgcaaagtatggatgcggaggaggccatgatcaatcgtttaaaacaagcatgcggttacgaatttacaagtaaattgcatcgaatgtttaccgatatgtcagtgagtgcggatctcaataataaatttaacgcatttttgaaacaagacaacatcgacctcggaattaatttcagtatatacgtattacaagcaggggcgtggccattgggccagacggtgaccacgccttttacgtatcctagacaactggagaagagcgtacaaatgtttgaaaatttctatcataataggttcaacggtcgcaaattgacatggttgcataatttgtgtcaagcggaattgaagttgggccatttgaaaaaatcgtatctagtgacaatgcagacgtttcaaatggccactttgttgctgtttgaacacacggattcgctcacttttcgcgaaattagggagagtttgcaactaaccgccgaacagtatcacagatacgcggctagcttgattgattgtaaattattgatagcggatagtacggatttgaaaccggaaacggtgctccgtttaaacatggaatataacaacaagaggacgaagttccggataaatgcggctgtgcagaaagagtcgcctcaggagattgaacaaacgatgaattcggtcgaagaggaccggaagatgtacttgcaggcggccattgttaggattatgaagtcgaggaaaatactcaaacataacgctttgatacaagaggtttatgcgcaatcgaaagtttccttcgcaccgagtgttcagttgatcaaaaagtgcatcgaatctctcattgataaacagtatatcgaaaggacgccacattcgagcgaggagtacagttatgtagcttag

SEQ ID NO: 17782 - protein, 743 aa, Tribolium castaneum
MSLKPRRVDFNATWGSIRDTIRGVITLDHVPRPVWNDRFSDVYSLCVAHPEPMADRLYAETKQYLIDHVSKLLVQVQDEGEANLVKSYYHYWSQYSVGSQYLHSLYLYLNQQHIRTQKLSDAEIIYGSSDSSGGEQMEIGELALEVWQSGMIAPLGQRLVKLLLEAIGEDRAQNTCAIPIDAVRGTILSFVEVQGYKKKGQLQLYQELFEEPFLKESGEHFKRDAAKLLQEKNVSLYMERVKGRIEEELLRARRFLHTSSLPKVSQRCETHMVAEHLDFLYSECVAMVQGERKKDLSNMYDLLKSVQNAMVVLVDTVLDHIKTQGLTAVGNIDTENIHITFVENMLAVYKKYKLLIQEVFKSDQNFMGALDKACSSVINHKFGKPVCKSPEFLAKYCDALLRKSSKGISDSEVDEKLAESITIFKYIDDKDVFQKFYSRMLAKRLIHQQTQSMDAEEAMINRLKQACGYEFTSKLHRMFTDMSVSADLNNKFNAFLKQDNIDLGINFSIYVLQAGAWPLGQTVTTPFTYPRQLEKSVQMFENFYHNRFNGRKLTWLHNLCQAELKLGHLKKSYLVTMQTFQMATLLLFEHTDSLTFREIRESLQLTAEQYHRYAASLIDCKLLIADSTDLKPETVLRLNMEYNNKRTKFRINAAVQKESPQEIEQTMNSVEEDRKMYLQAAIVRIMKSRKILKHNALIQEVYAQSKVSFAPSVQLIKKCIESLIDKQYIERTPHSSEEYSYVA

SEQ ID NO: 17783 - DNA, 2229 bp, Petunia integrifolia subsp
  CDS (1)..(2229)
atgaaccagcgcagcacaattgatttggatcagggatgggaattcatgcaaaggggcattacaaagctgaagaacattctagaagggctgcctgagccacagttcagctcagaggactatatgatgttgtatacgaccatatataacatgtgtactcagaagccaccacatgattactctcaacaactgtatgacaaatatcgtgaagcttttgaagaatatatcacagcaacggtattgccttctttgagagaaaaacatgatgagttcatgttgcgagagctagtaaaaaggtggtcaaaccataagattatggtcagatggttgtcacgattcttccattatcttgaccgctatttcattgcccggagatctctgccagggcttaatgaagtcggactaacatgcttccgtgatcaggtctaccaagagttgaatggcaaagtcagggatgctgttatatcattgattgatcaagagcgcgagggagagcaaattgacagggctctactgaagaatgtgctagatatatttgttgaaattggaatggggcaaatggatcagtatgagaatgactttgaagcttcaatgctcaaggacacagctgcttattattctcgcaaagcttctaactggatcctagaagattcctgtccagattatatgctgaaagccgaggagtgcttgaaacgggagaaggatagggttgctcattatctccattcaagcagtgagacaaagttgcttgagaaagtacaacatgagttgttatctgtgtatgccactcaactgcttgagaaggaacactctgggtgccatgcattactaagagatgataaggttgaagatttatcaaggatgtataggctcttttccaagattcttcgaggcttagaccctgtggctaatatatttaaacagcatgttactgccgaaggtacagcattggtgaaacaggctgaagatgctgcaagcaacaaaaaggcagagaagagagatgtggttggtttgcaggagcaggtttttgtacggaaagtcattgagcttcatgataaatacttggcatatgtgaataactgtttccagaaccacacactttttcacaaggcacttaaagaggcttttgaagttttttgcaataaaggcgttgctggtagctcaagcgctgaacttcttgccacattctgcgacaacattctcaaaaaaggtggaagtgagaagttgagtgatgaagccattgaagacacgctggaaaaggttgttaagctcttagcatatattagtgataaggacttgtttgcagaattttatagaaaaaagcttgccggcggttgttatttgataaagagtgccaatgatgaacatgagagaagcatcctaacaaaattgaagcagcaatgtggaggccagttcacctccaagatggagggaatggtcactgatttgactttggcaagggaaaatcaagccagctttgaggagtatttgagcaacaatccagcggcaaatccaggaatcgacctgacagtgactgtcttgactactggcttctggcctagctacaagtcttttgatctccaacctcccacagagatggttagatgtgttgaagtatttaaggagttctatcaaacaaaaacgaagcacaggaaactcacgtggatatactctttgggcacttgcaacataaacggaaaatttgatccaaaaactattgagctcgttgtcactacttatcaggcttctgctctgttgctatttaacgcatcagataggttgagttatcaggaaattatggcacaattgaacctgtcagatgatgatgttgttcggcttcttcattctctttcatgtgcaaagtataagattctcaacaaggagccaagcaccaagacaatttctcagactgatgtctttgagttcaactcaaagttcactgacaaaatgaggaggatcaagatacctcttcctcctgtggatgagaagaaaaaggtaattgaagatgttgacaaggacagacggtatgctatagatgcttcaattgttcgtattatgaagagtcgtaaagtattgggctaccaggaactagtcatggagtgcgttgaacagttgggacgcatgttcaagcctgatgtcaaagctatcaagaagagaattgaagatttgataactagagattacttagagagagacaaagataacccaaacttgttcaagtacttggcatga

SEQ ID NO: 17784 - protein, 742 aa, Petunia integrifolia subsp
MNQRSTIDLDQGWEFMQRGITKLKNILEGLPEPQFSSEDYMMLYTTIYNMCTQKPPHDYSQQLYDKYREAFEEYITATVLPSLREKHDEFMLRELVKRWSNHKIMVRWLSRFFHYLDRYFIARRSLPGLNEVGLTCFRDQVYQELNGKVRDAVISLIDQEREGEQIDRALLKNVLDIFVEIGMGQMDQYENDFEASMLKDTAAYYSRKASNWILEDSCPDYMLKAEECLKREKDRVAHYLHSSSETKLLEKVQHELLSVYATQLLEKEHSGCHALLRDDKVEDLSRMYRLFSKILRGLDPVANIFKQHVTAEGTALVKQAEDAASNKKAEKRDVVGLQEQVFVRKVIELHDKYLAYVNNCFQNHTLFHKALKEAFEVFCNKGVAGSSSAELLATFCDNILKKGGSEKLSDEAIEDTLEKVVKLLAYISDKDLFAEFYRKKLAGGCYLIKSANDEHERSILTKLKQQCGGQFTSKMEGMVTDLTLARENQASFEEYLSNNPAANPGIDLTVTVLTTGFWPSYKSFDLQPPTEMVRCVEVFKEFYQTKTKHRKLTWIYSLGTCNINGKFDPKTIELVVTTYQASALLLFNASDRLSYQEIMAQLNLSDDDVVRLLHSLSCAKYKILNKEPSTKTISQTDVFEFNSKFTDKMRRIKIPLPPVDEKKKVIEDVDKDRRYAIDASIVRIMKSRKVLGYQELVMECVEQLGRMFKPDVKAIKKRIEDLITRDYLERDKDNPNLFKYLA

SEQ ID NO: 17785 - DNA, 2223 bp, Petunia integrifolia subsp
  CDS (1)..(2223)
atgacgatcaaacaaatgaataatattgagctgcaggatggatgggcattcatgcagaaaggagtcacaaaattgaagaaaatcttagaagggagttcagagtcattcagctctgaagagtacatgatgctctacaccactatctatgacatgtgtactcagaagccccctcatgatcactctcagcagctatatgacaaatacaagggagcttttgaagaatacatcaattctacagttctgtcttccatcagagagaagcacgatgagtttatgctgagggagtttgtgaaaagatggttaaatcataaaattatggttaggtggctttcacggttcttcaattatcttgaccggtattttatcgctcgaaggacactccctgctcttaaggaagttggtctgatgtgtttccgtgatctggtttatcaggagttgaaggttaaaggtagagatgcagttatagcactgattgatctagaacgtgagggtgagcagattgatagagctttattgaaaaatgtgctagatatattcgttgaaattggtatgggtcagatggattactatgaaaatgattttgaggatgccatgcttaaagatactgcagctttttattctcgaaaagcttcaaactggattatggaagattcctgtccagattatatgctaaaagcagaggagtgcttgaaaaaagagaaagatagggtgtctcattatttacactctagtagcgaggaaaaacttctggagaaagtgcaaaatgaattattggttgtacataccaatcaattgcttgagaaggagaattctggatgccgagttttgcttagagatgataaggtggtggatttatctcgaatgtatagattattccacagaatccctaaagggctggagcctgttgcaaagatgtttaagcagcatgtcactgctgaaggcatggtcttggtgcaacaagctgaagactcagcaagtaacaaggccggaatttccagtggttcacaggagcaggtctttattaggaaggttattgagctgcatgacaagtatatggcttatgtgatcgactgtttcgcaaataactccctctttcacaaggctttgaaagaggcatttgaggtcttctgtaacaaaactgttgctggctcgtctagtgcagagctcctcgcttcttattgtgataacatccttaagaagggtgggagtgaaaaactcagcgatgatgccattgaggaaacattggataaggtggttaagcttctagcatacatcagcgacaaagacctgtttgctgagttctacaggaagaagctttctcggcgattgctctttgataaaagtggcaacgatgaccatgaaaggctgatcttaacaaagttaaagcagcagtgcggtggacagttcacgtcaaagatggagggaatggtgacagacttgacgttggccaaggaaaatcagaatcactttcaggaatatctcagcaacaacccagcagctagtcctggaattgatttgactgtcacagttcttacaactgggttttggcctagttataaatcttctgatctgaggctcccaatggaaatggtgaagtgtgtagaagtcttcaaggaattttatcagacaaagacaaaacacaggaaattgacgtggatttattcattgggtacatgtcacatcaatggcaagtttgaacctaaaactatcgaactggttctgggaacttatcaggctgctgttctattactgtttaatgcttcagatagattgagttactcagatatcaaaagtcagttaaatttggcagatgatgacttggtccgattgcttcaatccctgtcatgtgccaagtataaaattctgactaaagatcctagcaatagaactgtttcgtcaactgatcattttgagttcaactccaagttcactgacaaaatgaggaggattagggtccctttgcctcctgtagatgaaaggaaaaaagtggttgaggatgttgacaaggacagaagatatgcaatggatgcctgtattgtgcgcataatgaagagtcgtaaggtgcttcctcatcagcagctcgtgttggagtgtgttgagcaattgagccgcttgtttaagcctgatttcaaagaaatcaaaaagcggattgaagatcttatcactagggaatacttggaaagagaccaagagaaccccaacgtattcaagtacttggcctga

SEQ ID NO: 17786 - protein, 740 aa, Petunia integrifolia subsp
MTIKQMNNIELQDGWAFMQKGVTKLKKILEGSSESFSSEEYMMLYTTIYDMCTQKPPHDHSQQLYDKYKGAFEEYINSTVLSSIREKHDEFMLREFVKRWLNHKIMVRWLSRFFNYLDRYFIARRTLPALKEVGLMCFRDLVYQELKVKGRDAVIALIDLEREGEQIDRALLKNVLDIFVEIGMGQMDYYENDFEDAMLKDTAAFYSRKASNWIMEDSCPDYMLKAEECLKKEKDRVSHYLHSSSEEKLLEKVQNELLVVHTNQLLEKENSGCRVLLRDDKVVDLSRMYRLFHRIPKGLEPVAKMFKQHVTAEGMVLVQQAEDSASNKAGISSGSQEQVFIRKVIELHDKYMAYVIDCFANNSLFHKALKEAFEVFCNKTVAGSSSAELLASYCDNILKKGGSEKLSDDAIEETLDKVVKLLAYISDKDLFAEFYRKKLSRRLLFDKSGNDDHERLILTKLKQQCGGQFTSKMEGMVTDLTLAKENQNHFQEYLSNNPAASPGIDLTVTVLTTGFWPSYKSSDLRLPMEMVKCVEVFKEFYQTKTKHRKLTWIYSLGTCHINGKFEPKTIELVLGTYQAAVLLLFNASDRLSYSDIKSQLNLADDDLVRLLQSLSCAKYKILTKDPSNRTVSSTDHFEFNSKFTDKMRRIRVPLPPVDERKKVVEDVDKDRRYAMDACIVRIMKSRKVLPHQQLVLECVEQLSRLFKPDFKEIKKRIEDLITREYLERDQENPNVFKYLA

SEQ ID NO: 17787 - DNA, 2154 bp, Oryza sativa subsp
  CDS (1)..(2154)
atggcgacccacgagcggaagacgatcgatctggagcaggggacgatttacaacatgtgcacgcagaagccgccgcacgactactcgcagcagctctacgagaagtaccgcgagtccttcgaggagtacatcacgtccatggtcttaccttcattaagagagaaacatgatgagtttatgctgagagagctagtaaaacggtggtcaaaccataaagtgatggttcggtggctatcacgcttcttccattatcttgatcggtactttatttcaaggaggtccctaccacaactaagtgaagttgggcttagctgtttccgggatctggtatatcaagagatcaaaggaaaagtaaaaagtgcggtgatatccttgacatactttctcgaacagatagatcaagaacgtgagggtgaacaaattgatagggccctgttaaagaatgttctggatatatttgttgagattggcttgactagcatggactactacgaaaatgattttgaagatttcttgctcaaagatactgcagactattactctataaaagcccagacctggattcttgaggactcttgtccagattacatgttaaaggcagaggagtgtctgaaaagggagaaagagcgagttgctcattatttgcactccagtagtgaacagaagttgttggagaaagtgcaacatgagttgctaactcaatacgcaagtcagctcctggagaaggagcattctggatgccatgcattgcttcgtgatgacaaggttgatgatctctctagaatgtacaggctcttttccagaataactcgtggtttagaacctgtttctcaaatatttaagcagcatgttactaatgagggcactgccttagtgaagcaagccgaagatgctgctagtaataagaagccagagaagaaggagatagttggtttacaggaacaggtttttgtccggaaaatcattgagcttcatgacaagtatgtagcttatgttacggattgttttcaggggcacactctcttccataaggcacttaaggaggcttttgaagttttttgcaacaaaggtgtttctggcagttcaagtgctgaattactagctaccttctgtgacaatatcttaaagaaaggcggtagtgaaaagcttagtgatgaagcaattgaagatacccttgagaaggttgtaaggttacttgcctacattagtgacaaggacttgtttgctgagttctatagaaagaagcttgcaaggagattgctttttgacaagagtgctaatgatgaacatgagagaagcatccttaccaagctaaagcaacaatgtggagggcagttcacttccaaaatggagggcatggttactgatctcactgtggcaagagatcaccaggctaaatttgaagagttcataagcacacactcagagttgaatcctggaatagccttagctgttactgtcctcacaacaggattttggccaagttacaaatcttttgatataaatctacctgcagaaatggtgaaatgtgtagaggttttcaaggagttttaccaaacaagaacaaaacacaggaaacttacctggatttattcactgggaacctgtaatattaatgctaaatttgaggccaaaactattgagctcattgttacaacttatcaggctgcattgctgctgctgtttaatggagttgatagactcagctattctgagattgtgacacagttaaatctctcagatgatgatgttgttcgattgctccattctctatcttgtgcaaaatacaagattcttagcaaagaaccaaataatagatctatttcaccaaatgatgtcttcgagttcaactcaaagtttactgacaagctgcgaagattaaagatacctcttcctccagttgatgagaagaagaaagtagttgaagatgttgataaggatcgcagatacgcaattgatgcatcaattgtgcgtattatgaagagtcgcaaagtattgggtcatcagcaacttgtgatggaatgtgtggagcagcttggacgcatgtttaagcctgacttcaaggcaataaagaagcgaattgaggatcttatcacaagggattacttggagagggataaagacaacccaaatgtgtacagatacttggcttga

SEQ ID NO: 17788 - protein, 717 aa, Oryza sativa subsp
MATHERKTIDLEQGTIYNMCTQKPPHDYSQQLYEKYRESFEEYITSMVLPSLREKHDEFMLRELVKRWSNHKVMVRWLSRFFHYLDRYFISRRSLPQLSEVGLSCFRDLVYQEIKGKVKSAVISLTYFLEQIDQEREGEQIDRALLKNVLDIFVEIGLTSMDYYENDFEDFLLKDTADYYSIKAQTWILEDSCPDYMLKAEECLKREKERVAHYLHSSSEQKLLEKVQHELLTQYASQLLEKEHSGCHALLRDDKVDDLSRMYRLFSRITRGLEPVSQIFKQHVTNEGTALVKQAEDAASNKKPEKKEIVGLQEQVFVRKIIELHDKYVAYVTDCFQGHTLFHKALKEAFEVFCNKGVSGSSSAELLATFCDNILKKGGSEKLSDEAIEDTLEKVVRLLAYISDKDLFAEFYRKKLARRLLFDKSANDEHERSILTKLKQQCGGQFTSKMEGMVTDLTVARDHQAKFEEFISTHSELNPGIALAVTVLTTGFWPSYKSFDINLPAEMVKCVEVFKEFYQTRTKHRKLTWIYSLGTCNINAKFEAKTIELIVTTYQAALLLLFNGVDRLSYSEIVTQLNLSDDDVVRLLHSLSCAKYKILSKEPNNRSISPNDVFEFNSKFTDKLRRLKIPLPPVDEKKKVVEDVDKDRRYAIDASIVRIMKSRKVLGHQQLVMECVEQLGRMFKPDFKAIKKRIEDLITRDYLERDKDNPNVYRYLA

SEQ ID NO: 17789 - DNA, 2148 bp, Oryza sativa subsp
  CDS (1)..(2148)
atgaatatgtcgccgcgcattccggtggtggacctcgaggacgggtggcgcgacgtgctcgccggcgtcgccaagctcaagtgcatcctcgatggctccaacgtcgtgcacttcgtccccgacgagtacatgcacctctacacgacggtttacaacatgtgcacgcagaagccgccgaacgactactcgcaggtgctctacgatcgctacaagcaggccctggacgatcacatcgaatccgtcgtgttgccctccttgaatgagaagcatggcgtgttccttctgagggaaatagtgcagaggtgggagaaacacaagctaatggtaaggtggctgaggaggttctttgactacctcgatcgttactatgttacacggaggtcccttgattcactcaaagatctgggctggagtagcttccgggatttggttttcgataagctcaaaagtactgtggcaacaattatgattggcatgggaaggcaatctaatagaccgtccactcctgaagaatgccctgatatctatgttgaaattggggatagtcaactgaattattacagtgatgattttgaacaatcatttctcaacggaacaacagattactattctaagaaggcacaaacatggattcttgagaattcttgccctgaatacatgctcaaggctgcactcttcgagttgatagataggcgtgcagaagaaattctgaacaaggagaactccggatgcaaagtgttgctttgtgatgaaaagaccgaggatctagcaaggatgtttaggctcttctctaggataactgacgggctgcttccagtatcgaaaatatttaaggagcatgtcattgctgagggtatgtctctgctgaaacatgcaacagatgctgccaacagcagaaaggatgagaagaagggggtggtggtgggattgccggagcaggattttgtgaggagtgtcatagagctccatgacaaatatatggcatatgtcaccaactgtttccagagcaactcagtatttcacaaggcacttaaggaggcctttgaagttttttgcaacaaagatgttgttggttgcagtagtgctgaactgtttgcggcatactgtgatagtatcttaaaaagaggtggaagtgaaaagctaagtgatgaagctatagatgaaagtcttgagaaggttgtcaagcttctaacatatctcagcgacaaggacctctttgtagagtttcataggaagaaacttggaaggagattgctgtttgataagaatacaaatgacgaacatgagagaatcctactctccaagctgaagcaattcttcgggggacagtttacatcaaaaatggaggggatgctcaaagatattacattggcaaaagaacatcagtcaagttttgaggagtacgtaagcaacaatccagagtcaaatcctctgatagacttgaatgtgactgtcttgacaacaggatactggccaacatacaagaactcagatataaatcttccattggagatggttaaatgcgtggaggttttcaaggaatattatcggtccgacaagcaacacagaaagcttacctggatcttttccttgggaaactgcgtcgtcattggaaattttgatgctaaacctgttgagttcgttctcaacacttatcaggctgcattgttgctgctattcaatgaagctgataaactgagttactctgatattgtgtcacaattaaaactgtctgatgatgatgccgtgcgtttgcttcattcgctttcttgtgcaaagtataagattctcaacaaagagcctagcaacagagtgatttctccagaggacgagtttgagttcaattccaaatttaccgataggatgcgaaggattaaggtaccacttcctcaaatcgatgagaagaaaaaggttgtcgatgatgtcaacaaggacaggaggttcgcaattgatgcatctcttgtgcgcatcatgaaaagccgcaaagttctgggccatcagcaacttgtagcggaatgcgtggagcagctcagccgcatgtttaagcctgacatcaggatcatcaagaggaggatcgaggatcttatcagcagggagtacttggagcgtgattcggagaatgcccagacctacaaatacttggcttga

SEQ ID NO: 17790 - protein, 715 aa, Oryza sativa subsp
MNMSPRIPVVDLEDGWRDVLAGVAKLKCILDGSNVVHFVPDEYMHLYTTVYNMCTQKPPNDYSQVLYDRYKQALDDHIESVVLPSLNEKHGVFLLREIVQRWEKHKLMVRWLRRFFDYLDRYYVTRRSLDSLKDLGWSSFRDLVFDKLKSTVATIMIGMGRQSNRPSTPEECPDIYVEIGDSQLNYYSDDFEQSFLNGTTDYYSKKAQTWILENSCPEYMLKAALFELIDRRAEEILNKENSGCKVLLCDEKTEDLARMFRLFSRITDGLLPVSKIFKEHVIAEGMSLLKHATDAANSRKDEKKGVVVGLPEQDFVRSVIELHDKYMAYVTNCFQSNSVFHKALKEAFEVFCNKDVVGCSSAELFAAYCDSILKRGGSEKLSDEAIDESLEKVVKLLTYLSDKDLFVEFHRKKLGRRLLFDKNTNDEHERILLSKLKQFFGGQFTSKMEGMLKDITLAKEHQSSFEEYVSNNPESNPLIDLNVTVLTTGYWPTYKNSDINLPLEMVKCVEVFKEYYRSDKQHRKLTWIFSLGNCVVIGNFDAKPVEFVLNTYQAALLLLFNEADKLSYSDIVSQLKLSDDDAVRLLHSLSCAKYKILNKEPSNRVISPEDEFEFNSKFTDRMRRIKVPLPQIDEKKKVVDDVNKDRRFAIDASLVRIMKSRKVLGHQQLVAECVEQLSRMFKPDIRIIKRRIEDLISREYLERDSENAQTYKYLA

SEQ ID NO: 17791 - DNA, 2205 bp, Oryza sativa subsp
  CDS (1)..(2205)
atgaagaaagccaagttccccggctcctcctcctcctcctcctccgccgccgcccccggggtcaccgagaagaacgggctccacgtcgatcccacggccgccgccgcccggaccggtgggcgcaccaacggcgaggaggatgcggagatggtgctcgccgaccaggaggagctcgccgctccgagcgcatcggccccggcgggggtcgccgccaacctcttccggaagaaggccacactcccccagccatccgccgcccgcaagcccctccgaatcaaaataggtcagccaaaattgccaacaaactttgaggaggatacatgggctattttgaaagatgctattacagctatatttctaaaacagaaactttcgtgcgatgttgaaaaactttaccaggctgcagtgtgggacatggggttgaagctattctgcaagcatctttcactgtctccggagattgaacacaaaactgttactggtcttctaagattaattgagagtgagaggcttggtgaagcaatagacaggacattacttagtcatcttctgaagatgtttactgctcttggaatgtattctgagagttttgaaaagccctttctggagtgtacatctgaattttatgctactgaaggtgttaaatatttgcagcagtctgatattccagactatctcaagcatgtggagacaaggttgcaagaagaacatgaaaggtgtattctatatttggaagctaacactaggaagccgcttataacagctacagaaaagcaattattgcagcggcacacgtctgcaattcttgagaagggattcacaatgcttatggaagcaaatcgtgtaaaagacctctcgaggatgtacacactcttccagagggttgatgccattgagttgctaaagcaagcacttagttcatatattcggggcacaggccagggcattatcatggatgaagaaaaggacaaagaactggtgccctttcttctggaatttaaggcatcgcttgatagaatattggaggaaagttttgccaaaaatgaggctttctccaatacaataaaagagtcattcgaacatcttatcaatttacgccagatcagctcaagcccttttttccaacagaatcgacctgctgaattgattgcgaagtttcttgatgagaaacttcgagctggaaataaaggtacctccgaagaagagctggagggaatattggataaagttttggttctgttccgatttatacaaggaaaagatgtatttgaggcattctacaagaaggatctggctaagaggttgctgctggggaagagtgcatcgatagatgctgaaaaatcaatgataacaaagctcaaaactgagtgtggaagtcaatttaccaacaagctggagggaatgttcaaggacattgaattatccaaagaaataaatgagtctttcaagcaatcatctcaagcaaggacaaagcttccatctggcattgaaatgagtgttcacgtgcttacaacaggctattggccaacatatccaccaatggatgtgaaactcccccatgaacttaatgtctatcaggatatatttaaagaattctatttgagcaagtatagtggaaggcgtttgatgtggcaaaactcattgggtcactgtgtattaaaagcagagttcccaaaaggtaaaaaggaacttgcggtgtcactatttcagagtgtggttttgatgttgttcaatgatgcacaaaaactaagcttcctcgatatcaaggaatcgactggtattgaggataaagaattgcgaagaacgctgcaatcacttgcatgcggtaaagttcgggttctccaaaagatgccaaaagggcgagacgtagaagataaggacgaatttgtatttaatgaagaatttagtgcccctctctatcgcataaaggtgaatgctattcagatgaaggagacggttgaagaaaacacaagcacaactgagagagtattccaggacagacagtatcaggtggatgctgccatagttcgaataatgaagacacgtaaaaccctcagccacacgcttctaataactgagctttttcagcagctcaagttcccaatcaagccatcggatatcaagaaaagaatagagagcctaatcgacagggagtacctggagagagacaggagtaacccccagatctacaattacctggcttga

SEQ ID NO: 17792 - protein, 734 aa, Oryza sativa subsp
MKKAKFPGSSSSSSSAAAPGVTEKNGLHVDPTAAAARTGGRTNGEEDAEMVLADQEELAAPSASAPAGVAANLFRKKATLPQPSAARKPLRIKIGQPKLPTNFEEDTWAILKDAITAIFLKQKLSCDVEKLYQAAVWDMGLKLFCKHLSLSPEIEHKTVTGLLRLIESERLGEAIDRTLLSHLLKMFTALGMYSESFEKPFLECTSEFYATEGVKYLQQSDIPDYLKHVETRLQEEHERCILYLEANTRKPLITATEKQLLQRHTSAILEKGFTMLMEANRVKDLSRMYTLFQRVDAIELLKQALSSYIRGTGQGIIMDEEKDKELVPFLLEFKASLDRILEESFAKNEAFSNTIKESFEHLINLRQISSSPFFQQNRPAELIAKFLDEKLRAGNKGTSEEELEGILDKVLVLFRFIQGKDVFEAFYKKDLAKRLLLGKSASIDAEKSMITKLKTECGSQFTNKLEGMFKDIELSKEINESFKQSSQARTKLPSGIEMSVHVLTTGYWPTYPPMDVKLPHELNVYQDIFKEFYLSKYSGRRLMWQNSLGHCVLKAEFPKGKKELAVSLFQSVVLMLFNDAQKLSFLDIKESTGIEDKELRRTLQSLACGKVRVLQKMPKGRDVEDKDEFVFNEEFSAPLYRIKVNAIQMKETVEENTSTTERVFQDRQYQVDAAIVRIMKTRKTLSHTLLITELFQQLKFPIKPSDIKKRIESLIDREYLERDRSNPQIYNYLA

SEQ ID NO: 17793 - DNA, 2295 bp, Oryza sativa subsp
  CDS (1)..(2295)
atgaactcgcagaagaagcgcagccccaagatcgagcccttccggcaccgcgtggatgcggacccaaagtccttcgacaaatcgtggaagaagctcgaggacgccatccgcgagatttacaaccacaacgccagcggcctctccttcgaggagctgtacaggactgcttataacttggttcttcacaagcatggtctgaagctatatgataaactcacagagaatttaaaaggacacctgaaagaaatgtgcagatcaataggggatgcccaaggtagtttgtttctggaggaactgcagagaagatgggctgatcacaataaggcactacaaatgatcagagatatactcatgtatatggataggacatttattacaactaacaaaaagacacctgtctttgaccttggtctagagttgtggagagatatcgttgtccgcgctcccaaaattcatgggaggttgcttgacacactccttgaactcattcatagagagaggatgggtgagatgataaacagaggtctgatgaggagtaccaccaaaatgttgatggatctagggtcttctgtctatcatgatgactttgagaagccattccttgaggtatccgcaagtttctatagtggtgagtcacaacagttcattgagtgctgtgattgtggcgaatatctcaagaaagctgagagacggcttgctgaagagttggagcgtgtttctcagtatatggatgccaaaactgcagacaaaataactagtgttgtggacactgagatgcttgcaaatcacatgcagcggttgattcttatggagaattctggtcttgtgaatatgcttgttgatgacaaacatgaagaccttagcaggatgtacaacttgtttaaacgtgttcctgatgggcattcaacaattagatctgtgatggcctctcatgttaaggaaagtggaaaggcattggtatctgacccagagaagataaaggaccctgttgagtttgtccagcgtcttctaaatgagaaagacaagtatgatgagatcataagtatttcattcagcaatgacaaggctttccaaaatgctctgaattcctccttcgagaatttcatcaacttgaacaaccgatctcctgaattcatttcgctgtttgttgatgacaagctccggaaaggggtgaaaggggccaatgaagaggatgttgaaactgtcttggacaaggtgatgatgctcttcagatatttgcaggagaaagatgtttttgagaaatattacaagcaacacttggccaaacgtcttctatctgggaaaactacttctgatgaagctgagaggagtatgcttgtgaagctgaagacggaatgtggctaccagtttacgtcaaaattggaaggcatgttcaatgatctaaagacatcgcatgatactatgcaaagtttttatgctaatctctctggtgatactgatagcccaacaatatcagtccagatactcaccactgggtcttggccaacacagccatgtaccccctgcaaacttccacctgaaattgttgatatatctgagaaattccgggcattctaccttggcacccacaatggcaggagattgacatggcaaacaaacatggggaatgcagatatcaaagcaacgttcggaggccgcaggcatgagttgaatgtctcgacatatcagatgtgtgtcctgatgctgtttaattcagcagatggcttgacttacggtgacattgagcaggccacaggtataccacatgctgatctgaaacgctgcctccagtctcttgcttgtgttaagggtaagaatgtgctgcggaaggaacccatgagcaaggatatatctgaagatgacactttctactacaatgacaagttcacaagcaagttggtcaaggtgaagattggcaccgtggttgctcagaaagaaacagaaccagagaagttggaaactcgccagagagttgaggaagacaggaaacctcaaattgaggctgcaattgtcagaatcatgaagtccagaagagtcttggaccacaatagcataatcacggaggtgacaaagcagcttcaatcgcgctttttgccaaatcctgttgtgataaagaaaagaatagagtccctgatcgagagggagttcttggagagggacaagttgcattttgcgcttgatattggtcagtttttttggccaacctgttcttgttcgaagatgtggtattcagtctggcgtgcctttgctgctgtcagttttcgcatgggtacaggaaatgttgaaggaaaataa

SEQ ID NO: 17794 - protein, 764 aa, Oryza sativa subsp
MNSQKKRSPKIEPFRHRVDADPKSFDKSWKKLEDAIREIYNHNASGLSFEELYRTAYNLVLHKHGLKLYDKLTENLKGHLKEMCRSIGDAQGSLFLEELQRRWADHNKALQMIRDILMYMDRTFITTNKKTPVFDLGLELWRDIVVRAPKIHGRLLDTLLELIHRERMGEMINRGLMRSTTKMLMDLGSSVYHDDFEKPFLEVSASFYSGESQQFIECCDCGEYLKKAERRLAEELERVSQYMDAKTADKITSVVDTEMLANHMQRLILMENSGLVNMLVDDKHEDLSRMYNLFKRVPDGHSTIRSVMASHVKESGKALVSDPEKIKDPVEFVQRLLNEKDKYDEIISISFSNDKAFQNALNSSFENFINLNNRSPEFISLFVDDKLRKGVKGANEEDVETVLDKVMMLFRYLQEKDVFEKYYKQHLAKRLLSGKTTSDEAERSMLVKLKTECGYQFTSKLEGMFNDLKTSHDTMQSFYANLSGDTDSPTISVQILTTGSWPTQPCTPCKLPPEIVDISEKFRAFYLGTHNGRRLTWQTNMGNADIKATFGGRRHELNVSTYQMCVLMLFNSADGLTYGDIEQATGIPHADLKRCLQSLACVKGKNVLRKEPMSKDISEDDTFYYNDKFTSKLVKVKIGTVVAQKETEPEKLETRQRVEEDRKPQIEAAIVRIMKSRRVLDHNSIITEVTKQLQSRFLPNPVVIKKRIESLIEREFLERDKLHFALDIGQFFWPTCSCSKMWYSVWRAFAAVSFRMGTGNVEGK

SEQ ID NO: 17795 - DNA, 2049 bp, Oryza sativa subsp
  CDS (1)..(2049)
atggcggggcaggagcggaggacgatcgatctggaggagggatgggcgttcatgcagaagggcatcaccaagctgaagaacatcctcgagggcaagcccgagccgcagttcagctccgaggactacatgatgctctacacgacgatatacaacatgtgcacgcagaagccgccgcacgactactcgcagcagctctacgacaagtaccgggagtcattcgaggagtacatcacctccatgatataccaagaaatcaaaggacaagttaaaggtgcagtgatagctctgattgacaaagagcgtgaaggcgaacagatagacagggccctgctgaagaatgtcctgggcatatttgttgaaattggactaggtagtatggaatgttatgagaatgactttgaagatttcttgcttaaggatactacagattactactctctcaaggctcaaagctggattctcgaggactcttgtcctgattacatgataaaggctgaggagtgcttgaagaaagagaaggagcgagttggtcactacttgcatattagtagtgaacagaagttactggagaaagtgcaaaatgaattgcttgcacaatatgcaactcccctgttggagaaggagcattctgggtgttttgcattgcttcgtgatgacaaggaggaagacctttctaggatgtacaggctcttctccaaaattaaccgtggtctagaacctattgctaacatgtttaaaacgcatgttacaaatgagggcacagccttggtcaagcaagcagaagattctgctagtaataagaagcccgagaaaaaggacatggttggtatgcaggaacaggtttttgtctggaaaatcattgagctccatgacaagtatgtagcttatgtcacagaatgtttccagggtcacaccctctttcataaggcccttaaagaagcattcgaggtcttctgtaacaagggtgtctctggcagttcaagtgctgaactgcttgccaccttctgtgacaatattctgaagaaaggttgcagtgaaaagctcagtgatgaagccatcgaagatgctcttgagaaggtggtgcgattgcttgcatacatcagcgataaagacctctttgctgagttttacaggaaaaaacttgcaaggagattgctttttgataagagtgccaatgatgaacatgaaagaagcatacttaccaaactcaagcagcagtgtggtggacaatttacttctaaaatggagggaatggttactgatcttactgttgcaagggaccatcaaactaagtttgaagagtttgtggctgcacatcaggagttgaatcctgggatagacttggctgtcactgttttgacaacaggattctggccaagttacaagactttcgatattaaccttcctgctgagatggtgaaatgcgtggaggttttcaaggagttttaccaaacaagaacaaaacacagaaagcttacctggatatattccttgggaacctgcaatatcaatgcaaagtttgaggcaaaaactattgagctcattgtcacaacatatcaggctgcgttgctgctgctattcaacggatctgacaggcttacttattctgagattgtaacacagctaaacttatcagatgatgatgtagtgcgtttgctccattctctctcctgtgcaaaatacaagattcttaacaaggaaccagctaatagatctatttctcccaacgatgtttttgagttcaattcaaaattcactgacaggatgagaagaattaagatacccctacctcctgttgatgaaaagaaaaaggttgtcgaagatgttgacaaggacaggcggtatgcaattgatgcatcgattgtgcgcattatgaagagtcgcaaagttatgggccatcagcagctagttgcggaatgtgtggagcagctcagccgcatgttcaagcctgacttcaaagccatcaagaagcgaatcgaggacctcatcacaagggattacctggaacgcgagaaggacaacgctaatgtgtacagatacctggcttga

SEQ ID NO: 17796 - protein, 682 aa, Oryza sativa subsp
MAGQERRTIDLEEGWAFMQKGITKLKNILEGKPEPQFSSEDYMMLYTTIYNMCTQKPPHDYSQQLYDKYRESFEEYITSMIYQEIKGQVKGAVIALIDKEREGEQIDRALLKNVLGIFVEIGLGSMECYENDFEDFLLKDTTDYYSLKAQSWILEDSCPDYMIKAEECLKKEKERVGHYLHISSEQKLLEKVQNELLAQYATPLLEKEHSGCFALLRDDKEEDLSRMYRLFSKINRGLEPIANMFKTHVTNEGTALVKQAEDSASNKKPEKKDMVGMQEQVFVWKIIELHDKYVAYVTECFQGHTLFHKALKEAFEVFCNKGVSGSSSAELLATFCDNILKKGCSEKLSDEAIEDALEKVVRLLAYISDKDLFAEFYRKKLARRLLFDKSANDEHERSILTKLKQQCGGQFTSKMEGMVTDLTVARDHQTKFEEFVAAHQELNPGIDLAVTVLTTGFWPSYKTFDINLPAEMVKCVEVFKEFYQTRTKHRKLTWIYSLGTCNINAKFEAKTIELIVTTYQAALLLLFNGSDRLTYSEIVTQLNLSDDDVVRLLHSLSCAKYKILNKEPANRSISPNDVFEFNSKFTDRMRRIKIPLPPVDEKKKVVEDVDKDRRYAIDASIVRIMKSRKVMGHQQLVAECVEQLSRMFKPDFKAIKKRIEDLITRDYLEREKDNANVYRYLA

SEQ ID NO: 17797 - DNA, 1989 bp, Oryza sativa subsp
  CDS (1)..(1989)
atgagttccaggaagaagccgtcgaggatcgagccgttcaggcacaaggtggagacggacccgaggttcttcgagaaggcgtggaggaagctcgacgacgccatccgcgagatctacaaccacaacgccagcggcctctccttcgaggagctctacaggactgcttataatctggtacttcacaaacatgggccaaagctctatgacaaactgacagaaaacatggaagatcacctgcaagaaatgcgcgtatcgattgaggctgctcaaggtggtttgttcttggtagaactacagaggaaatgggatgaccataacaaggctttgcaaatgatcagagatatcctgatgtacatggacagggtttttattcccaccaataaaaagacacctgtatttgatcttggattggatctttggagagatactattgttcggtcacccaagatccatggaaggttgcttgacactcttcttgatctcatacatagagagagaacaggtgaggtgataaacagatccttgatgaggagtacaactaaaatgttgatggatctaggttcttctgtttatcaggatgattttgaaaggccattccttgaggtgtctgctagtttttatagtggtgagtcacaaaaattcatagagtgttgttcctgtggtgaatatcttaagaaggctcagcagcggcttgatgaagaagcggaacgtgtttcacagtacatggatgccaaaacagacgagaaaataactgctgttgtggtgaaggaaatgcttgcgaatcacatgcagaggttgattcttatggagaactcaggtcttgttaatatgcttgtggaggacaagtatgaagacctgaccatgatgtacagcttgtttcaacgtgttcccgatggtcactcgacaattaaatctgtgatgaattcacatgttaaagaaaccgggaaggatatggtaatggatcctgagaggctgaaggaccctgttgattttgtccagaggcttctaaatgagaaggataagtacttgcaagaaaaagatttgtttgagaaatactacaagcaacacttggcgaagcgccttctttctgggaaggctgcttctgatgattctgagagaagtatgcttgtgaagctcaagacagaatgtggatatcagttcacttcaaaattggagggcatgttcaatgatttgaagacctctcatgataccacacagcgattttacgctggtactcctgatttgggggatgcccctactatatctgtccagatactcaccactgggtcttggcccacacaaccatgtaacacctgcaaccttcctcctgagattcttggcgtgtccgagatgtttcggggtttctaccttggtacccacaatggcaggagactgacatggcaaacaaacatgggtactgcagacatcaaagcagtgtttggaaatggcagcaagcacgagctaaacgtgtcgacctaccagatgtgtgttctcatgttgttcaactcggcggactgtttgtcttaccgtgatatcgagcagactacagcgataccatccgcggacctgaagcgctgccttcagtctctcgcgcttgtgaagggcaagaacgttctgcgcaaggaacctatgagcagggacatctccgacgatgacaacttctacgtcaacgataagttcaccagcaagctgttcaaggtgaagatcggcacggtggcgacacagaaggagtctgagccagagaagatggagacccggcagagagtcgaggaggacaggaagcctcagatcgaggcggccatcgtgaggatcatgaagtcgaggagagtgctggatcacaacagcatagtgacagaggtgacgaagcagctgcagcctcgtttcatgccgaaccctgtggtgatcaagaagagagtcgagtctctgattgagcgcgagttcttggagagggacaagacagacaggaaactgtaccggtatcttgcataa

SEQ ID NO: 17798 - protein, 662 aa, Oryza sativa subsp
MSSRKKPSRIEPFRHKVETDPRFFEKAWRKLDDAIREIYNHNASGLSFEELYRTAYNLVLHKHGPKLYDKLTENMEDHLQEMRVSIEAAQGGLFLVELQRKWDDHNKALQMIRDILMYMDRVFIPTNKKTPVFDLGLDLWRDTIVRSPKIHGRLLDTLLDLIHRERTGEVINRSLMRSTTKMLMDLGSSVYQDDFERPFLEVSASFYSGESQKFIECCSCGEYLKKAQQRLDEEAERVSQYMDAKTDEKITAVVVKEMLANHMQRLILMENSGLVNMLVEDKYEDLTMMYSLFQRVPDGHSTIKSVMNSHVKETGKDMVMDPERLKDPVDFVQRLLNEKDKYLQEKDLFEKYYKQHLAKRLLSGKAASDDSERSMLVKLKTECGYQFTSKLEGMFNDLKTSHDTTQRFYAGTPDLGDAPTISVQILTTGSWPTQPCNTCNLPPEILGVSEMFRGFYLGTHNGRRLTWQTNMGTADIKAVFGNGSKHELNVSTYQMCVLMLFNSADCLSYRDIEQTTAIPSADLKRCLQSLALVKGKNVLRKEPMSRDISDDDNFYVNDKFTSKLFKVKIGTVATQKESEPEKMETRQRVEEDRKPQIEAAIVRIMKSRRVLDHNSIVTEVTKQLQPRFMPNPVVIKKRVESLIEREFLERDKTDRKLYRYLA

SEQ ID NO: 17799 - DNA, 2253 bp, Oryza sativa subsp
  CDS (1)..(2253)
atggcgacccacgagcggaagacgatcgatctggagcaggggtgggagttcatgcagaagggcatcaccaagctgaagaacatcctcgaggggaagcccgaaccccagttcagctccgaggactacatgatgctctacacgacgatttacaacatgtgcacgcagaagccgccgcacgactactcgcagcagctctacgagaagtaccgcgagtccttcgaggagtacatcacgtccatggtcttaccttcattaagagagaaacatgatgagtttatgctgagagagctagtaaaacggtggtcaaaccataaagtgatggttcggtggctatcacgcttcttccattatcttgatcggtactttatttcaaggaggtccctaccacaactaagtgaagttgggcttagctgtttccgggatctggtatatcaagagatcaaaggaaaagtaaaaagtgcggtgatatccttgacatactttctcgaacagatagatcaagaacgtgagggtgaacaaattgatagggccctgttaaagaatgttctggatatatttgttgagattggcttgactagcatggactactacgaaaatgattttgaagatttcttgctcaaagatactgcagactattactctataaaagcccagacctggattcttgaggactcttgtccagattacatgttaaaggcagaggagtgtctgaaaagggagaaagagcgagttgctcattatttgcactccagtagtgaacagaagttgttggagaaagtgcaacatgagttgctaactcaatacgcaagtcagctcctggagaaggagcattctggatgccatgcattgcttcgtgatgacaaggttgatgatctctctagaatgtacaggctcttttccagaataactcgtggtttagaacctgtttctcaaatatttaagcagcatgttactaatgagggcactgccttagtgaagcaagccgaagatgctgctagtaataagaagccagagaagaaggagatagttggtttacaggaacaggtttttgtccggaaaatcattgagcttcatgacaagtatgtagcttatgttacggattgttttcaggggcacactctcttccataaggcacttaaggaggcttttgaagttttttgcaacaaaggtgtttctggcagttcaagtgctgaattactagctaccttctgtgacaatatcttaaagaaaggcggtagtgaaaagcttagtgatgaagcaattgaagatacccttgagaaggttgtaaggttacttgcctacattagtgacaaggacttgtttgctgagttctatagaaagaagcttgcaaggagattgctttttgacaagagtgctaatgatgaacatgagagaagcatccttaccaagctaaagcaacaatgtggagggcagttcacttccaaaatggagggcatggttactgatctcactgtggcaagagatcaccaggctaaatttgaagagttcataagcacacactcagagttgaatcctggaatagccttagctgttactgtcctcacaacaggattttggccaagttacaaatcttttgatataaatctacctgcagaaatggtgaaatgtgtagaggttttcaaggagttttaccaaacaagaacaaaacacaggaaacttacctggatttattcactgggaacctgtaatattaatgctaaatttgaggccaaaactattgagctcattgttacaacttatcaggctgcattgctgctgctgtttaatggagttgatagactcagctattctgagattgtgacacagttaaatctctcagatgatgatgttgttcgattgctccattctctatcttgtgcaaaatacaagattcttagcaaagaaccaaataatagatctatttcaccaaatgatgtcttcgagttcaactcaaagtttactgacaagctgcgaagattaaagatacctcttcctccagttgatgagaagaagaaagtagttgaagatgttgataaggatcgcagatacgcaattgatgcatcaattgtgcgtattatgaagagtcgcaaagtattgggtcatcagcaacttgtgatggaatgtgtggagcagcttggacgcatgtttaagcctgacttcaaggcaataaagaagcgaattgaggatcttatcacaagggattacttggagagggataaagacaacccaaatgtgtacagatacttggcttga

SEQ ID NO: 17800 - protein, 750 aa, Oryza sativa subsp
MATHERKTIDLEQGWEFMQKGITKLKNILEGKPEPQFSSEDYMMLYTTIYNMCTQKPPHDYSQQLYEKYRESFEEYITSMVLPSLREKHDEFMLRELVKRWSNHKVMVRWLSRFFHYLDRYFISRRSLPQLSEVGLSCFRDLVYQEIKGKVKSAVISLTYFLEQIDQEREGEQIDRALLKNVLDIFVEIGLTSMDYYENDFEDFLLKDTADYYSIKAQTWILEDSCPDYMLKAEECLKREKERVAHYLHSSSEQKLLEKVQHELLTQYASQLLEKEHSGCHALLRDDKVDDLSRMYRLFSRITRGLEPVSQIFKQHVTNEGTALVKQAEDAASNKKPEKKEIVGLQEQVFVRKIIELHDKYVAYVTDCFQGHTLFHKALKEAFEVFCNKGVSGSSSAELLATFCDNILKKGGSEKLSDEAIEDTLEKVVRLLAYISDKDLFAEFYRKKLARRLLFDKSANDEHERSILTKLKQQCGGQFTSKMEGMVTDLTVARDHQAKFEEFISTHSELNPGIALAVTVLTTGFWPSYKSFDINLPAEMVKCVEVFKEFYQTRTKHRKLTWIYSLGTCNINAKFEAKTIELIVTTYQAALLLLFNGVDRLSYSEIVTQLNLSDDDVVRLLHSLSCAKYKILSKEPNNRSISPNDVFEFNSKFTDKLRRLKIPLPPVDEKKKVVEDVDKDRRYAIDASIVRIMKSRKVLGHQQLVMECVEQLGRMFKPDFKAIKKRIEDLITRDYLERDKDNPNVYRYLA

SEQ ID NO: 17801 - DNA, 2163 bp, Oryza sativa subsp
  CDS (1)..(2163)
atgaatatgtcgccgcgcattccggtggtggacctcgaggacgggtggcgcgacgtgctcgccggcgtcgccaagctcaagtgcatcctcgatggctccaacgtcgtgcacttcgtccccgacgagtacatgcacctctacacgacggtttacaacatgtgcacgcagaagccgccgaacgactactcgcaggtgctctacgatcgctacaagcaggccctggacgatcacatcgaatccgtcgtgttgccctccttgaatgagaagcatggcgtgttccttctgagggaaatagtgcagaggtgggagaaacacaagctaatggtaaggtggctgaggaggttctttgactacctcgatcgttactatgttacacggaggtcccttgattcactcaaagatctgggctggagtagcttccgggatttggttttcgataagctcaaaagtactgtggcaacaattatgattggcatgattgatgatgagagggaaggcaatctaatagaccgtccactcctgaagaatgcccttgatatctatgttgaaattggggatagtcaactgaattattacagtgatgattttgaacaatcatttctcaacggaacaacagattactattctaagaaggcacaaacatggattcttgagaattcttgccctgaatacatgctcaaggctgcactcttcgagttgatagataggcgtgcagaagaaattctgaacaaggagaactccggatgcaaagtgttgctttgtgatgaaaagaccgaggatctagcaaggatgtttaggctcttctctaggataactgacgggctgcttccagtatcgaaaatatttaaggagcatgtcattgctgagggtatgtctctgctgaaacatgcaacagatgctgccaacagcagaaaggatgagaagaagggggtggtggtgggattgccggagcaggattttgtgaggagtgtcatagagctccatgacaaatatatggcatatgtcaccaactgtttccagagcaactcagtatttcacaaggcacttaaggaggcctttgaagttatttgcaacaaagatgttgttggttgcagtagtgctgaactgtttgcggcatactgtgatagtatcttaaaaagaggtggaagtgaaaagctaagtgatgaagctatagatgaaagtcttgagaaggttgtcaagcttctaacatatctcagcgacaaggacctctttgtagagtttcataggaagaaacttggaaggagattgctgtttgataagaatacaaatgacgaacatgagagaatcctactctccaagctgaagcaattcttcgggggacagtttacatcaaaaatggaggggatgctcaaagatattacattggcaaaagaacatcagtcaagttttgaggagtacgtaagcaacaatccagagtcaaatcctctgatagacttgaatgtgactgtcttgacaacaggatactggccaacatacaagaactcagatataaatcttccattggagatggttaaatgcgtggaggttttcaaggaatattatcggtccgacaagcaacacagaaagcttacctggatcttttccttgggaaactgcgtcgtcattggaaattttgatgctaaacctgttgagttcgttctcaacacttatcaggctgcattgttgctgctattcaatgaagctgataaactgagttactctgatattgtgtcacaattaaaactgtctgatgatgatgccgtgcgtttgcttcattcgctttcttgtgcaaagtataagattctcaacaaagagcctagcaacagagtgatttctccagaggacgagtttgagttcaattccaaatttaccgataggatgcgaaggattaaggtaccacttcctcaaatcgatgagaagaaaaaggttgtcgatgatgtcaacaaggacaggaggttcgcaattgatgcatctcttgtgcgcatcatgaaaagccgcaaagttctgggccatcagcaacttgtagcggaatgcgtggagcagctcagccgcatgtttaagcctgacatcaagatcatcaagaggaggatcgaggatcttatcagcagggagtacttggagcgtgattcggagaatgcccagacctacaaatacttggcttga

SEQ ID NO: 17802 - protein, 720 aa, Oryza sativa subsp
MNMSPRIPVVDLEDGWRDVLAGVAKLKCILDGSNVVHFVPDEYMHLYTTVYNMCTQKPPNDYSQVLYDRYKQALDDHIESVVLPSLNEKHGVFLLREIVQRWEKHKLMVRWLRRFFDYLDRYYVTRRSLDSLKDLGWSSFRDLVFDKLKSTVATIMIGMIDDEREGNLIDRPLLKNALDIYVEIGDSQLNYYSDDFEQSFLNGTTDYYSKKAQTWILENSCPEYMLKAALFELIDRRAEEILNKENSGCKVLLCDEKTEDLARMFRLFSRITDGLLPVSKIFKEHVIAEGMSLLKHATDAANSRKDEKKGVVVGLPEQDFVRSVIELHDKYMAYVTNCFQSNSVFHKALKEAFEVICNKDVVGCSSAELFAAYCDSILKRGGSEKLSDEAIDESLEKVVKLLTYLSDKDLFVEFHRKKLGRRLLFDKNTNDEHERILLSKLKQFFGGQFTSKMEGMLKDITLAKEHQSSFEEYVSNNPESNPLIDLNVTVLTTGYWPTYKNSDINLPLEMVKCVEVFKEYYRSDKQHRKLTWIFSLGNCVVIGNFDAKPVEFVLNTYQAALLLLFNEADKLSYSDIVSQLKLSDDDAVRLLHSLSCAKYKILNKEPSNRVISPEDEFEFNSKFTDRMRRIKVPLPQIDEKKKVVDDVNKDRRFAIDASLVRIMKSRKVLGHQQLVAECVEQLSRMFKPDIKIIKRRIEDLISREYLERDSENAQTYKYLA

SEQ ID NO: 17803 - DNA, 2235 bp, Oryza sativa subsp
  CDS (1)..(2235)
atggcggggcaggagcggaggacgatcgatctggaggagggatgggcgttcatgcagaagggcatcaccaagctgaagaacatcctcgagggcaagcccgagccacagttcagctccgaggactacatgatgctctacacgacgatatacaacatgtgcacgcagaagccgccgcacgactactcgcagcagctctacgacaagtaccgggagtcattcgaggagtacatcacctccatggtcttaccttcattaagagataaacatgacgagtttatgctgagggaactagtaaagaggtggtcaaaccataaaatcatggttcggtggctgtcacgtttcttcttttatcttgatcgatacttcatctcacggaggtcgcttataccacttgaacaagttgggcttacttgcttccgagatttgatataccaagaaatcaaaggacaagttaaaggtgcagtgatagctctgattgacaaagagcgtgaaggcgaacagatagacagggccctgctgaagaatgtcctgggcatatttgttgaaattggactaggcagtatggaatgttatgagaatgactttgaagatttcttgcttaaggatactacagattactactctctcaaggctcaaagctggattctcgaggactcttgtcctgattacatgataaaggctgaggagtgcttgaagaaagagaaggagcgagttggtcactacttgcatattagtagtgaacagaagttactggagaaagtgcaaaatgaattgcttgcacaatatgcaactcccctgttggagaaggagcattctgggtgttttgcattgcttcgtgatgacaaggaggaagacctttctaggatgtacaggctcttctccaaaattaaccgcggtctagaacctattgctaacatgtttaaaacgcatgttacaaatgagggcacagccttggtcaagcaagcagaagattctgctagtaataagaagcccgagaaaaaggacatggttggtatgcaggaacaggtttttgtctggaaaatcattgagctccatgacaagtatgtagcttatgtcacagaatgtttccagggtcacaccctctttcataaggcccttaaagaagcattcgaggtcttctgtaacaagggtgtctctggcagttcaagtgctgaactgcttgccaccttctgtgacaatattctgaagaaaggttgcagtgaaaagctcagtgatgaagccatcgaagatgctcttgagaaggtggtgcgattgcttgcatacatcagcgataaagacctctttgctgagttttacaggaaaaaacttgcaaggagattgctttttgataagagtgccaatgatgaacatgaaagaagcatacttaccaaactcaagcagcagtgtggtggacaatttacttctaaaatggagggaatggttactgatcttactgttgcaagggaccatcaaactaagtttgaagagtttgtggctgcacatcaggagttgaatcctgggatagacttggctgtcactgttttgacaacaggattctggccaagttacaagactttcgatattaaccttcctgctgagatggtgaaatgcgtggaggttttcaaggagttttaccaaacaagaacaaaacacagaaagcttacctggatatattccttgggaacctgcaatatcaatgcaaagtttgaggcaaaaactattgagctcattgtcacaacatatcaggctgcgttgctgctgctattcaacggatctgacaggcttacttattctgagattgtaacacagctaaacttatcagatgatgatgtagtgcgtttgctccattctctctcctgtgcaaaatacaagattcttaacaaggaaccagctaatagatctatttctcccaacgatgtttttgagttcaattcaaaattcactgacaggatgagaagaattaagatacccctacctcctgttgatgaaaagaaaaaggttgtcgaagatgttgacaaggacaggcggtatgcaattgatgcatcgattgtgcgcattatgaagagtcgcaaagttatgggccatcagcagctagttgcggaatgtgtggagcagctcagccgcatgttcaagcctgacttcaaagccatcaagaagcgaatcgaggacctcatcacaagggattacctggaacgcgagaaggacaacgctaatgtgtacagatacctggcttga

SEQ ID NO: 17804 - protein, 744 aa, Oryza sativa subsp
MAGQERRTIDLEEGWAFMQKGITKLKNILEGKPEPQFSSEDYMMLYTTIYNMCTQKPPHDYSQQLYDKYRESFEEYITSMVLPSLRDKHDEFMLRELVKRWSNHKIMVRWLSRFFFYLDRYFISRRSLIPLEQVGLTCFRDLIYQEIKGQVKGAVIALIDKEREGEQIDRALLKNVLGIFVEIGLGSMECYENDFEDFLLKDTTDYYSLKAQSWILEDSCPDYMIKAEECLKKEKERVGHYLHISSEQKLLEKVQNELLAQYATPLLEKEHSGCFALLRDDKEEDLSRMYRLFSKINRGLEPIANMFKTHVTNEGTALVKQAEDSASNKKPEKKDMVGMQEQVFVWKIIELHDKYVAYVTECFQGHTLFHKALKEAFEVFCNKGVSGSSSAELLATFCDNILKKGCSEKLSDEAIEDALEKVVRLLAYISDKDLFAEFYRKKLARRLLFDKSANDEHERSILTKLKQQCGGQFTSKMEGMVTDLTVARDHQTKFEEFVAAHQELNPGIDLAVTVLTTGFWPSYKTFDINLPAEMVKCVEVFKEFYQTRTKHRKLTWIYSLGTCNINAKFEAKTIELIVTTYQAALLLLFNGSDRLTYSEIVTQLNLSDDDVVRLLHSLSCAKYKILNKEPANRSISPNDVFEFNSKFTDRMRRIKIPLPPVDEKKKVVEDVDKDRRYAIDASIVRIMKSRKVMGHQQLVAECVEQLSRMFKPDFKAIKKRIEDLITRDYLEREKDNANVYRYLA

SEQ ID NO: 17805 - DNA, 2344 bp, Solanum lycopersicum
  CDS (344)..(2191)
aagaaagctacccctcctcagcctgctaagaaactcgtaattaagctccttaaagcgaaacctacgttgccgacaaactttgaggaaaatacttgggcaactctaaagtcagctattagtgcgatatttttgaagcagcctgatccatgtgatttagaaaagctttatcaggctgtaaatgacctttgtctgcacaaaatgggaggaaatctatatcaacgaattgaaaaagagtgtgaatcacacatagctgcagctctacgttctttagttggccaaagttgaagatcttgtagttttcttgtcgcttgttgagaggtgttggcaggatttttgtgatcagatgttgatgattcgtggaatagctttgtatcttgatagaacatatgtgaaacaaaccccaaatgtgcgttcactgtgggatatgggcttgcagcttttccgcaagcatctctctcttgcctcagaagtagaacacaaaactgtttttggcctccctacagatgattggaccgaaagattaggtgaggcagttgatcgaactctgcttaaccatcttttgaagatgttcactgccttggggatttatgctgaaagttttgaaaagccatttcttgagcgtacttctgagttttatgctgctgaaggtgtcaaatacatgcagcagtcagatgttccagattacctgaagcatgtggaggtaaggttacatgaagaacatgacaggtgcttactctacctggatgcaagtactagaaaaccactgatagcaactgcagagaggcaacttttagaacaacacatttctgcaattcttgataagggtttcacagtgttgatggatggtaatcgtattgaagatctccaaaggatgtatatgctattttgcagggtcaatgatctcgaatctttaaggcaagcacttagctcatatatccgaagaactggtcagagcattgtgctagatgaagagaaagacaaagatatggtacccagcctcttggaatttaaggcatctcttgataccatatgggaagaaagcttttctaagaatgaagcttttagtaacactatcaaggatgcatttgagcatttcataaacatccgccagaatcgacctgctgagctgattgctaagtttttggacgagaagcttcgtgctggcaataaaggtacatcagaggaggaattggaggggacattagataaagtcctggttttgttcaggtttatacagggtaaggatgtatttgaagcattctacaagaaggatcttgcaaaaagactgttgttgggtaagagtgcgtcaattgatgctgaaaagtccatgatttctaagttgaagaccgagtgtggcagccagttcaccaacaaattggaaggaatgttcaaggacattgaattatcaaaagagataaatgaatccttcaagcaatcttcccaagccagaacaaagctcccaacagggattgagatgagtgtccacgttctgacaatggggtactggccgacctatccccccatggatgttcgacttccccacgaactcaatgtctatcaggatattttcaaagagttctacttaagcgagtacagtggtaggcgtttgatgtggcaaaattcattgggccactgcgttctggaaagctggaatatccaaaaggaaaaaaggagctcgcagtttctcttttccagactgttgttttgtgctcttttaatgatgcggaaaatcttagcttcccaagatattaaggaagcaactggaattttgaggataaagagcgagaaggactctacagtctcttgcatgtggaaaagttcgtgttctccagaagattccaaaaggaagagatgtggaggattatgtacctttgtgtttttatatcaatttactgctccactatatcgtataaaggtaaatgccatccagatgaaggaaacagttgaggagaacacaagcactactgagagagtatttcaggaccggcagtaccaggttgatgctgctattgttaggataatgaagaccagaaaagtgctgagtcataccctcttaataactgaactctttcagcagcttaaattccccaataaaaccagctatctgaagaaaaggattgaaagcctcatagatagggagtacctggaacgggacaaaaacaatcctcaaatatacaactaccttgcttagaatgttcccagacatctatattttttttttccatgtaaatgactcgggagacttccttgtcagcttctgtacagttgactttgtaaccattaattttgttgtcatatacattgtagagtttatatttaagtttaaaaaaaaaaaaaaaaaaaa

SEQ ID NO: 17806 - protein, 615 aa, Solanum lycopersicum
MLMIRGIALYLDRTYVKQTPNVRSLWDMGLQLFRKHLSLASEVEHKTVFGLPTDDWTERLGEAVDRTLLNHLLKMFTALGIYAESFEKPFLERTSEFYAAEGVKYMQQSDVPDYLKHVEVRLHEEHDRCLLYLDASTRKPLIATAERQLLEQHISAILDKGFTVLMDGNRIEDLQRMYMLFCRVNDLESLRQALSSYIRRTGQSIVLDEEKDKDMVPSLLEFKASLDTIWEESFSKNEAFSNTIKDAFEHFINIRQNRPAELIAKFLDEKLRAGNKGTSEEELEGTLDKVLVLFRFIQGKDVFEAFYKKDLAKRLLLGKSASIDAEKSMISKLKTECGSQFTNKLEGMFKDIELSKEINESFKQSSQARTKLPTGIEMSVHVLTMGYWPTYPPMDVRLPHELNVYQDIFKEFYLSEYSGRRLMWQNSLGHCVLESWNIQKEKRSSQFLFSRLLFCALLMMRKILASQDIKEATGILRIKSEKDSTVSCMWKSSCSPEDSKRKRCGGLCTFVFLYQFTAPLYRIKVNAIQMKETVEENTSTTERVFQDRQYQVDAAIVRIMKTRKVLSHTLLITELFQQLKFPNKTSYLKKRIESLIDREYLERDKNNPQIYNYLA

SEQ ID NO: 17807 - DNA, 2439 bp, Ostreococcus tauri
  CDS (1)..(2439)
atgacggatcgtcgacccgtggcgctggaggagggatggggacggatgcaggatggtatcatgaaactgagacgtatccttgacacggacgacgccgagccgtttacgtcggaggagtacatgaacctgtacacgtacgtctcgaaatcggcagggagacccgaaatccatgacacgagtgatgacgatataccatacagtgattcacacttcagtctgaacactcttgtggactacttttcagccttgtctgacgcgtcgtcgggtttctggttacaactccggagcgccgcgcttcgcgtgacttcatcgtttaatttgtgcactcgtagtaccatttacaacatgtgcacgcaaaaggcgccgtacgacttctcagagcagttgtacgagcgttacgaggcggcctttaaccagtacatcaatgcaaaggttttgccaacgctcgtggaaaagaagggtgagtacatgctgaagagtctggtgatgcgatgggagaaccacaagataatggttcgatggctgtcgaagtttttcaactatctcgaccgatactacgttcagcgtcatcatttccctcccctcaaggatgtcggggtgaattgctttcgtcggctcgtgtacgacgagatcaagttgagcgtgaagacggcggtgctcgagctcatcgacaaggagcgggagggagaaaagacggacaggacgttgattaagaatattacgtcgatttttgtcgaaatgggtttggggacgatggacgcgtaccaaaatgatttcgaagcggatttgttggcacacactgcgtctttctattcgcgcaaggctttgcagtggatcgcagaggactcctgtccggcttaccttatcaaggcggaagagtgtctgaacagcgagcgcgagcgagtgcagctttacttgcatcaaactaccgaatccaagctgatttcgaaggtggagcaacaactgctcgagcagtatgaaaatgagttactggagaaggagaatagcggatgtgcggcactcttagtcgaagacaaaacggaagatttggctcgcatgtaccgcctcttccgtgctgtaccaagcggcttgaagccgatagctgaaattttcaaggctcacgtgaagaaggatggaatgaacttagtgagcgtcgccgagcagacggcgtcaaacatgaagagcaagaagccggacaaggacgcggcatccacatccgtggagcaggtattcactcgcagtgcgatcgaactatacgacaagtacagcacgtacgtaaacgaatgtttcgacagcagtgctttattcaatcgtgctttgacggaggctttcgagaacttctgcaacaagggaatcgccgggaactccaccgcgcagcttctggccgatttctcggacaaactgttgcgtaagggtgggagtgagaagctgagcgatgaaaagatggaggaaaccttagaaaaggtcgtcaaactcttggcttttattagcgataaggacatgtttggagagttctaccgcaaaaagctcgccagacgtctgttgacggacagctcagcgagtcaggattacgagcgttcaattttgagcaaactcaagacacagtgcggagcgcaattcactggtaaaatggaaggaatgttaaacgatttgcaatccgcgcgggagacgcaagatacctttgaacggtggatggaggaggatgcggcgaaccgtaagccccctctcgatttctcagtcaccatcttgactcacggcttctggccccagcacaaacccgtggagttccagctgaacgatgagttggcgaagtgcgtggacaccttcagaagcttctatgataaacgcatgggacagcgtaaattgacgtggatccatcatctcggaacggctaccgtggttggtaagtttgagaccaagtccattgagatgctcatgcaaaccactcagtgcgcagttttgctactcttcggagccaagacggagctgacgatgcagaacgtgatcgatttgacaaaattaccccccgacgacgccaaacgcgctctgtactctctatcttgtgcgaagtacaaaattctgaacaagtctccagagggcaagacaatcggaccggatgacgtcttcgcgttcaatgaaaagttcacggatagatcgagacgcattaaaataggactaccgcccgtagacgagaagaaggtcactatcgagcacgtcgagcacgatcggcgccacgcgatcgatgcggcaatcgttcgaacgatgaaggcgagaaaatctctggcgtacaaccaactcatcattgaagtcgtgtctcaactcaaacagaagttcgttcctgagccgaaacaaatcaagattcgagtcgaagagctcattaacaaggagttcatcgagcgcgacaaggagaatccacaggttttcaaatacatggcataa

SEQ ID NO: 17808 - protein, 812 aa, Ostreococcus tauri
MTDRRPVALEEGWGRMQDGIMKLRRILDTDDAEPFTSEEYMNLYTYVSKSAGRPEIHDTSDDDIPYSDSHFSLNTLVDYFSALSDASSGFWLQLRSAALRVTSSFNLCTRSTIYNMCTQKAPYDFSEQLYERYEAAFNQYINAKVLPTLVEKKGEYMLKSLVMRWENHKIMVRWLSKFFNYLDRYYVQRHHFPPLKDVGVNCFRRLVYDEIKLSVKTAVLELIDKEREGEKTDRTLIKNITSIFVEMGLGTMDAYQNDFEADLLAHTASFYSRKALQWIAEDSCPAYLIKAEECLNSERERVQLYLHQTTESKLISKVEQQLLEQYENELLEKENSGCAALLVEDKTEDLARMYRLFRAVPSGLKPIAEIFKAHVKKDGMNLVSVAEQTASNMKSKKPDKDAASTSVEQVFTRSAIELYDKYSTYVNECFDSSALFNRALTEAFENFCNKGIAGNSTAQLLADFSDKLLRKGGSEKLSDEKMEETLEKVVKLLAFISDKDMFGEFYRKKLARRLLTDSSASQDYERSILSKLKTQCGAQFTGKMEGMLNDLQSARETQDTFERWMEEDAANRKPPLDFSVTILTHGFWPQHKPVEFQLNDELAKCVDTFRSFYDKRMGQRKLTWIHHLGTATVVGKFETKSIEMLMQTTQCAVLLLFGAKTELTMQNVIDLTKLPPDDAKRALYSLSCAKYKILNKSPEGKTIGPDDVFAFNEKFTDRSRRIKIGLPPVDEKKVTIEHVEHDRRHAIDAAIVRTMKARKSLAYNQLIIEVVSQLKQKFVPEPKQIKIRVEELINKEFIERDKENPQVFKYMA

SEQ ID NO: 17809 - DNA, 2244 bp, Ostreococcus tauri
  CDS (1)..(2244)
atgtcgtcgagccggcgcggtgatcactcgcgctcggcgacgggcgaaccgtcgacgcgatcgaacgacgggcgacgaagcgcgcacggtgcgcccgggaccgcgcgcgggctgacgataaaaccattcaagcgcgcgccgacggtgccgacggagttcgcgacgcgggcgcgggagacgctgcgagaggcgatacgacgggtgcaggcgaaggaggtgacgggggtgagtcacgaggctttgtatcgacacgtggagaatctgtgcgtgcacagacgggcggcggaggcgttcgaggattttcagtcgggggcggatcgacgggcgagagaggtcttgcggggattggagggacggaaaattgaggattcaggggttttcttgacgaaattcgatgagacgtggggggattattgcgcccaggcgttgacgctgcggtcaatctttttgtatctcgaccgcgcgcaggcgaacggaggcgggaaatcgtcgacgctctgggacgtgtcgctgcgcgttttccacgagcatctcgagggaacggcgaagagcgtgaagggtaaggttgtcaggggcttactcgatctcgtcgagcgagagcggatgggggagaagattgatagggcgctcgcgaagcgcgttttgcgagcgctgagcgcgctcggggtgtatcaagaggcgtttgaaaacgtcttcatagaggcgagtcaggagttctatcgcaaggaagggaacgagtactcggtacagacggacgtgtcggattacctgaagcactgcgaacggaggctcgaggaggaggcggagaggcgctcatgcggacgtgcgagccaaggtttgatagaggcacacatcggagacatcttagacaaggggttcgtcgatctcatgcgtcagcatcgactggaggatttgcggcgcctgcactcgcttctcgctcgaatggatggtttggcccgtctgtgcagcgcgttcgtgacgtacctcaagcagcagggcacggctattgtgaaagacgaggcgcgcgataaggacatggtggatcgattactgacgatgaagaccgccgtggacgaggtcgtgagcaaatctttcggtcgaaccatcgcggacggatccaatgacattttcatcaacggtgtcaaggagtcgttcgagtcattcatcaactgtcgacaaaatgtccctgcggagctgatcgcaaaatacattgattcaaagctgaaaagcgggagtaaaggactgagtgaagaggagttggagagaactttagataaggcgctaacattgttcagatacatcgtcggaaaggatgttttcgaagtgttttacaagaaggagctctcgaagcgtcttttgcacggcaagagcgcgagcatcgacgcggagaggagcatgatccaaaagttgaaggcggagtgtggcagtcagttcacgcaacatctggaaggaatgttcaaggatatcgatctgagtcgcgaaatcatgcaatcgtttcgacagacgttcgagaacgacccaatcatagagatgaatgtcaatgtcataactgcggggtgctggccgtcgtacccatcagtcgacgtcaagctcccagaggagctggcgaatttgcaagagaagttcatgagtttctacctcggtaaacattcagggcgaaagttaacgtggcaaaactcggagggtcactgcgtcctcaaggcgcgcttcgacggaggaatgaaggaactcagtgtctccctctttcagtgcgtcatcctgatgctgttcaacgactccaagaagctctcgtacacggagattgcgcagaagactgggatggaagagaaggaacttaaacgtgctcttcagtcactggcttgcgccaaggttcgaatcctgaacaaggagccaaaatcgcgcgagatcaacgacgatgattctttcgaggtgaacactgcgctgaacgagcgtctgttccgcatcaaggtcaactccatccaagtcaaggaaacggccgaggagaacaagcagaccatggagcgggtgttccaagatcgccaacaacagatagacgccgctatcgttcgcgtgatgaagacgaggaagtcgctcacgcatgcgctcctcatctctgaactcatggcgcagctcaagtttcccaccaaggcgagcgatttgaagaagcgtatcgagagtctcatcgagcgagagtacctcgagcgcgaccgcgaagatgcgcagacgtataactacctcgcttaa

SEQ ID NO: 17810 - protein, 747 aa, Ostreococcus tauri
MSSSRRGDHSRSATGEPSTRSNDGRRSAHGAPGTARGLTIKPFKRAPTVPTEFATRARETLREAIRRVQAKEVTGVSHEALYRHVENLCVHRRAAEAFEDFQSGADRRAREVLRGLEGRKIEDSGVFLTKFDETWGDYCAQALTLRSIFLYLDRAQANGGGKSSTLWDVSLRVFHEHLEGTAKSVKGKVVRGLLDLVERERMGEKIDRALAKRVLRALSALGVYQEAFENVFIEASQEFYRKEGNEYSVQTDVSDYLKHCERRLEEEAERRSCGRASQGLIEAHIGDILDKGFVDLMRQHRLEDLRRLHSLLARMDGLARLCSAFVTYLKQQGTAIVKDEARDKDMVDRLLTMKTAVDEVVSKSFGRTIADGSNDIFINGVKESFESFINCRQNVPAELIAKYIDSKLKSGSKGLSEEELERTLDKALTLFRYIVGKDVFEVFYKKELSKRLLHGKSASIDAERSMIQKLKAECGSQFTQHLEGMFKDIDLSREIMQSFRQTFENDPIIEMNVNVITAGCWPSYPSVDVKLPEELANLQEKFMSFYLGKHSGRKLTWQNSEGHCVLKARFDGGMKELSVSLFQCVILMLFNDSKKLSYTEIAQKTGMEEKELKRALQSLACAKVRILNKEPKSREINDDDSFEVNTALNERLFRIKVNSIQVKETAEENKQTMERVFQDRQQQIDAAIVRVMKTRKSLTHALLISELMAQLKFPTKASDLKKRIESLIEREYLERDREDAQTYNYLA

SEQ ID NO: 17811 - DNA, 2430 bp, Ostreococcus tauri
  CDS (1)..(2430)
atggattctccacacagggataaatcaaacgatatacgacgagcgcgcgcgctcgaaccgcacgtctcggcgcacgcgcgcgcgtcgagagcgatgggcgacgatgaagcgatcgagcgcgcgcgcgcggcgtcgacgtccgcgatcgagtcgacggacgcgcgagagcgagacggcgagagcgacggacgcggaagcgcggcgttggggaagcgacgcgccgacgggtcgaccggacgcgcgctcgagccgttcagacatcgcgtgaggcaagatccggagtttgtcgagagcacgctgcgcgcgttgagggatgggacgacgaagctgttgcggttggagacgagcgggttgtcgttcgaggcgctctacggatcggcgtacgcgctcgtgttgagaaagcaaggcgacgcactatacgatgcgatcttcggcgcggtaacggatcatctgtgtcaacacgtcgcgattagcgtcgcgaacgttgcggcggagggagatgtggagttcttgaaggcgctcgagactgggtttttgacccatcggaaagggacgcagatgctcgtcgacgtgttcaactatctcgatcgcgtgcacctgccgaggagtgggaaggcgaacttagagcctgttgggaagctctcaatgactctatggcgcgagtgcgtggtgagaaatccgagaattaagcgacgaatgcgatcgtgcgtgttagatttgattcgtcgagagcgagacggagagcgcattgaccgggatactctgcgacaagtcacggacatgcttcttggtctgggcgagtctgtgtacgtggaggagttcgagtcgaatgttttagaggaaacaagatcgtactacaaggcgttggcgcaaaaacgcatcgatatcgatgattgtccaacgtatctgaagctggcggagactaggatcgaccaagagagggatcggagcgaggcatacatggctcccaccacgaccacgctgctggtcgccgaggtacgtcaacaactcctgaaggaaatgtcacaatcgctcctgcacaacaccacgagcgggatggttcacatgcttcgaacaagtcaacttgatagtttatcttgtctttacaagctgttctccgccatggatgaccttgaggggatccgagacttgatgttcgagcacatcaaggatgttgggaagggcatagtaaacgattcagaaaatgaaaagaatccggcgcagttcgtggaggagctactgaagtacaagggcaagtacgacgacatcttacgtgtggcttttgcgaacagtcgcgtcatcgaatcacagtgcaaccaggcgtaccagtacgtggcaaatttgaacccgaggtcgcccgagtacatgtcgctttacttggatcaggtactgcgtaagtcaccgaaagaaatgagccaaaacgagctcgagaatatcttcaatcgatctatgggactgttccgtttattccacgagaaggacgtcttcgagggttattatcgcttgcacttgtccaggcgtctgctcaacaagcgctcagccagcgacgataatgagctcgcgttcatcgcacgtttgaaagacgaatgtggatacacgttcacgagtaagatggagagcatgtttagcgatatgctcacatctggtgatttgaacagggaattccacgaaaccaaatttgcctcgggcacgccgcttgacgcgagcttctccgtgctcaccacaggcgtgtggcccatgagaatgcagaagtctcacccgttcttgccttcagaatgcgaagcagcatgtgccgctttcgaagcgttctatctcggtcgtcacgcggggcgtaagatctactggcagtcagccatgggtcaggcggagatcaagtttaccgttgcgagtggcgagtatgatctcatcaccagcacacgccatatgtgcgtgttgatgctcttcaatcgacacaacgtgttgacaacggcgcagatttctcagctcacattgatgcacgatgacgagctcaaggcttgcttgcaagcgctctcgtgcgtcaagggaaagaacgtcctcaagagaacgcccgacggcaaggaggtgcttccaaccgatacttttgaagtgaacgaagacttctcatcgaagagttccagagtaaagatctccacgatttcttccagacgagagaacgaccacgaacgagccagcaaatcacggcagctctccgacgatcgcaagtatcaagtcgaggccaccattgttcgcgtgatgaagacgaagaaacgactcagtcataacgacatcgtcgtcgaagtgactgctcaggtaaagaatcggttcatgccgactccagctgacatcaaaaaatatatcgagggtcttgtcgagaaggattacatcagacgcgatccgaatgatcgaagattgtacgaatacgtcgcgtag

SEQ ID NO: 17812 - protein, 809 aa, Ostreococcus tauri
MDSPHRDKSNDIRRARALEPHVSAHARASRAMGDDEAIERARAASTSAIESTDARERDGESDGRGSAALGKRRADGSTGRALEPFRHRVRQDPEFVESTLRALRDGTTKLLRLETSGLSFEALYGSAYALVLRKQGDALYDAIFGAVTDHLCQHVAISVANVAAEGDVEFLKALETGFLTHRKGTQMLVDVFNYLDRVHLPRSGKANLEPVGKLSMTLWRECVVRNPRIKRRMRSCVLDLIRRERDGERIDRDTLRQVTDMLLGLGESVYVEEFESNVLEETRSYYKALAQKRIDIDDCPTYLKLAETRIDQERDRSEAYMAPTTTTLLVAEVRQQLLKEMSQSLLHNTTSGMVHMLRTSQLDSLSCLYKLFSAMDDLEGIRDLMFEHIKDVGKGIVNDSENEKNPAQFVEELLKYKGKYDDILRVAFANSRVIESQCNQAYQYVANLNPRSPEYMSLYLDQVLRKSPKEMSQNELENIFNRSMGLFRLFHEKDVFEGYYRLHLSRRLLNKRSASDDNELAFIARLKDECGYTFTSKMESMFSDMLTSGDLNREFHETKFASGTPLDASFSVLTTGVWPMRMQKSHPFLPSECEAACAAFEAFYLGRHAGRKIYWQSAMGQAEIKFTVASGEYDLITSTRHMCVLMLFNRHNVLTTAQISQLTLMHDDELKACLQALSCVKGKNVLKRTPDGKEVLPTDTFEVNEDFSSKSSRVKISTISSRRENDHERASKSRQLSDDRKYQVEATIVRVMKTKKRLSHNDIVVEVTAQVKNRFMPTPADIKKYIEGLVEKDYIRRDPNDRRLYEYVA

SEQ ID NO: 17813 - DNA, 2274 bp, Aedes aegypti
  CDS (1)..(2274)
atgtcttcttcttaccgtgtgataagtttttgtttgcgggggttccgtgacaggtgtcaaaagtgcaaacaacaggacgaaacatggaccaaactgtcagacggaattgggcgcctctaccgtcaggaggaaagcctgaatctcgaacggttcttgcagtaccacacctatgtctacaattactgcaacatttaccaaggagacgtgttctacgacagcggccaggaattgtactaccgggtgaagggattcgtagagtgtcgcttgtttgagcttcaggaagtcttcgactacatctcggatgaagagtcattggtatactacgtggagcgatggaaagagttcagttcggcgagtgatgtcgtgaacagagtgtgctctcatttgaatctcttctgggtgaaaccagagcaagcaaaaggtcgccgtgacgtctacgacatttatcagctaacattggtggcttggtatgagcatgtgtttctgtgggtgaattgtgtgattaccagttcggttctagagctgatcgaaaaagcgcgcaatggtgaaaacgtcgatatgagtttagtgtccggtgttgtcagctcctgcttagagctaggacagaaaatagagggcccaaacgcagaagaacatcatctgtgcttgtacagagagaactttgagaccccgctcctagagagtaccgaagctttctacaagcaaaagagcgaggagttccttaagacgaactcagttatggaatacatgaagtttgtagtgctgcgtctgggtacagaatggaagtttgcgcaggaccatttgcatgagagctctcgagaccgattgattaaaacgtgtgaacgagttcttatccaaggccatttggaggagttacaatctgtatttcagaacttgctagaaaacgataacgttttcgatctaagctgtttatacgcgctgctggctcgtacagaaaatggtcttgcgcaactgaaggatgttttggaaactcacatttataatcaaggcactatcgcgattgccaagtgtagagaagttacaactgatctgaatatctacgtccaaactattctggcggttcacaagaagtaccagacactgataagtacaatctttgataaggatagtggatttctagttgcactggacagagcatgcgccaggtttgtcaatgataatgacgtaacaggtgcaagattaagtccaatcgatttggctaagttctgtgacgcattactcaaacagtgcctcaataccccagaggtcgtcaaactggatgacgccctctacacactgatggtcctcttcaaatacatcgatgacaaagacgcattccagaagctctgcagcaaaatgctggtcaagcggctctgtaactacatgtccgccaacaaccacatcaaagcctccataatgtccaaactgatgatggccgtaagcttcgagtacaccagtacgctacggtgcatgttccatgacattttagtttcacatgaactcaacggtcaatacaagcaacagcacgttcaggatctctctgacacgaacatcgaccttaacgtccaattactatccagcactttctaccaacctaattcgaatgtgaagttgatgcttccccttgagcttgaacaatgcgtcacccgatacaacgatatctacggtcatcgaaaccccacaaggaagctcacctggttgcacaacatgagtcgcggcgaactaaccacaaactgcttccgaatgcagtatactctacaggtcaacacattccagatgaccatcctactgcagttcaacgatcaaacttcctggactattcatcaactgagcgagaatacaggcatcgacctcgacgccctaattcagtcacttagggttttgatcgaaagcaagttgcttaaatctcagaacaacgagaacagcctcctaccgagctcatcggtggaactcaacaccggattccataatgcagaatcaatcctcaacataaactaccagatcggttcggaaatgagcgcacagcaacaggaagcttgccagaaacaggcggaagagaagaaccgcttcgttatacaggcagcaatagtaaggatcatgaagcagcacagaactatgaatcattccgatcttgtcgccgaagtcctgaagcagttatcgaaaggtttgaagcccaaggttcgggctatcaagaaagccattgatgtgttgatcgaaaaggaatacttggaacgccaagaaggaacagtggatgcctacagctacatgggttga

SEQ ID NO: 17814 - protein, 757 aa, Aedes aegypti
MSSSYRVISFCLRGFRDRCQKCKQQDETWTKLSDGIGRLYRQEESLNLERFLQYHTYVYNYCNIYQGDVFYDSGQELYYRVKGFVECRLFELQEVFDYISDEESLVYYVERWKEFSSASDVVNRVCSHLNLFWVKPEQAKGRRDVYDIYQLTLVAWYEHVFLWVNCVITSSVLELIEKARNGENVDMSLVSGVVSSCLELGQKIEGPNAEEHHLCLYRENFETPLLESTEAFYKQKSEEFLKTNSVMEYMKFVVLRLGTEWKFAQDHLHESSRDRLIKTCERVLIQGHLEELQSVFQNLLENDNVFDLSCLYALLARTENGLAQLKDVLETHIYNQGTIAIAKCREVTTDLNIYVQTILAVHKKYQTLISTIFDKDSGFLVALDRACARFVNDNDVTGARLSPIDLAKFCDALLKQCLNTPEVVKLDDALYTLMVLFKYIDDKDAFQKLCSKMLVKRLCNYMSANNHIKASIMSKLMMAVSFEYTSTLRCMFHDILVSHELNGQYKQQHVQDLSDTNIDLNVQLLSSTFYQPNSNVKLMLPLELEQCVTRYNDIYGHRNPTRKLTWLHNMSRGELTTNCFRMQYTLQVNTFQMTILLQFNDQTSWTIHQLSENTGIDLDALIQSLRVLIESKLLKSQNNENSLLPSSSVELNTGFHNAESILNINYQIGSEMSAQQQEACQKQAEEKNRFVIQAAIVRIMKQHRTMNHSDLVAEVLKQLSKGLKPKVRAIKKAIDVLIEKEYLERQEGTVDAYSYMG

SEQ ID NO: 17815 - DNA, 2328 bp, Phaeosphaeria nodorum
  CDS (1)..(2328)
atggcctctgcatccgcgaccacgtctacgatgccaccggtccctgcaaaggacgatgtgaatgccacatggaaatacctcgaagccggtgtcgataagatcatgaccaacctccgcgggggcatggacatgaagacatacatgggcctctacaccgcgatccacaacttctgtaccgcgcagaaggctgtcgccggctcgtcatttcacgccgctaacaaccgcggtggcgcacatcttctcggtgaagacctctaccaacatctcatcgaatatctcaagacacatcttcaaggcgtccaggacgagtcgcggcaacatgtcgacgaggcgctcctcacattctacatcaaggagtggaatcggtacacgaccgccggacagtacaacaaccatttgtttcggtacctcaaccgtcattgggtgaagcgcgagatggacgagggaaagaagaacatctacgatatctacaccttgcacttggtccgctggaaggaggacatgttcaccggcacccaggagagcgtcatgcgcagcgtcctgaagcttgtcgagaagcagcgaaacggcgagaccattgagcagtcacagatcaagtcggtcgtcgactcgttcgtatctctgggcctggacgagtcggacagctccaagtctactctcgacgtttataaggagttcttcgagaagccgttcctcgcagccaccgctgaatactacgacaacgaatcgaagcaatttttggccgagaacagcgtggtcgagtacatgaagaaggctgagtcccgcctagacgaggagaaagagcgcgtgccgctgtacctgctcaacgagatcatgtctcctttgatgcggacatgtgagcagtcgctcattaccaaccactcacaagctcttagggaagaattccagattcttctcgaccacgacaagatcgacgaccttggccgcatgtacaagttgcttgcccgcattcccgagggcctggatcctcttcgtggccgtttcgagacccacgtccgtaaggctggcttggctgccgtcgacaagattgcccaagagggcgacagcttagaacccaaggtctacgtcgaggcgctcctcgaagtccacacacaataccaagacctcgtgaacaaggcgttcaacggcgagtcagagtttgtgcgttccttggacaacgcctgccgcgaattcgtcaaccgcaacaagatatgtaaatcgggttccaacaagtctccagaactgctcgcaaagtacaccgatactctgctgaagcgatcgagcgcaaagatgagcgaagaggacgatatggagaagctgcttacacagatcatgacagtcttcaagtacattgaggacaaggacgtttttcagaagttctactcgcgcatgttggcgaagcgtctggtacagactacctcggcttccgatgatgctgagaccagcatgatatccaagctcaaggaggcctgtggtttcgagtacaccaacaagcttcagcgcatgttccaagatatccagatttccaaggacttgaactctgcctttaaggagtggcagtcgaacaacttggacgaggctgacatgaagaccaacgtcgatgcgagctaccacatccttggaaccggtttctggccgctcaacccacccaccactccattcacgcccccacaacttatcgtccagacttatgaccgtttcgcccgtttctacaaccacaagcaccagggtcgcaagctcacatggctctggcagttgtgcaagggtgaagtcaaggcaaactactgcaaggttcttaactccaaggcatcgcctaccttccaggtctcgacttatcagatgggcattatgctactattcaacgatagtgatactgtcacttacgacgagatcgcggaggccacgaagctgaacaaggagacactcgaccctagcttaggcgtcttcctaaaggcaaaggttctgatcgcgcagcctgagaacgccaagacggagtcgggcaccacctacaagctcaacaccgctttcaagaccaagaaggcgaagatcaacctcaacatcggtatcaagtcggagcagaaggctgaggctgaagacacgcacaagaccattgaggaggaccgcaagctactcatgcagtccgccattgtgcgtatcatgaagtctcgcaagaagatgaagcaccaacagctcgtctccgagacgattcagcagatcaagaaccgcttcatgccccgcgtgcccgacatcaagaagtgcatagacatcctgcttgagaaggagtacctggagcgtcttgagggtgacgagctcggctatctcgcctaa

SEQ ID NO: 17816 - protein, 775 aa, Phaeosphaeria nodorum
MASASATTSTMPPVPAKDDVNATWKYLEAGVDKIMTNLRGGMDMKTYMGLYTAIHNFCTAQKAVAGSSFHAANNRGGAHLLGEDLYQHLIEYLKTHLQGVQDESRQHVDEALLTFYIKEWNRYTTAGQYNNHLFRYLNRHWVKREMDEGKKNIYDIYTLHLVRWKEDMFTGTQESVMRSVLKLVEKQRNGETIEQSQIKSVVDSFVSLGLDESDSSKSTLDVYKEFFEKPFLAATAEYYDNESKQFLAENSVVEYMKKAESRLDEEKERVPLYLLNEIMSPLMRTCEQSLITNHSQALREEFQILLDHDKIDDLGRMYKLLARIPEGLDPLRGRFETHVRKAGLAAVDKIAQEGDSLEPKVYVEALLEVHTQYQDLVNKAFNGESEFVRSLDNACREFVNRNKICKSGSNKSPELLAKYTDTLLKRSSAKMSEEDDMEKLLTQIMTVFKYIEDKDVFQKFYSRMLAKRLVQTTSASDDAETSMISKLKEACGFEYTNKLQRMFQDIQISKDLNSAFKEWQSNNLDEADMKTNVDASYHILGTGFWPLNPPTTPFTPPQLIVQTYDRFARFYNHKHQGRKLTWLWQLCKGEVKANYCKVLNSKASPTFQVSTYQMGIMLLFNDSDTVTYDEIAEATKLNKETLDPSLGVFLKAKVLIAQPENAKTESGTTYKLNTAFKTKKAKINLNIGIKSEQKAEAEDTHKTIEEDRKLLMQSAIVRIMKSRKKMKHQQLVSETIQQIKNRFMPRVPDIKKCIDILLEKEYLERLEGDELGYLA

SEQ ID NO: 17817 - DNA, 2199 bp, Arabidopsis thaliana
  CDS (1)..(2199)
atgagtaatcagaagaagaggaattttcagatagaggcgtttaagcatcgagtcgttgtggatcccaaatacgctgataaaacttggcagattcttgagcgtgcgatccatcagatttacaatcaagatgctagcggtctcagtttcgaagaactttacagaaatgcgtacaacatggtcctgcacaagtttggtgagaagctatatactgggtttattgctactatgacttctcatctcaaagaaaaatccaagcttatcgaggcagctcagggagggtcgtttctagaagagcttaataagaaatggaatgagcacaacaaagcgttagagatgattcgagacattctcatgtatatggataggacttatattgagagcaccaaaaagactcatgttcatccgatggggcttaacttgtggagggataatgttgtgcatttcactaagatacatacaaggcttctaaacactcttcttgatctagtgcagaaggaacggataggtgaagttattgatagggggttgatgaggaatgtcattaagatgtttatggatttgggtgaatctgtgtatcaggaggattttgagaagccgtttttggatgcgtcttctgagttttataaggttgagtctcaggagtttattgaatcttgtgattgtggggactatctgaagaaatcagagaaacgccttactgaagagatagagagggtagcgcactacttagatgccaagagcgaagagaagattactagtgtggttgagaaagagatgattgccaaccacatgcagagactggttcacatggagaactcaggtctggttaatatgcttctgaatgacaagtatgaggatttgggtagaatgtacaacttgtttcgcagggttactaatggtcttgttactgtcagagacgttatgacttcgcatcttagggagatgggaaaacaactggttactgatccggaaaagtcaaaggatccggtggaatttgtacaacgtctattggatgagcgggataaatatgacaaaatcatcaacaccgcatttggcaatgataaaacctttcagaatgccctgaattcttcattcgagtatttcatcaacttgaatgctcgttctcctgagtttatctccctgtttgttgatgacaagctacggaaaggacttaagggtatcaccgatgtggatgttgaggttatccttgataaagtgatgatgctgttccgttatttacaagagaaagatgtctttgagaagtactacaagcagcatttggctaaaaggcttctctcaggcaaaactgtgtcagatgacgcagaaaggagtttaatagtgaaactaaagacagaatgtggctatcagttcatttcaaaattggaaggcatgttcactgacatgaagacttcagaggacacaatgcgtgggttttatggcagtcaccccgagctttcagaaggacctacacttattgttcaggtacttacaactggttcttggccaacacagcctgcagtaccttgtaatctcccagctgaagtttcagttctctgtgagaagttccgttcttactaccttgggacacataccggtagaagattgtcctggcaaacaaacatgggcacagcagatatcaaagccatctttggaaagggtcagaaacatgaactgaacgtgtcgactttccagatgtgtgttctcatgttgttcaacaattctgatcgactcagctacaaagagatcgaacaggctacagaaatcccggcagcagatcttaaacgctgtttgcagtcgctagcttgtgtaaagggcaaaaacgtgataaagaaagaacccatgagcaaagacataggagaggaggatttgttcgttgtgaacgacaagttcactagcaagttttacaaagtgaagatcggaactgtggttgcccaaaaggaaacagaaccggagaagcaagagacgagacagagagtggaggaagacagaaaacctcagattgaagcagccatcgtaaggatcatgaagtccaggaaaatactagaccacaacaacataatcgccgaggtgacgaaacagttgcagccacggttcctagctaatcccacggagataaagaagagaatcgagtcgctcattgaacgagatttcttggaaagggatagtacagaccggaaactttaccgctatctagcctaa

SEQ ID NO: 17818 - protein, 732 aa, Arabidopsis thaliana
MSNQKKRNFQIEAFKHRVVVDPKYADKTWQILERAIHQIYNQDASGLSFEELYRNAYNMVLHKFGEKLYTGFIATMTSHLKEKSKLIEAAQGGSFLEELNKKWNEHNKALEMIRDILMYMDRTYIESTKKTHVHPMGLNLWRDNVVHFTKIHTRLLNTLLDLVQKERIGEVIDRGLMRNVIKMFMDLGESVYQEDFEKPFLDASSEFYKVESQEFIESCDCGDYLKKSEKRLTEEIERVAHYLDAKSEEKITSVVEKEMIANHMQRLVHMENSGLVNMLLNDKYEDLGRMYNLFRRVTNGLVTVRDVMTSHLREMGKQLVTDPEKSKDPVEFVQRLLDERDKYDKIINTAFGNDKTFQNALNSSFEYFINLNARSPEFISLFVDDKLRKGLKGITDVDVEVILDKVMMLFRYLQEKDVFEKYYKQHLAKRLLSGKTVSDDAERSLIVKLKTECGYQFISKLEGMFTDMKTSEDTMRGFYGSHPELSEGPTLIVQVLTTGSWPTQPAVPCNLPAEVSVLCEKFRSYYLGTHTGRRLSWQTNMGTADIKAIFGKGQKHELNVSTFQMCVLMLFNNSDRLSYKEIEQATEIPAADLKRCLQSLACVKGKNVIKKEPMSKDIGEEDLFVVNDKFTSKFYKVKIGTVVAQKETEPEKQETRQRVEEDRKPQIEAAIVRIMKSRKILDHNNIIAEVTKQLQPRFLANPTEIKKRIESLIERDFLERDSTDRKLYRYLA

SEQ ID NO: 17819 - DNA, 2511 bp, Oryza sativa subsp
  CDS (1)..(2511)
atgtctcacccccacgccaccgcccccaagcgccccggccacttctcctcctcctccgccgccgcctcctccccgacctcccccgcgcagccgcacatgaagaaggccaagttccccggctcctcctcctcctcctcctccgccgccgcccccggggtcaccgagaagaacgggctccacgtcgatcccacggccgccgccgcccggaccggtgggcgcaccaacggcgaggaggatgcggagatggtgctcgccgaccaggaggagctcgccgctccgagcgcatcggccccggcgggggtcgccgccaacctcttccggaagaaggccacactcccccagccatccgccgcccgcaagcccctccgaatcaaaataggtcagccaaaattgccaacaaactttgaggaggatacatgggctattttgaaagatgctattacagctatatttctaaaacagaaactttcgtgcgatgttgaaaaactttaccaggctgcaggtgacctttgtctacacaagctaggcgcaaatctatacgaacgcataaagaaagaatgtgaagtacacatatcggcaaaaatatcagcattagtgggtcaaagtccagatttagtagtatttttgtctctggtgcaaagaacatggcaagatttttgcgatcagatgttgattattcgtggtattgctttacttcttgatgtaaaatatgtcaagaatgttgcaaacatttgttcagtgtgggacatggggttgaagctattccgcaagcatctttcactgtctccggagattgaacacaaaactgttactggtcttctaagattaattgagagtgagaggcttggtgaagcaatagacaggacattacttagtcatcttctgaagatgtttactgctcttggaatgtattctgagagttttgaaaagccctttctggagtgtacatctgaattttatgctactgaaggtgttaaatatttgcagcagtctgatattccagactatctcaagcatgtggagacaaggttgcaagaagaacatgaaaggtgtattctatatttggaagctaacactaggaagccgcttataacagctacagaaaagcaattattgcagcggcacacatctgcaattcttgagaagggattcacaatgcttatggaagcaaatcgtgtaaaagacctctcgaggatgtacacactcttccagagggttgatgccattgagttgctaaagcaagcacttagttcatatattcggggcacaggccagggcattatcatggatgaagaaaaggacaaagaactggtgccctttcttctggaatttaaggcatcgcttgatagaatattggaggaaagttttgccaaaaatgaggctttctccaatacaataaaagagtcattcgaacatcttatcaatttacgccagaatcgacctgctgaattgattgcgaagtttcttgatgagaaacttcgagctggaaataaaggtacctccgaagaagagctggagggaatattggataaagttttggttctgttccgatttatacaaggaaaagatgtatttgaggcattctacaagaaggatctggctaagaggttgctgctggggaagagtgcatcgatagatgctgaaaaatcaatgataacaaagctcaaaactgagtgtggaagtcaatttaccaacaagctggagggaatgttcaaggacattgaattatccaaagaaataaatgagtctttcaagcaatcatctcaagcaaggacaaagcttccatctggcattgaaatgagtgttcacgtgcttacaacaggctattggccaacatatccaccaatggatgtgaaactcccccatgaacttaatgtctatcaggatatatttaaagaattctatttgagcaagtatagtggaaggcgtttgatgtggcaaaactcattgggtcactgtgtattaaaagcagagttcccaaaaggtaaaaaggaacttgcggtgtcactatttcagagtgtggttttgatgttgttcaatgatgcacaaaaactaagcttcctcgatatcaaggaatcgactggtattgaggataaagaattgcgaagaacgctgcaatcacttgcatgcggtaaagttcgggttctccaaaagatgccaaaagggcgagacgtagaagataaggacgaatttgtatttaatgaagaatttagtgcccctctctatcgcataaaggtgaatgctattcagatgaaggagacggttgaagaaaacacaagcacaactgagagagtattccaggacagacagtatcaggtggatgctgccatagttcgaataatgaagacacgtaaaaccctcagccacacgcttctaataactgagctttttcagcagctcaagttcccaatcaagccatcggatatcaagaaaagaatagagagcctaatcgacagggagtacctggagagagacaggagtaacccccagatctacaattacctggcttga

SEQ ID NO: 17820 - protein, 836 aa, Oryza sativa subsp
MSHPHATAPKRPGHFSSSSAAASSPTSPAQPHMKKAKFPGSSSSSSSAAAPGVTEKNGLHVDPTAAAARTGGRTNGEEDAEMVLADQEELAAPSASAPAGVAANLFRKKATLPQPSAARKPLRIKIGQPKLPTNFEEDTWAILKDAITAIFLKQKLSCDVEKLYQAAGDLCLHKLGANLYERIKKECEVHISAKISALVGQSPDLVVFLSLVQRTWQDFCDQMLIIRGIALLLDVKYVKNVANICSVWDMGLKLFRKHLSLSPEIEHKTVTGLLRLIESERLGEAIDRTLLSHLLKMFTALGMYSESFEKPFLECTSEFYATEGVKYLQQSDIPDYLKHVETRLQEEHERCILYLEANTRKPLITATEKQLLQRHTSAILEKGFTMLMEANRVKDLSRMYTLFQRVDAIELLKQALSSYIRGTGQGIIMDEEKDKELVPFLLEFKASLDRILEESFAKNEAFSNTIKESFEHLINLRQNRPAELIAKFLDEKLRAGNKGTSEEELEGILDKVLVLFRFIQGKDVFEAFYKKDLAKRLLLGKSASIDAEKSMITKLKTECGSQFTNKLEGMFKDIELSKEINESFKQSSQARTKLPSGIEMSVHVLTTGYWPTYPPMDVKLPHELNVYQDIFKEFYLSKYSGRRLMWQNSLGHCVLKAEFPKGKKELAVSLFQSVVLMLFNDAQKLSFLDIKESTGIEDKELRRTLQSLACGKVRVLQKMPKGRDVEDKDEFVFNEEFSAPLYRIKVNAIQMKETVEENTSTTERVFQDRQYQVDAAIVRIMKTRKTLSHTLLITELFQQLKFPIKPSDIKKRIESLIDREYLERDRSNPQIYNYLA

SEQ ID NO: 17821 - DNA, 2340 bp, Aedes aegypti
  CDS (1)..(2340)
atgtctagattaaactctcatggagcgacggggctacggaatattaacctggaagagatatgggccgacctggagggaggcataaaacaggtgtataaacaagagcaaagcctgagccccgcccgttatatgcagctttacacccatgtatacaattactgcactagcgttcatcaacaaccggctaaccggcagtcttcatccaaggtctccaagaaaggaacggcaattccttctggcggcgctcagctcgtcggtcaggagttgtacaagcgattgaaggagtttctcgaatgctatctgatcaaactgcaggaaaatggcatcgaccttatggacgaggaagtcttgagcttctacacgaagcgatgggaagagtaccagttttcgagcaaagtgttgaatggcgtttgcgcctatctcaaccggcactgggtgaaacgtgagtgcgaagaaggtcgcaaggatgtgtacgaaatctatcagctagcattggtgacgtggcgcggaaacctgttcaaacagctgaacaaacaggtgaccaacgcggtcctgaagctgatcgagcgggagcgtaatggggaaaccatcaactcacgtttggtgtccggtgtgattaactgctacgtcgagttgggactgaacgaagaagatccgaacgcgaagggacagaacctttccgtttacaaggaaagtttcgaaaatatcttcctggaggataccgaaatgttctacactcgcgaaagtgcggaattcctgcgggagaatcccgtaaccgaatacatgaagcgcgtggagctacgactgaatgaggaacagaagcgtgtgcaggtgtacttgcacgaaagcactcaggaccgattggccaagacgtgcgagcgagtgctgatccagaaacatttggaacagttccgcactgagttccaaaacttgcttgattctgacaagaattccgatctgcgccgcatgtattcgttggtggctcgtataacagagggcctggtggaattgaaggcaattctggaaacccacatccacaaccaaggcctggccgcaattgccaagtgtggtgaagctgcgttgaacgatcccaaaatctacgtccaaaccatcctggaggttcacaagaagtacaatgcactggtacttaccgcattcaacaatgacagtggatttgtggctgccctggacaaagcatgcggtaaattcatcaacacaaacgctgttacggaggccagtaagagcgcaagcaagagtccggaactgttggccaagtactgtgatttactgctgaaaaagtccagcaaaaacccagaggaagccgagctggaggacaccctgaatcaagtgatggttgtcttcaaatacatcgaagacaaggacgtgttccagaagttctacagtaagatgctggccaagcgcctctgtcatcacatgtccgccagcgacgatgccgaagcgtcgatgatttccaaactgaagcaggcctgcgggttcgagtacaccagcaagctgcagcggatgttccaagacattggagtttcgaaggatctcaacgaacaatacaaaacgtacgtcaagggactgcgtgaggcaaccaggcaacaaacgggcaatgaaatcgattttagcatactggtgctttccagtggctcctggccattcaatcagagtttcacgttttcacttccatttgagctggagcaatctgtacatcgatttaacagcttttacgccaagcaacattccggacgaaagctcaactggttgtacaacatgtgtcgcggtgagctgatcacaaactacttccgaatgcggtacactcttcaggccagtacgttccagatggccgtcttactacagttcaacgaacaagaatcgtggactattcaacagttgagtgagaataccggcatcaatcatgaaaatctgatccaggtattgcagattctgcttaagacgaaactacttcaatcatacgacgatgaagccaatctccagcctgcctcttctgtggaactgaatcagggattcaaaaacaaaaaacttcgcatcaacatcaacttcccccttaagacagaactgaaggtagagcaggaggcgactcacaaacacatcgaagaggatcgcaagattctgatacaggcagcgatcgtgagaatcatgaaaatgcgcaaggctctgaaccacacccaccttgtcggagaagttctgaatcaactgtcgacacgtttcaagcccaaggtccaggtgatcaagaaatgcatcgatattctgatagagaaggaatatctcgaacgtcaagaaggacagaaagacacatacagctatctggcttga

SEQ ID NO: 17822 - protein, 779 aa, Aedes aegypti
MSRLNSHGATGLRNINLEEIWADLEGGIKQVYKQEQSLSPARYMQLYTHVYNYCTSVHQQPANRQSSSKVSKKGTAIPSGGAQLVGQELYKRLKEFLECYLIKLQENGIDLMDEEVLSFYTKRWEEYQFSSKVLNGVCAYLNRHWVKRECEEGRKDVYEIYQLALVTWRGNLFKQLNKQVTNAVLKLIERERNGETINSRLVSGVINCYVELGLNEEDPNAKGQNLSVYKESFENIFLEDTEMFYTRESAEFLRENPVTEYMKRVELRLNEEQKRVQVYLHESTQDRLAKTCERVLIQKHLEQFRTEFQNLLDSDKNSDLRRMYSLVARITEGLVELKAILETHIHNQGLAAIAKCGEAALNDPKIYVQTILEVHKKYNALVLTAFNNDSGFVAALDKACGKFINTNAVTEASKSASKSPELLAKYCDLLLKKSSKNPEEAELEDTLNQVMVVFKYIEDKDVFQKFYSKMLAKRLCHHMSASDDAEASMISKLKQACGFEYTSKLQRMFQDIGVSKDLNEQYKTYVKGLREATRQQTGNEIDFSILVLSSGSWPFNQSFTFSLPFELEQSVHRFNSFYAKQHSGRKLNWLYNMCRGELITNYFRMRYTLQASTFQMAVLLQFNEQESWTIQQLSENTGINHENLIQVLQILLKTKLLQSYDDEANLQPASSVELNQGFKNKKLRININFPLKTELKVEQEATHKHIEEDRKILIQAAIVRIMKMRKALNHTHLVGEVLNQLSTRFKPKVQVIKKCIDILIEKEYLERQEGQKDTYSYLA

SEQ ID NO: 17823 - DNA, 2196 bp, Medicago truncatula
  CDS (1)..(2196)
atgagtaaccaaaagaagaattttcggattgaaccgtttaagcatagggttgttatggatccgaaatatgcagataagacatggaagattcttgaagatgctattcatgagatttataatcataacgctagtggtcttagttttgaagaactttacagaaatgcatacaatatggtgcttcacaaatttggtgataggttgtactcaggattggttgcgaccatgactgcacatctcaaagaaatagctaaatctattgaagcagctcaaggagggtcttttctggaagaactgaacaggaaatggaatgatcataacaaagcattgcaaatgattagagatatactgatgtacatggacagaacattcattccaagcgccaaaaagactcctgttcatgaactcgggctgaatctgtggagagaaagtgtcatttattccaaccagatcaggactcggctgctgaacacacttctggaattagtacagagtgaacgcactggtgaagttattgatagagggataatgagaaatataacaaaaatgctaatggatttaggtccagctgtttatggtcaagattttgaggctcattttcttcaagtttcagctgagttttatcaggtagaatcccaaagattcattgagtgttgtgattgtggtgattatcttaagaaagctgaaaggcgtctgaatgaggaaatggatagagttggccattacatggatcccgagactgaaaagaagattaataaagtggtggagacgcagatgattgaaaatcacatgctcaggttaatccatatggagaattctggtttagtcaacatgctttgtgatgataaatatgaagatttgggtaggatgtataacttgttccgccgtgtagccgacggtcttttgaaaatacgagaggtgatgactttacacataagggaatctggtaaacagcttgttacagatcctgaaagattgaaggatccagtcgagtttgtgcagaggctcttagatgagaaagacaaatacgacaagattataaaccaggcattcaacaacgacaagtctttccagaatgctttgaattcctcgtttgaatatttcattaacttgaatccccgttctccagagttcatttcactatttgtagatgataaacttcgtaagggtctgaaaggggtcaacgaggacgatgtagaagttactctggacaaggtgatgatgctgttccgatacttgcaagaaaaagatgtttttgagaagtattataaacagcatctggcaaagaggcttttgtctggaaaaacggtttctgatgatgctgaaagaagtctcattgttaagctcaagactgaatgtggctatcaatttacatcaaaattagagggaatgtttacagacatgaaaacctctcaggacacaatgcagggcttttatgccagccaccctgacttaggcgatggtcctacgcttactgtccaggttcttacaacagggtcttggccaactcagtctagtattacgtgcaacctgccggtggaaatatctgcactttgcgagaagtttcggtcgtattaccttggcacacatactggcaggagattgtcatggcaaaccaacatgggctttgcagacttaaaagcaacctttgggaagggtcagaagcatgagttaaatgtctctacctaccaaatgtgtgtccttatgcttttcaataatgctgataaacttagctacaaggagattgagcaagcaactgagattcctgccccggatcttaagagatgtctgcaatcattggctttagttaagggaagaaatgtccttagaaaggagccgatgagtaaagatgttggtgaggatgatgctttctctgtcaatgacaagttcagtagtaaactatacaaggttaaaataggaactgtagttgcacaaaaggaatccgaacctgagaaacaggaaactcggcagcgagtggaggaggacaggaagcctcagattgaggcggcaatagtgaggatcatgaaatctaggaggctacttgatcataacaatcttatagctgaagtcacaaagcagttgcagttacgtttccttgcaaatccaacagaggtcaagaaacgcattgagtctctcattgagcgggactttttggagagggatgataacgacagaaaaatgtatcggtatcttgcatag

SEQ ID NO: 17824 - protein, 731 aa, Medicago truncatula
MSNQKKNFRIEPFKHRVVMDPKYADKTWKILEDAIHEIYNHNASGLSFEELYRNAYNMVLHKFGDRLYSGLVATMTAHLKEIAKSIEAAQGGSFLEELNRKWNDHNKALQMIRDILMYMDRTFIPSAKKTPVHELGLNLWRESVIYSNQIRTRLLNTLLELVQSERTGEVIDRGIMRNITKMLMDLGPAVYGQDFEAHFLQVSAEFYQVESQRFIECCDCGDYLKKAERRLNEEMDRVGHYMDPETEKKINKVVETQMIENHMLRLIHMENSGLVNMLCDDKYEDLGRMYNLFRRVADGLLKIREVMTLHIRESGKQLVTDPERLKDPVEFVQRLLDEKDKYDKIINQAFNNDKSFQNALNSSFEYFINLNPRSPEFISLFVDDKLRKGLKGVNEDDVEVTLDKVMMLFRYLQEKDVFEKYYKQHLAKRLLSGKTVSDDAERSLIVKLKTECGYQFTSKLEGMFTDMKTSQDTMQGFYASHPDLGDGPTLTVQVLTTGSWPTQSSITCNLPVEISALCEKFRSYYLGTHTGRRLSWQTNMGFADLKATFGKGQKHELNVSTYQMCVLMLFNNADKLSYKEIEQATEIPAPDLKRCLQSLALVKGRNVLRKEPMSKDVGEDDAFSVNDKFSSKLYKVKIGTVVAQKESEPEKQETRQRVEEDRKPQIEAAIVRIMKSRRLLDHNNLIAEVTKQLQLRFLANPTEVKKRIESLIERDFLERDDNDRKMYRYLA

SEQ ID NO: 17825 - DNA, 2235 bp, Medicago truncatula
  CDS (1)..(2235)
atgtcaatgagtgaaaggaaaactatagacctagaacaaggatgggattttatgcataggggtattatgaagctcaagaacattcttgaaggtttgcctgaacctcaattcagtcctgaagattatatgatgctgtacacaactatatacaatatgtgtactcaaaagcctcctaatgactattctcagccattgtatgacaagtacaaggaagcgttcgaagagtacatcgtgtcaacggtcttaccttctttgagagaaaaacatgatgagtttatgttacgagaacttgtaaagagatgggcgaaccataaaatcatggtgaggtggctttctcgattctttcactatttggaccgctacttcattgcccggaggtcacttccacctcttaatgaagttgggttggcttgcttccgtgatttggtttacaaggaactgcatgggaaaatgagagatgcaattatttcactaattgatcaagaacgtgagggagagcagattgatcgagctctattaaagaatgtattagatatatttgttgaaattggaatggggaaaatggaccactatgagaatgattttgaagctgacatgctcaaagacacttctgcttattattctcgaaaggcttcaaattggatcctagaagattcttgtcctgattatatgctcaaggctgaggagtgcttaagacgggagaaagatagggtggctcattacctgcactctagtagtgagccaaagttattagagaaagttcaaaatgagctgttgtctgtatatgcaagtcagctccttgagaaagagcactcgggttgtcatgctctacttagagatgataagtgtgaagacttgtcaaggatgttcaggctattttctaaaataccccgtggcttggatcctgtttctagtatatttaagcagcatgttaccactgaaggcatggcgttggtgaagcatgctgaagatgcagctagtaacaaaaaggcagaaaaaagggatattgttggtacgcaggagcaggtttttgtccggaaagtgattgagctacatgacaagtacctggcatatgtgaactcctgtttccagaatcacactcttttccacaaggctcttaaagaggcttttgaggtcttttgcaacaaaggtgttgctggaaactctagtgcagaacttcttgccactttttgtgataacattcttaagaaaggaggaagtgaaaaattgagtgatgaagcaattgaagaaactcttgaaaaggtggtaaagctgctcgcttatattagtgacaaggacttgtttgccgagttctacaggaagaagcttgctcgcaggcttctttttgacaagagtgccaatgatgatcacgagagaagtattttgacaaaattgaagcaacagtgtggtggacagtttacctcaaagatggaaggaatggttacagatttgacgctggcaaaggagaatcaaactagctttgaggagtatttaagcaatactcctaatgcagaccctggaatagacttaacagttacagttctgaccactggtttctggcctagttataaatcttttgatctcaatcttcctgcggaaatggttaagtgcgttgaagttttcaaagaattttattcaactaaaacaaagcacagaaaacttacatggatttactccttgggtacctgtaacataagtgggaaatttgacccaaaaaccgtggagcttgttgtcacaacctaccaggcctcagcattgttgctttttaattcctctgatagattgagttattctgagataatgactcagttaaacttattggatgaagatgtcattaggctactccactccttgtcatgtgcaaagtataagattcttatcaaggagccaaacacaaaaacgatattacccactgattattttgaatttaatgcaaagttcactgacaaaatgaggaggatcaagattcctctacctcctgtggatgagaagaaaaaagtaattgaggatgttgacaaggacagaagatatgccattgatgcctcaattgtacgcattatgaagagtcggaaagttttgggctatcaacagttagttatggagtgcgttgagcagttgggtcgcatgtttaagcctgatgtcaaagcaattaaaaagcggattgaagatttgatttctcgggattacttggaaagagacaaagagaatccaaatatgttcaagtacttagcttga

SEQ ID NO: 17826 - protein, 744 aa, Medicago truncatula
MSMSERKTIDLEQGWDFMHRGIMKLKNILEGLPEPQFSPEDYMMLYTTIYNMCTQKPPNDYSQPLYDKYKEAFEEYIVSTVLPSLREKHDEFMLRELVKRWANHKIMVRWLSRFFHYLDRYFIARRSLPPLNEVGLACFRDLVYKELHGKMRDAIISLIDQEREGEQIDRALLKNVLDIFVEIGMGKMDHYENDFEADMLKDTSAYYSRKASNWILEDSCPDYMLKAEECLRREKDRVAHYLHSSSEPKLLEKVQNELLSVYASQLLEKEHSGCHALLRDDKCEDLSRMFRLFSKIPRGLDPVSSIFKQHVTTEGMALVKHAEDAASNKKAEKRDIVGTQEQVFVRKVIELHDKYLAYVNSCFQNHTLFHKALKEAFEVFCNKGVAGNSSAELLATFCDNILKKGGSEKLSDEAIEETLEKVVKLLAYISDKDLFAEFYRKKLARRLLFDKSANDDHERSILTKLKQQCGGQFTSKMEGMVTDLTLAKENQTSFEEYLSNTPNADPGIDLTVTVLTTGFWPSYKSFDLNLPAEMVKCVEVFKEFYSTKTKHRKLTWIYSLGTCNISGKFDPKTVELVVTTYQASALLLFNSSDRLSYSEIMTQLNLLDEDVIRLLHSLSCAKYKILIKEPNTKTILPTDYFEFNAKFTDKMRRIKIPLPPVDEKKKVIEDVDKDRRYAIDASIVRIMKSRKVLGYQQLVMECVEQLGRMFKPDVKAIKKRIEDLISRDYLERDKENPNMFKYLA

SEQ ID NO: 17827 - DNA, 2256 bp, Aspergillus oryzae
  CDS (1)..(2256)
atggctggcaccacactgattgaagcgatatgcgatgatgcatatgctgattcatacttcgagaagatatggggccagcttgacgccgcgctgaccgcgatcttcgatggcgggaaaccggagatctcgctagaagagttgtacaaaggtgctgagaatgtatgtcgtcaagggcgagcttcagcgttggccagacagctacaggagcgatgccgaggacatgtatccggtaaactgcgtgatactctggtagtaaaagcagcaggtgggaacaacatcgatacgctacgagctgttgtggattcgtggacaacatggcaatcaaagctggttacagtacgctggattttctattacctcgatcagtcgttcctcctccactccaaggaatacccagttatacgcgagatgggcttgatccagttccggcaacatatattcaatgacacagtcttacagccacaagtgctacagggcgcctgcgacctggtcgaagcggaccgtgatgaagggcgcagcatatcggccgactcatctttgcttcggaacgctattgaatttttccacggccttgatgtttatactactggctttgaacccctccttgtctctgagtcgaagaagttctttgcatcatgggctcagcatgaagcctcaggatatcttgccactttcgcggaaaacagtcaccgcttgattgaacaagaagtagacaggtgtacattgttctctttaaatcggagcacaaaacagaagttgtctgaactattggatcaggagttagtggcagaacaagagaatgttctcctcaaccaaaatgatattcttggtctgctgcgggccggcaataagactgccttagaaaagctgtatacgcttcttcaacgaagggatttgggggcgaaattgaaaacggcattcagcagttacatcgttgaggaggggaccagtatcgtctttgacgatgataaagaggcggagatggttgtccggctgctggatttcaaacagcagcttgacgagacttggaacaactccttccatcgacatgaggagctagggcacgccttgcgcgaggcatttgagacgttcatgaacaagggacgaaagtcgggcgcatccggaggcaccgataaccccaaaaccggtgagatgattgccaaatatgtggatagattactgaaaggcggctggaaattgcctcctggacgaaaagccgaggatgtacctcttgccgatgaggatgccgaaattaatcgacagttagaccaagtgttagatctcttccgatttgtacatggcaaagctgtatttgaggcattttacaagaacgaccttgctcgccggctactgatgggccgaagtgccagtgatgatgcagagaagagcatgctggcgaggctcaagacagaatgcggttccagcttcacacacaatctggaatctatgtttaaagacatggacgtggcgcgggatgaaatggcggcgtataattctattcagcgtgaacgcaagcaccgattaccggttgatttgaatgttagtgtgctctccgcggccgcgtggccgtcatatcccgatgttcaggtgcgaataccgcccgaaatcgcgacggctgtcagcgatttcgaaaagttttactatagtaaatacaacgggcgcaaacttaattggaagcaccaacttgcgcactgccagctgcgcgcaaggtttcccaaaggcgataaggagctggtagtcagttcattccaggccatcgtgcttctgctgtttaacgacatatcagaaaaggggacccttagctatctgcagatccaggaggcgacgaagttatctgaccaggagctgaaacggacccttcaatcgctcgcatgcgccaaataccgagtgcttgctaagaagccgaagggtcgcgaagtcaacacaacggacgagttctcgtacaacgagggattctccgacgtgaagatgcggatcaagatcaatcagatccagctaaaggagactaaggaggagaataagacgacacatgagcgggtggcagccgatcgtcattatgagacccaggcagctattgtgcggatcatgaagagtcggaagaccatcacacatcccgagttggtagcggaggtgattaaggcgacgcgcagccgaggagtgctcgaacctgcggatatcaagaagaacattgagaagctgattgaaaaggactacatggagcgagaagagggaaaccggtatcagtatgtggcataa

SEQ ID NO: 17828 - protein, 751 aa, Aspergillus oryzae
MAGTTLIEAICDDAYADSYFEKIWGQLDAALTAIFDGGKPEISLEELYKGAENVCRQGRASALARQLQERCRGHVSGKLRDTLVVKAAGGNNIDTLRAVVDSWTTWQSKLVTVRWIFYYLDQSFLLHSKEYPVIREMGLIQFRQHIFNDTVLQPQVLQGACDLVEADRDEGRSISADSSLLRNAIEFFHGLDVYTTGFEPLLVSESKKFFASWAQHEASGYLATFAENSHRLIEQEVDRCTLFSLNRSTKQKLSELLDQELVAEQENVLLNQNDILGLLRAGNKTALEKLYTLLQRRDLGAKLKTAFSSYIVEEGTSIVFDDDKEAEMVVRLLDFKQQLDETWNNSFHRHEELGHALREAFETFMNKGRKSGASGGTDNPKTGEMIAKYVDRLLKGGWKLPPGRKAEDVPLADEDAEINRQLDQVLDLFRFVHGKAVFEAFYKNDLARRLLMGRSASDDAEKSMLARLKTECGSSFTHNLESMFKDMDVARDEMAAYNSIQRERKHRLPVDLNVSVLSAAAWPSYPDVQVRIPPEIATAVSDFEKFYYSKYNGRKLNWKHQLAHCQLRARFPKGDKELVVSSFQAIVLLLFNDISEKGTLSYLQIQEATKLSDQELKRTLQSLACAKYRVLAKKPKGREVNTTDEFSYNEGFSDVKMRIKINQIQLKETKEENKTTHERVAADRHYETQAAIVRIMKSRKTITHPELVAEVIKATRSRGVLEPADIKKNIEKLIEKDYMEREEGNRYQYVA

SEQ ID NO: 17829 - DNA, 2244 bp, Aspergillus oryzae
  CDS (1)..(2244)
atgccgccgtccctgattccccagacacctcacaaggatgacttggatgaaactgcggttcacaatttttgcacatcacaaaaggctgtcggcaatggccatggattacaagcacatcgcggtggttcgtcttcatcaacgcacaaatcctcaaagatataccgggcccctggatctaacactgcttcagcacatctgctaggagaggagctatataagctgcttggagagtacctttcacgtcacctcgatgctgtgcatcatgagtctaagggccacgccgaggaggccctgctagggttctacatccgcgaatggacccgttacacgacagccgccaagtacatcaaccatcttttcggctatctcaaccgacattgggtcaagcgggagatcgatgagggtaaaaagaatgtctacgacgtgtatactctgcacctcgtcaagtggaaagatgacttcttcatgaaggtccatgagaaggttatggaagcagttttgaaccttgtcgagaagcagcgcaatggcgaaacgatcgagcagtcgcagatcaagagtatcgtcgattcttttgtttctctcggactggacgaaagcgacagctccaagtcgacgcttgaagtataccggatgttctttgagaagcccttcattgcggctaccaaggtctattatgaaaacgagtcgcgccagttcgtggcagaaaacagcgtggtggagtacatgaagaaggcggaggcacgcttagaagaagaaaaagctcgtgtgggcttgtatttgcacccggatatctcgaagcatcttaccgacacttgtttggatgtcctcgtcactgcccactccgaactactgcgtgatgaattccaggttctgctggacaacgaacgtcaagaggacctagctcggatgtaccggcttttgtctcgcatcaaagaaggtttggatccactgcggacgaagttcgagacccatgttaggaaagcaggtttggcagcggttgagaaggttgcagcggaaggcgaggcgttcgaacccaagatataccagagcctggttaacgaggcattcaatggcgaatcggagtttgttcgctccttggacaatgcgtgccgcgagtttgtcaaccgcaataagatctgcgcgtctagttcgacgaaatcgccggagctgctggctaagtataccgactcgctgctgaagaagggatccaaggctgctgaggagtccgagctggaggagatgctagtccagattatgacggtcttcaaatatattgaagataaggatgtcttccagaaattttactccaagatgcttgctaagcgattggtgcatgtcagctcggtgtccgatgatgcggagactagtatgatcagcaagctcaaggaagcctgcggtttcgagtacaccaataagttgcagcgcatgttccaagatatccagatctcgaaggatcttaacgccagctacaaagactggcaagacaaggtacttgatgacgacgatcggaggaagctggtggatgcacactttcagattctgggaactgggttctggcctcttcaagctccgtcgacagacttccttgcgccaccggaaattgtcaagacagctgagcgattccaaaacttctactttgacaagcataatggtcggaagctgacatggctttggcagctatgcaaaggtgaaatcaaaactaactacatcaaaaacacaaaggtaccttatactttccaagtttcaaccttccagatgggcattcttctccttttcaatgagaccgataccttgacgtacgaggacattcaaaaagctaccactcttgctcctgagattcttgagccgaacttgggtatcttcctcaaggcgaaggtacttaccatcaaccctgaggggtccaagccggaacctggcacctcgttcacattgaactacaactttagacacaaaaaggtcaaggtcaacctcaacattcagatcaagtcggaacaaaaggttgagtcggacgatacgcacaagactatagaggaggaccgtaaactactgcttcagtctgccatcgtccgaatcatgaaatcgcgcaagaagatgaagcacgtccaacttgtccaggaagtgatccaacaagtcaaatcccgtttcccacccagggtacccgatatcaagaagaatatcgaagccctcatggagaaggactatatagagcgcttggacggtgatgaaatcgcgtatattgcataa

SEQ ID NO: 17830 - protein, 747 aa, Aspergillus oryzae
MPPSLIPQTPHKDDLDETAVHNFCTSQKAVGNGHGLQAHRGGSSSSTHKSSKIYRAPGSNTASAHLLGEELYKLLGEYLSRHLDAVHHESKGHAEEALLGFYIREWTRYTTAAKYINHLFGYLNRHWVKREIDEGKKNVYDVYTLHLVKWKDDFFMKVHEKVMEAVLNLVEKQRNGETIEQSQIKSIVDSFVSLGLDESDSSKSTLEVYRMFFEKPFIAATKVYYENESRQFVAENSVVEYMKKAEARLEEEKARVGLYLHPDISKHLTDTCLDVLVTAHSELLRDEFQVLLDNERQEDLARMYRLLSRIKEGLDPLRTKFETHVRKAGLAAVEKVAAEGEAFEPKIYQSLVNEAFNGESEFVRSLDNACREFVNRNKICASSSTKSPELLAKYTDSLLKKGSKAAEESELEEMLVQIMTVFKYIEDKDVFQKFYSKMLAKRLVHVSSVSDDAETSMISKLKEACGFEYTNKLQRMFQDIQISKDLNASYKDWQDKVLDDDDRRKLVDAHFQILGTGFWPLQAPSTDFLAPPEIVKTAERFQNFYFDKHNGRKLTWLWQLCKGEIKTNYIKNTKVPYTFQVSTFQMGILLLFNETDTLTYEDIQKATTLAPEILEPNLGIFLKAKVLTINPEGSKPEPGTSFTLNYNFRHKKVKVNLNIQIKSEQKVESDDTHKTIEEDRKLLLQSAIVRIMKSRKKMKHVQLVQEVIQQVKSRFPPRVPDIKKNIEALMEKDYIERLDGDEIAYIA

SEQ ID NO: 17831 - DNA, 2466 bp, Aspergillus oryzae
  CDS (1)..(2466)
atgtctctgagggcaaggcaaaagatccgggctccgcggaggggtctcaacaccaataaaactgacgactttgaaaccaactgggagggcttatcgacgtccttgaagaagatccatacgaaagatgcgtccaatctctctttcgagcagttataccggaatgcctacaacatcgtcctgatgatgcgcggggacgagctatatgaacgtgtcaagaagcttgagcaagaatggcttgatacagaagtacagaagcgggtgactgcggcaatctcatctatcctactccaggcgaaggaccaagccgaaattcaggatcaagaaaatgagcggagggataccggggagaagttcttaaatgtgttaagggaggcctgggaagatcaccagatttccatgggaatgattacagatgtgctcatgtacatggatcgagtcgtttcggcagaccataagaaaccttcgatctacgtcgcatccatggctttgtttcgtgactttgtgctacgatctgcggttcgtgccgatgcagagtcgatggttgccgatgtgctcaaatctaccgtgctctttatgatccagctcgaacggtcagggcagatgataaaccggccactgatcaggcattgcatttatatgcttgagggtctctatgaaacgataactgaagaggaatcatcaaagctttacctaactatgttcgagccggcattcattgagacgagtaaagtcttctacagggcagaaggacggcggctgctagagacgggagacgctgctacattctgtaaagctgcctccgaccgcatagcggaagaaggggcgcgctgcctctcaacactgtcaccactgtcggagccgaagattaaagacgtactagataaagagctgatcggctcaaacattgcagaggttattaacctggagggcaccggtgtcaagaatatgcttgacaatgaccgcatggatgttctgcggaatgtttatgtgctaagcgcaagggtagacagtaaaaagatccctttgactgctgccgtccaaaagcgcatagtggagatgggtgatgagattaataagtcggcagcagcagcagcacaagctcaacccactaaatcggcagaaaagaccgccgagggtggaaagaaacctgcggagaagcctgtgaaccagcagacagtgtccgctatcaaatgggtcgacgatgtcttggggttgaagaccaagttcgacaaaatctgggaggaatcattccggtccgatccgacgatgcaaagcgccatcacgacgagtttctcagagtttatcaactcaaacacgcgcagctcagagtatctgtcgctattctttgatgagaacttgaaaaagggcatcaaaggcaaaacggagactgaagtggatgctcttctggacaacggcattacccttctacgctatgtgaaggacaaggatctctttgaggcgtactacaagaagcacctatcccggcgtcttctgatgaagcgctcagttagcatggatgccgagcggcagatgatatccaagatgaagatggaggtcggaaaccagttcacgcaacgcttagaatccatgttcaaggacatgacggtttccgaagacttgactgctagctacaaggaacatattcggggggcaggtgatcccgaccagaagcccgttgatttagaaatcaatgtccttacgagtactatgtggcccatggaggccatgtctagtattaaaggcgatgaagttcaacttccttgcatcttccccaaggaaattgaccacctgagacaaagcttcgaacagttctatctcagcaaacacaatggccggaagctatcatggcaggccagtatgggcacggcagatatccgggctacgttccacaggtctaacggcaaggtccagcggcatgagcttaatgtctccacctatgccatggtaatcctgctgcttttcaatgacgtcccgcaaggcgagcctctcacatatgaagagattcaggcccggacaaggattccagaccacgatttaattcgcaacctacagtcgcttgcagttgcaccaaagacacgggtcctgaagaaggatcccatgagcaaggacgtcaaacctgcagatagattcgtcttcaacaacgacttccagagcccgttcatgaaagtccgcatcggtgttgtcagcggcagcgccaacaaggtagagaatcaagaccaaagaaaggaaactgagaagcgaatgaacgatgaacgcggtgccagcattgaagctgctgttgtgcgaatcatgaaacaacgaaagacactggtccattccaagcttatgagcgaggtcctaagccaattgtccgcccgcttcgttcccgacgtgaacatgatcaagcgacgtatcgagagcttgatcgaccgcgaatacctcgaacgagtcggagaagacccgccaacgtatggctacgtcgcttaa

SEQ ID NO: 17832 - protein, 821 aa, Aspergillus oryzae
MSLRARQKIRAPRRGLNTNKTDDFETNWEGLSTSLKKIHTKDASNLSFEQLYRNAYNIVLMMRGDELYERVKKLEQEWLDTEVQKRVTAAISSILLQAKDQAEIQDQENERRDTGEKFLNVLREAWEDHQISMGMITDVLMYMDRVVSADHKKPSIYVASMALFRDFVLRSAVRADAESMVADVLKSTVLFMIQLERSGQMINRPLIRHCIYMLEGLYETITEEESSKLYLTMFEPAFIETSKVFYRAEGRRLLETGDAATFCKAASDRIAEEGARCLSTLSPLSEPKIKDVLDKELIGSNIAEVINLEGTGVKNMLDNDRMDVLRNVYVLSARVDSKKIPLTAAVQKRIVEMGDEINKSAAAAAQAQPTKSAEKTAEGGKKPAEKPVNQQTVSAIKWVDDVLGLKTKFDKIWEESFRSDPTMQSAITTSFSEFINSNTRSSEYLSLFFDENLKKGIKGKTETEVDALLDNGITLLRYVKDKDLFEAYYKKHLSRRLLMKRSVSMDAERQMISKMKMEVGNQFTQRLESMFKDMTVSEDLTASYKEHIRGAGDPDQKPVDLEINVLTSTMWPMEAMSSIKGDEVQLPCIFPKEIDHLRQSFEQFYLSKHNGRKLSWQASMGTADIRATFHRSNGKVQRHELNVSTYAMVILLLFNDVPQGEPLTYEEIQARTRIPDHDLIRNLQSLAVAPKTRVLKKDPMSKDVKPADRFVFNNDFQSPFMKVRIGVVSGSANKVENQDQRKETEKRMNDERGASIEAAVVRIMKQRKTLVHSKLMSEVLSQLSARFVPDVNMIKRRIESLIDREYLERVGEDPPTYGYVA

SEQ ID NO: 17833 - DNA, 2082 bp, Oryza sativa subsp
  CDS (1)..(2082)
atgtgcacgcagaagccgccgcacgactactcgcagcagctctacgacaagtaccgggagtcattcgaggagtacatcacctccatggtcttaccttcattaagagataaacatgacgagtttatgctgagggaactagtaaagaggtggtcaaaccataaaatcatggttcggtggctgtcacgtttcttcttttatcttgatcgatacttcatctcacggaggtcgcttataccacttgaacaagttgggcttacttgcttccgagatttgatataccaagaaatcaaaggacaagttaaaggtgcagtgatagctctgattgacaaagagcgtgaaggcgaacagatagacagggccctgctgaagaatgtcctgggcatatttgttgaaattggactaggcagtatggaatgttatgagaatgactttgaagatttcttgcttaaggatactacagattactactctctcaaggctcaaagctggattctcgaggactcttgtcctgattacatgataaaggctgaggagtgcttgaagaaagagaaggagcgagttggtcactacttgcatattagtagtgaacagaagttactggagaaagtgcaaaatgaattgcttgcacaatatgcaactcccctgttggagaaggagcattctgggtgttttgcattgcttcgtgatgacaaggaggaagacctttctaggatgtacaggctcttctccaaaattaaccgcggtctagaacctattgctaacatgtttaaaacgcatgttacaaatgagggcacagccttggtcaagcaagcagaagattctgctagtaataagaagcccgagaaaaaggacatggttggtatgcaggaacaggtttttgtctggaaaatcattgagctccatgacaagtatgtagcttatgtcacagaatgtttccagggtcacaccctctttcataaggcccttaaagaagcattcgaggtcttctgtaacaagggtgtctctggcagttcaagtgctgaactgcttgccaccttctgtgacaatattctgaagaaaggttgcagtgaaaagctcagtgatgaagccatcgaagatgctcttgagaaggtggtgcgattgcttgcatacatcagcgataaagacctctttgctgagttttacaggaaaaaacttgcaaggagattgctttttgataagagtgccaatgatgaacatgaaagaagcatacttaccaaactcaagcagcagtgtggtggacaatttacttctaaaatggagggaatggttactgatcttactgttgcaagggaccatcaaactaagtttgaagagtttgtggctgcacatcaggagttgaatcctgggatagacttggctgtcactgttttgacaacaggattctggccaagttacaagactttcgatattaaccttcctgctgagatggtgaaatgcgtggaggttttcaaggagttttaccaaacaagaacaaaacacagaaagcttacctggatatattccttgggaacctgcaatatcaatgcaaagtttgaggcaaaaactattgagctcattgtcacaacatatcaggctgcgttgctgctgctattcaacggatctgacaggcttacttattctgagattgtaacacagctaaacttatcagatgatgatgtagtgcgtttgctccattctctctcctgtgcaaaatacaagattcttaacaaggaaccagctaatagatctatttctcccaacgatgtttttgagttcaattcaaaattcactgacaggatgagaagaattaagatacccctacctcctgttgatgaaaagaaaaaggttgtcgaagatgttgacaaggacaggcggtatgcaattgatgcatcgattgtgcgcattatgaagagtcgcaaagttatgggccatcagcagctagttgcggaatgtgtggagcagctcagccgcatgttcaagcctgacttcaaagccatcaagaagcgaatcgaggacctcatcacaagggattacctggaacgcgagaaggacaacgctaatgtgtacagatacctggcttga

SEQ ID NO: 17834 - protein, 693 aa, Oryza sativa subsp
MCTQKPPHDYSQQLYDKYRESFEEYITSMVLPSLRDKHDEFMLRELVKRWSNHKIMVRWLSRFFFYLDRYFISRRSLIPLEQVGLTCFRDLIYQEIKGQVKGAVIALIDKEREGEQIDRALLKNVLGIFVEIGLGSMECYENDFEDFLLKDTTDYYSLKAQSWILEDSCPDYMIKAEECLKKEKERVGHYLHISSEQKLLEKVQNELLAQYATPLLEKEHSGCFALLRDDKEEDLSRMYRLFSKINRGLEPIANMFKTHVTNEGTALVKQAEDSASNKKPEKKDMVGMQEQVFVWKIIELHDKYVAYVTECFQGHTLFHKALKEAFEVFCNKGVSGSSSAELLATFCDNILKKGCSEKLSDEAIEDALEKVVRLLAYISDKDLFAEFYRKKLARRLLFDKSANDEHERSILTKLKQQCGGQFTSKMEGMVTDLTVARDHQTKFEEFVAAHQELNPGIDLAVTVLTTGFWPSYKTFDINLPAEMVKCVEVFKEFYQTRTKHRKLTWIYSLGTCNINAKFEAKTIELIVTTYQAALLLLFNGSDRLTYSEIVTQLNLSDDDVVRLLHSLSCAKYKILNKEPANRSISPNDVFEFNSKFTDRMRRIKIPLPPVDEKKKVVEDVDKDRRYAIDASIVRIMKSRKVMGHQQLVAECVEQLSRMFKPDFKAIKKRIEDLITRDYLEREKDNANVYRYLA

SEQ ID NO: 17835 - DNA, 2313 bp, Oikopleura dioica
  CDS (1)..(2313)
atgcgactcaagcggcttgattccagccatacgctagaacgaacatgggccgaagtccaagaaggtctcaacaatgtatttttccaccacggaatgggtcacaagcgctacatcgagctttacactcacgtttacaactactgcacagccgtcaataccccagctatgatgaaacctccaattgacggaagaaaagattttgtcggttacgaactctaccagctcgtccgtgattatttggaaaatttcgtcaagaatcagaatataaaagcgcgaaagcacgtcgacttgctggatttttacgcgatcgcttgggagaattactcgctatcgacaaaagtactcaacggcatgtgcgcgtacatgaatcgcttcttcaaaaaacaagcgcacgaagctgaaagctcattctacgacattcgaacggacaatgttttcgttgtgacagacctcgcacttaaaatttggaatgatcattttttctgcaatgtttcaaaacgactcacagttatgctcatcgatcagattcaggaggaacgaaaagggaatcaaatcaattcctcgcttgtgaaaagcgtgattaattcgtacataactctcggatcagctgtttctgttggagaaccaaaaccatcacctgaacagatgctgaggatttacgaaaatgagtttgttcggcattacattgaagaaactgtccgtttttacaaagtcgaatctggccgctttctcgacagtaatccgggaattaacggattgaaggagtttctcaaaaaggctgaactccggcttgatgaagagcaagtgcggtccgaccgctatcttcattactcgtcaacgaaaaaagcaatgaaggaatgcgaaaaagcaattatcggtgaccgaaaagacgtttttgttcaaactttcgtgccgcttcttgaacacagtcagacagcagatctcgctagaatgtacagacttgcgaagagagtcgaccaaggtctcacgccaatcaggagcaaatttgaagactttatcgtcaccagcgggttgacctcgatggaatctgttgggctgacgccggagccaaaagtattcgtcggaaagattttgcatatttacgagcgattctcgcgcataaatcaaatctgcttcgacaatgagttcaaagaatcacttgaccgcgctgcgacaaaatttataaacaagaataaagcttgtgaagaaaaaacaacactttgtccagaattagtcgcaaaatattgcgacagtcttttaaaaagatctaacaaaacaatcgatgaacctggaactgaggaaaaattcaatcaaatcatgattgttttcaagtatatagaagataaagatgttttcgaaacacattattcacgcatgttcgcgaatcgattaatcaagggtacttctggatctgacgatgctgaagagtcaattttgcaaaaactgaatgatatttgcggcttcgaatacacagcaaagctgaacagaatgtggcaagatataaacacgtcaaagggcacaacagaaaagttcaaaaaggcgctgcaagaagaaggcattgagcttggtatcgacttttctgtgaaacttttgagtactggatcgtggcccctaacaaaggcgttcagcatggagcttccaggagtcttgtcgaattcgctgagggttttcaaagaacactacgataagaagaatccgagaagaaccctcacgtggctttgttctcaaagcaagggtgaaattactgcaaattatcaatcaaagaactacgtactcgttgcatcaacaattcaaatggcagttctgctcttgttcaataatgagaaccagctcactgttgctgaaatctcaagaagacttgctgtcgactcaactctgatgcaacaagtggtacttgtgctgttaaaacatcaacttctttgtcttggtccttatccctccctgccggaaacagagggctgcgataaattacccggcaaagaagaccttctttcttacaataaagatttcttcaacaagcgtacaaaaatcaccatcaacgtcacgtacaagattgaaagccacgcggaagaccctgttacgactaaaaatatcgaagcagatcgcaaattgctcattcaagcggcaattgtgagaatcatgaagacacggaagcaagtcaatcattcaactctcatgtctgaaactatcaaccatttagccagccgtttcaaaccgtcggtccaaaaaatcaaggcctgtgtggaaactctgatagaaaaagaatacatcgaaagagtagacgggaaagatgtctacatttatgtcgcttaa

SEQ ID NO: 17836 - protein, 770 aa, Oikopleura dioica
MRLKRLDSSHTLERTWAEVQEGLNNVFFHHGMGHKRYIELYTHVYNYCTAVNTPAMMKPPIDGRKDFVGYELYQLVRDYLENFVKNQNIKARKHVDLLDFYAIAWENYSLSTKVLNGMCAYMNRFFKKQAHEAESSFYDIRTDNVFVVTDLALKIWNDHFFCNVSKRLTVMLIDQIQEERKGNQINSSLVKSVINSYITLGSAVSVGEPKPSPEQMLRIYENEFVRHYIEETVRFYKVESGRFLDSNPGINGLKEFLKKAELRLDEEQVRSDRYLHYSSTKKAMKECEKAIIGDRKDVFVQTFVPLLEHSQTADLARMYRLAKRVDQGLTPIRSKFEDFIVTSGLTSMESVGLTPEPKVFVGKILHIYERFSRINQICFDNEFKESLDRAATKFINKNKACEEKTTLCPELVAKYCDSLLKRSNKTIDEPGTEEKFNQIMIVFKYIEDKDVFETHYSRMFANRLIKGTSGSDDAEESILQKLNDICGFEYTAKLNRMWQDINTSKGTTEKFKKALQEEGIELGIDFSVKLLSTGSWPLTKAFSMELPGVLSNSLRVFKEHYDKKNPRRTLTWLCSQSKGEITANYQSKNYVLVASTIQMAVLLLFNNENQLTVAEISRRLAVDSTLMQQVVLVLLKHQLLCLGPYPSLPETEGCDKLPGKEDLLSYNKDFFNKRTKITINVTYKIESHAEDPVTTKNIEADRKLLIQAAIVRIMKTRKQVNHSTLMSETINHLASRFKPSVQKIKACVETLIEKEYIERVDGKDVYIYVA

SEQ ID NO: 17837 - DNA, 2442 bp, Oryza sativa subsp
  CDS (1)..(2442)
atgaagaaggccaagttccccggctcctcctcctcctcctcctccgccgccgcccccggggtcaccgagaagaacgggctccacgtcgatcccacggccgccgccgcccggaccggtgggcgcaccaacggcgaggaggatgcggagatggtgctcgccgaccaggaggagctcgccgctccgagcgcatcggccccggcgggggtcgccgccaacctcttccggaagaaggccacactcccccagccatccgccgcccgcaagcccctccgaatcaaaataggtcagccaaaattgccaacaaactttgaggaggatacatgggctattttgaaagatgctattacagctatatttctaaaacagaaactttcgtgcgatgttgaaaaactttaccaggctgcaggtgacctttgtctacacaagctaggcgcaaatctatacgaacgcataaagaaagaatgtgaagtacacatatcggcaaaaatatcagcattagtgggtcaaagtccagatttagtagtatttttgtctctggtgcaaagaacatggcaagatttttgcgatcagatgttgattattcgtggtattgctttacttcttgatgtaaaatatgtcaagaatgttgcaaacatttgttcagtgtgggacatggggttgaagctattccgcaagcatctttcactgtctccggagattgaacacaaaactgttactggtcttctaagattaattgagagtgagaggcttggtgaagcaatagacaggacattacttagtcatcttctgaagatgtttactgctcttggaatgtattctgagagttttgaaaagccctttctggagtgtacatctgaattttatgctactgaaggtgttaaatatttgcagcagtctgatattccagactatctcaagcatgtggagacaaggttgcaagaagaacatgaaaggtgtattctatatttggaagctaacactaggaagccgcttataacagctacagaaaagcaattattgcagcggcacacatctgcaattcttgagaagggattcacaatgcttatggaagcaaatcgtgtaaaagacctctcgaggatgtacacactcttccagagggttgatgccattgagttgctaaagcaagcacttagttcatatattcggggcacaggccagggcattatcatggatgaagaaaaggacaaagaactggtgccctttcttctggaatttaaggcatcgcttgatagaatattggaggaaagttttgccaaaaatgaggctttctccaatacaataaaagagtcattcgaacatcttatcaatttacgccagatcagctcaagcccttttttccaacagaatcgacctgctgaattgattgcgaagtttcttgatgagaaacttcgagctggaaataaaggtacctccgaagaagagctggagggaatattggataaagttttggttctgttccgatttatacaaggaaaagatgtatttgaggcattctacaagaaggatctggctaagaggttgctgctggggaagagtgcatcgatagatgctgaaaaatcaatgataacaaagctcaaaactgagtgtggaagtcaatttaccaacaagctggagggaatgttcaaggacattgaattatccaaagaaataaatgagtctttcaagcaatcatctcaagcaaggacaaagcttccatctggcattgaaatgagtgttcacgtgcttacaacaggctattggccaacatatccaccaatggatgtgaaactcccccatgaacttaatgtctatcaggatatatttaaagaattctatttgagcaagtatagtggaaggcgtttgatgtggcaaaactcattgggtcactgtgtattaaaagcagagttcccaaaaggtaaaaaggaacttgcggtgtcactatttcagagtgtggttttgatgttgttcaatgatgcacaaaaactaagcttcctcgatatcaaggaatcgactggtattgaggataaagaattgcgaagaacgctgcaatcacttgcatgcggtaaagttcgggttctccaaaagatgccaaaagggcgagacgtagaagataaggacgaatttgtatttaatgaagaatttagtgcccctctctatcgcataaaggtgaatgctattcagatgaaggagacggttgaagaaaacacaagcacaactgagagagtattccaggacagacagtatcaggtggatgctgccatagttcgaataatgaagacacgtaaaaccctcagccacacgcttctaataactgagctttttcagcagctcaagttcccaatcaagccatcggatatcaagaaaagaatagagagcctaatcgacagggagtacctggagagagacaggagtaacccccagatctacaattacctggcttga

SEQ ID NO: 17838 - protein, 813 aa, Oryza sativa subsp
MKKAKFPGSSSSSSSAAAPGVTEKNGLHVDPTAAAARTGGRTNGEEDAEMVLADQEELAAPSASAPAGVAANLFRKKATLPQPSAARKPLRIKIGQPKLPTNFEEDTWAILKDAITAIFLKQKLSCDVEKLYQAAGDLCLHKLGANLYERIKKECEVHISAKISALVGQSPDLVVFLSLVQRTWQDFCDQMLIIRGIALLLDVKYVKNVANICSVWDMGLKLFRKHLSLSPEIEHKTVTGLLRLIESERLGEAIDRTLLSHLLKMFTALGMYSESFEKPFLECTSEFYATEGVKYLQQSDIPDYLKHVETRLQEEHERCILYLEANTRKPLITATEKQLLQRHTSAILEKGFTMLMEANRVKDLSRMYTLFQRVDAIELLKQALSSYIRGTGQGIIMDEEKDKELVPFLLEFKASLDRILEESFAKNEAFSNTIKESFEHLINLRQISSSPFFQQNRPAELIAKFLDEKLRAGNKGTSEEELEGILDKVLVLFRFIQGKDVFEAFYKKDLAKRLLLGKSASIDAEKSMITKLKTECGSQFTNKLEGMFKDIELSKEINESFKQSSQARTKLPSGIEMSVHVLTTGYWPTYPPMDVKLPHELNVYQDIFKEFYLSKYSGRRLMWQNSLGHCVLKAEFPKGKKELAVSLFQSVVLMLFNDAQKLSFLDIKESTGIEDKELRRTLQSLACGKVRVLQKMPKGRDVEDKDEFVFNEEFSAPLYRIKVNAIQMKETVEENTSTTERVFQDRQYQVDAAIVRIMKTRKTLSHTLLITELFQQLKFPIKPSDIKKRIESLIDREYLERDRSNPQIYNYLA

SEQ ID NO: 17839 - DNA, 2758 bp, Nicotiana tabacum
  CDS (235)..(2454)
  misc_feature (1647)..(1647): n is a, g, c or t
agaaggcaggactgtgagagtggaatttggttgaaattcaaccgcctcattctcaacccatttcccctataaataaacttagtgattctaaagatttgagatattttctcttacttatcgcattgtataatctgttgacaacgcaagcgatttatcaacacgaggcgattgtaattcagctcgctcccgtgatcgatccttttctctggtggcaacaaaacacgtgcttctaagatggcaatgagccagatgaagattattgaattggaggaaggatgggagtttatgcagaagggagtcacaaagttgaagaaaattttagaaggacagcaagattctttcaactctgaagagtacatgatgctctacacaactatatataacatgtgtacgcagaagcccccgcatgattactcacaacagctgtatgagaagtacaaggaagcttttgaagaatacatcaattctactgttctgcctgctttaagagagaggcatgatgagtttatgttgagggagtttgtgaaaagatgggcgaatcataaacttatggtcaggtggctctcacggttcttctattatcttgaccggtattttattgcccgaaggtcgctacctgcacttaacgaagttggtctgacgtgcttccgcgatctggtttatcaggagttgaacagtaaagctagagatgcagttattgtgttgattgatcaagaacgtgagggtgagcagattgacagggccttactgaagaacgtgcttgatatatttgttggaattggaatggggcaaatggagtattacgaaaatgactttgaagatgcaatgcttaaagataccgcagcttattattctcggaaagcttcaagttggatcgtggaagattcttgtccagattatatgttgaaggcggaggagtgcttgaagaaagagaaggatagagtgtctcattatctccatgttagtagtgagacaaaacttttggagaaagtgcaaaatgaattattggttgtatataccaatcagttacttgagaaggagcattctggatgccgagctttgcttagagatgataaggtagaggatttatctcgaatgtataggctattccacagaattcctaagggattggagcctgttgcaaatatgtttaaacagcatgtcacttctgaaggcatggtcttggtgcaacaggctgaagatacggcaagtaacaaggctgaaagttcgggctcaggggagcaggtcttcgttaggaagttgattgagctccacgacaagtatatggcttatgttacagagtgttttactaataactctctctttcataaggctctgaaggaggcatttgaggtcttctgtaacaagattgtgtcaggttgttcaagtgcagagctccttgcttcttattgtgataatattcttaaaaaaggcgggagtgaaaagctcagtgatgacgctattgaggagacattggataaggtggtcaagcttctcgcgtacatcagtgacaaagacctttatgcggagttctacaggaagaagctttctcgtcgattgctctttgataaaagtgccaatgatgaccatgaaaggcttatcttaacaaagctgaagcagcagtgtggtggacagtttacatctaanatggagggaatggtaacagacttgacattggctagggaaaatcagaaccactttcaggaatatctcagcaacaaccctgcagcaagtcctggaatcgatttaactgtcacagttcttacaactggattctggcctagttataaatcttctgatttgagtctcccagtggaaatggtaaaaagtgtggaagtcttcaaggaattctatcagacgaaaacaaaacacaggaaattgacatggatttattcattgggtacatgtaacataaacgggaagtttgcgcctaaaaccatcgaactgattgtgggaacttatcaggctgctgctctgttactgtttaatgcttcagatagattgagttactcagaaatcaagagtcaattaaatttggcggatgatgacttggtcagattgcttcattccctttcatgtgccaagtataaaattctgaccaaggagcctagcaatagaactgtctcaccatctgatcattttgagttcaactccaagttcactgacaggatgagaaggattagggtcccattgcctcctgcggatgaaaggaaaaaggtggttgaggatgtggacaaagatagacgttatgcaattgatgcctgtatcgtgcgcattatgaagagtcggaaggttcttcctcatcaacagctagtgttggagtgtgttgagcagttgagccgaatgtttaagcctgatttcaaagcaatcaaaaagcgaattgaagatcttatcactcgggattacttggaaagagacaaagagaacccgaacttgtttaagtacttggcctgaagcaatgctgtggtgcctggctgagcttctattgttctttcacattggattaagtacagctggttttccatgtaataggagtatagtaggagacaaattttttgaccttgcttataagtaggcaactgtgcagtatagaacaaaatcttatttgaatttcaaattatatgttcactagctacagcaattgaacccgagtatctctttttaaccatttttaccttgacattgttgtacacatgttgtttctatagttactcgattagctcaggcacttggtgaatcaaaaaaaaaaaaaaaaaaa

SEQ ID NO: 17840 - protein, 739 aa, Nicotiana tabacum
  misc_feature (471)..(471): The Xaa at location 471 stands for Asn, or Lys.
MAMSQMKIIELEEGWEFMQKGVTKLKKILEGQQDSFNSEEYMMLYTTIYNMCTQKPPHDYSQQLYEKYKEAFEEYINSTVLPALRERHDEFMLREFVKRWANHKLMVRWLSRFFYYLDRYFIARRSLPALNEVGLTCFRDLVYQELNSKARDAVIVLIDQEREGEQIDRALLKNVLDIFVGIGMGQMEYYENDFEDAMLKDTAAYYSRKASSWIVEDSCPDYMLKAEECLKKEKDRVSHYLHVSSETKLLEKVQNELLVVYTNQLLEKEHSGCRALLRDDKVEDLSRMYRLFHRIPKGLEPVANMFKQHVTSEGMVLVQQAEDTASNKAESSGSGEQVFVRKLIELHDKYMAYVTECFTNNSLFHKALKEAFEVFCNKIVSGCSSAELLASYCDNILKKGGSEKLSDDAIEETLDKVVKLLAYISDKDLYAEFYRKKLSRRLLFDKSANDDHERLILTKLKQQCGGQFTSXMEGMVTDLTLARENQNHFQEYLSNNPAASPGIDLTVTVLTTGFWPSYKSSDLSLPVEMVKSVEVFKEFYQTKTKHRKLTWIYSLGTCNINGKFAPKTIELIVGTYQAAALLLFNASDRLSYSEIKSQLNLADDDLVRLLHSLSCAKYKILTKEPSNRTVSPSDHFEFNSKFTDRMRRIRVPLPPADERKKVVEDVDKDRRYAIDACIVRIMKSRKVLPHQQLVLECVEQLSRMFKPDFKAIKKRIEDLITRDYLERDKENPNLFKYLA

SEQ ID NO: 17841 - DNA, 2693 bp, Nicotiana tabacum
  CDS (142)..(2367)
ttttcctcaaaactctttttcttttattccaagtttggctttgctctcctctgccgtagctttgctcctctgcagcgatctcctcgtgtcttccctttctctgacggattcaaactattgttgttacaagagttatcagagatgacgatgaaccagatgaagactattgagttggaggaaggatgggagttcatgcagaagggaatcacaaaattaaaaataattttagaagggagtccagattcatttagttctgaagagtacatgatgctctacaccactatctataacatgtgtacacagaagccgcctcatgattactctcagcagctatatgagaaatacaaggaagcttttgaagaatacatcaattctacagttctgtcttctttgagagagaagcatgatgagtttatgctgagggagcttgtaaaaagatgggcaaatcataaacttatggtcagatggctttcacggttcttccattatcttgatcggtattttattgctcgaaggtcactcccagcacttaatgaagttggtctgacgtgcttccgtgatttggtttatcaggagttgaaaagtaaagcaagagatgcagttatagcactgattgatcaagaacgtgagggtgagcagattgatagagctttattgaagaatgtgcttggtatatttgtcgaaattggaatgggggagatggagtactacgaaaatgactttgaagatgccatgcttaaagatactgccgcatattattctcgaaaagcatcaaactggattgtggaagattcttgtccagattatatgttgaaggcagaagagtgcttgaaaaaagagaaggatagagtgtctcattatttacactctagcagcgaggcaaaacttctggagaaagttcaaaatgagttattggttgtatataccaatcaattgcttgagaaggagcattctggatgccgagctctgcttatagacgataaggtagaggatttatctcgaatgtataggttattccacagaatccctaaagggttggaaccagttgcaaatatgtttaagcagcatgtcactgctgaaggcatggtcttggtgcaacaggcccgaagactcagcaagttaacaaggctgaaagttccagtggttcacaggagcaggtatttgttaggaaggttattgagctgccttgacaagtatatggcatatgtgaccaactgttttgcaaataactctctctttcacaaggctctaaaagaggcatttgaggtcttctgtaacaaagttgttgctggctgttctagtgcagagctccttgcttcttattgtgataatatccttaagaagggtgggagtgaaaaacttagtgatgatgctattgaggaaacattggataaggtggtaaagcttctagcatatatcagtgacaaagacctgtttgctgagttctacaggaagaagctttctcgtcgattgctttttgataaaagtgccaatgacgaccatgaaaggcttatcttaacaaagttaaagcagcagtgtggtgggcagtttacgtcaaagatggagggaatggtgacagacttgacattagcgaaagaaaatcagaaccactttcaggaatatctcagcaacaactcggcagctaatcctggaatagatttgactgtcacagttcttacaactggcttttggcctagttataaatcttctgatctgagtctccccgtggaaatggtgaagtgtgtagaagtcttcaaggaattttatcagacaaaaacgaaacacaggaaattgacctggatttattcattgggtacatgtaacatcaatggcaagtttgaaccaaaaactattgagctgattgtgggaacttaccaggctgctgctctattactgtttaatgcttcggatagattgagttactcacatatcaaaagtcagttaaatttggcagacgatgacttagtcagattgcttcaatccctgtcatgtgctaagtataaaattctgactaaagagcctaccagtagaactgtttcgtcaacagatcattttgaattcaactccaagtttactgacagaatgaggaggattaggatccctttgcctcctgtagatgaaaggaaaaaagtggtcgaggatgttgacaaggacagacgttatgcaattgatgcttgtattgtgcgcataatgaagagccggaaggtgcttccccattcgcagctcgtgtccgagtgtgttgagcaattgagccgcatgtttaagcctgatttcaaagcaatcaaaaagcggattgaagatcttatcacccgggactacttggaaagggacaaagagaacccaaacttgttcaagtacttggcctgaggcaacaagctgatacctgggtgatattgaatgctcttggcactattgaagtgtgagtacagctgggttttgattattagctaaggacaatagcagagaatgtttttgaccttgcctgagtaggcaacttgtgcagttagaatatcaccacctttttcagaagttggtggcacttgaattccttgcagtatatatttcagccgtgcactattatttcctgatgttcctgattgtcatgtcatttaaatgccgcatctttttgtaaattctatgctttggtgtttctagatgtgcaatactttccctggaaaaaaaaaaaaaaaaaa

SEQ ID NO: 17842 - protein, 741 aa, Nicotiana tabacum
MTMNQMKTIELEEGWEFMQKGITKLKIILEGSPDSFSSEEYMMLYTTIYNMCTQKPPHDYSQQLYEKYKEAFEEYINSTVLSSLREKHDEFMLRELVKRWANHKLMVRWLSRFFHYLDRYFIARRSLPALNEVGLTCFRDLVYQELKSKARDAVIALIDQEREGEQIDRALLKNVLGIFVEIGMGEMEYYENDFEDAMLKDTAAYYSRKASNWIVEDSCPDYMLKAEECLKKEKDRVSHYLHSSSEAKLLEKVQNELLVVYTNQLLEKEHSGCRALLIDDKVEDLSRMYRLFHRIPKGLEPVANMFKQHVTAEGMVLVQQARRLSKLTRLKVPVVHRSRYLLGRLLSCLDKYMAYVTNCFANNSLFHKALKEAFEVFCNKVVAGCSSAELLASYCDNILKKGGSEKLSDDAIEETLDKVVKLLAYISDKDLFAEFYRKKLSRRLLFDKSANDDHERLILTKLKQQCGGQFTSKMEGMVTDLTLAKENQNHFQEYLSNNSAANPGIDLTVTVLTTGFWPSYKSSDLSLPVEMVKCVEVFKEFYQTKTKHRKLTWIYSLGTCNINGKFEPKTIELIVGTYQAAALLLFNASDRLSYSHIKSQLNLADDDLVRLLQSLSCAKYKILTKEPTSRTVSSTDHFEFNSKFTDRMRRIRIPLPPVDERKKVVEDVDKDRRYAIDACIVRIMKSRKVLPHSQLVSECVEQLSRMFKPDFKAIKKRIEDLITRDYLERDKENPNLFKYLA
